United States Patent Application Publication US 2011/0183924 A1 - sequence listing, part 129

SEQ ID NO: 357065 - DNA, 7918 bp, Homo sapiens
gtgagctgaagcagggcagggcatcaactcacccaggaagtgcaaggggtttggggattttcctttcctagccaagggaaggcatgacagactgtacctggaaaaacaggacactcttgcccaaatactgcactttttgcacagtcttagcaactggcagaccaggagattctctcctgtgcctgattcattgggtcccacacccatagggccttgcttactgccagtgcagcagtctgagattaacaccccatccccgggagaactctaagaaggagctgatgtggaggagcagctgagacagttcaagatgacgaccacagtagccacagactatgacaacattgagatccagcagcagtacagtgatgtcaacaaccgctgggatgtcgacgactgggacaatgagaacagctctgcgcggctttttgagcggtcccgcatcaaggctctggcagatgagcgtgaagccgtgcagaagaagaccttcaccaagtgggtcaattcccaccttgcccgtgtgtcctgccggatcacagacctgtacactgaccttcgagatggacggatgctcatcaagctgctggaggtcctctctggagagaggctgcctaaacccaccaagggacgaatgcgcatccactgcttagagaatgtggacaaggcccttcagttcctgaaggagcagagagtccatcttgagaacatggggtcccatgacatcgtggatggaaaccaccggctgacccttggcctcatctggaccatcatcctgcgcttccagatccaggatatcagtgtggaaactgaagacaacaaagagaagaaatctgccaaggatgcattgctgttgtggtgccagatgaagacagctgggtaccccaatgtcaacattcacaatttcaccactagctggagggacggcatggccttcaatgcactgatacacaaacaccggcctgacctgatagattttgacaaactaaagaaatctaacgcacactacaacctgcagaatgcatttaatctggcagaacagcacctcggcctcactaaactgttggaccccgaagacatcagcgtggaccatcctgatgagaagtccataatcacttatgtggtgacttattaccactacttctctaagatgaaggccttagctgttgaaggaaaacgaattggaaaggtgcttgacaatgctattgaaacagaaaaaatgattgaaaagtatgaatcacttgcctctgaccttctggaatggattgaacaaaccatcatcattctgaacaatcgcaaatttgccaattcactggtcggggttcaacagcagcttcaggcattcaacacttaccgcactgtggagaaaccacccaaatttactgagaaggggaacttggaagtgctgctcttcaccattcagagcaagatgagggccaacaaccagaaggtctacatgccccgggaggggaagctcatctctgacatcaacaaggcctgggaaagactggaaaaagcggaacacgaaagagaactggctttgcggaatgagctcataagacaggagaaactggaacagctcgcccgcagatttgatcgcaaggcagctatgagggagacttggctgagcgaaaaccagcgtctggtgtctcaggacaactttgggtttgaccttcctgcagttgaggccgccacaaaaaagcacgaggccattgagacagacattgccgcatacgaggagcgtgtgcaggctgtggtagccgtggccagggagctcgaggccgagaattaccacgacatcaagcgcatcacagcgaggaaggacaatgtcatccggctctgggaatacctactggaactgctcagggcccggagacagcggctcgagatgaacctggggctgcagaagatattccaggaaatgctctacattatggactggatggatgaaatgaaggtgctagtattgtctcaagactatggcaaacacttacttggtgtggaagacctgttacagaagcacaccctggttgaagcagacattggcatccaggcagagcgggtgagaggtgtcaatgcctccgcccagaagttcgcaacagacggggaaggttacaagccctgtgacccccaggtgatccgagaccgcgtggcccacatggagttctgttatcaagagctttgccagctggcggctgagcgcagggcccgtctggaagagtcccgccgcctctggaagttcttctgggagatggcagaagaggaaggctggatacgggagaaggagaagatcctgtcctcggacgattacgggaaagacctgaccagcgtcatgcgcctgctcagcaagcaccgggcgttcgaggacgagatgagcggccgcagtggccactttgagcaggccatcaaggaaggcgaagacatgatcgcggaggagcacttcgggtcggagaagatccgtgagaggatcatttacatccgggagcagtgggccaacctagagcagctctcggccattcggaagaagcgcctggaggaggcctccctgctgcaccagttccaggcagatgctgatgacattgatgcctggatgctggacatcctcaagattgtctccagcagcgacgtgggccacgatgagtattccacacagtctctggtcaagaaacacaaggacgtggcggaagagatcgccaattacaggcccacccttgacacgctgcacgaacaagccagcgccctcccccaggagcatgccgagtctccagacgtgaggggcaggctgtcgggcatcgaggagcggtataaggaggtggcagagctgacgcggctgcggaagcaggcactccaggacactctggccctgtacaagatgttcagcgaggctgatgcctgtgagctctggatcgacgagaaggagcagtggctcaacaacatgcagatcccagagaagctggaggatctggaggtcatccagcacagatttgagagcctagaaccagaaatgaacaaccaggcttcccgggttgcagtggtgaaccagattgcacgccagctgatgcacagcggccacccaagtgagaaggaaatcaaagcccagcaggacaaactcaacacaaggtggagccagttcagagaactggttgacaggaagaaggatgccctcctgtctgccctgagcatccagaactaccacctcgagtgcaatgaaaccaaatcctggattcgggaaaagaccaaggtcatcgagtccacccaggacctgggcaatgacctggctggcgtcatggccctgcagcgcaagctgaccggcatggagcgggacttggtggccattgaggcaaagctgagtgacctgcagaaggaggcggagaagctggagtccgagcaccccgaccaggcccaggccatcctgtctcggctggccgagatcagcgacgtgtgggaggagatgaagaccaccctgaaaaaccgagaggcctccctgggagaggccagcaagctgcagcagttcctacgggacttggacgacttccagtcctggctctctaggacccagacagcgatcgcctcggaggacatgccaaacaccctgaccgaggctgagaagctgctcacgcagcacgagaacatcaagaacgagatcgacaactacgaggaggactaccagaagatgagggacatgggcgagatggtcacccaggggcagaccgatgcccagtacatgtttctgcggcagcggctgcaggccctggacactggatggaacgagctccacaagatgtgggagaacagacaaaatctcctatcccagtcacatgcctaccagcagttcctcagagacacgaagcaagccgaagcctttcttaacaaccaggagtatgttctggctcacactgaaatgcctaccaccttggaaggagctgaagcagcaattaaaaagcaagaggacttcatgaccaccatggacgccaatgaggagaagatcaatgctgtggtggagactggccggaggctggtgagcgatgggaacatcaactcagatcgcatccaggagaaggtggactctattgatgacagacataggaagaatcgtgagacagccagtgaacttttgatgaggttgaaggacaacagggatctacagaaattcctgcaagattgtcaagagctgtctctctggatcaatgagaagatgctcacagcccaggacatgtcttacgatgaagccagaaatctgcacagtaaatggttgaagcatcaagcatttatggcagaacttgcatccaacaaagaatggcttgacaaaatcgagaaggaaggaatgcagctcatttcagaaaagcctgagacggaagctgtggtgaaggagaaactcactggtttacataaaatgtgggaagtccttgaatccactacccagacaaaggcccagcggctctttgatgcaaacaaggccgaacttttcacccagagctgtgcagatctagacaaatggctgcacggcctggagagtcagattcagtctgatgactatggcaaagacctgaccagtgtcaatatcctgctgaaaaagcaacagatgctggagaatcagatggaagtgcggaagaaggagatcgaagagctccaaagccaagcccaggccctgagtcaggaagggaagagcaccgacgaggtagacagcaagcgcctcaccgtgcagaccaagttcatggagttgctggagcccttgaacgagaggaagcataacctgctggcctccaaagagatccatcagttcaacagggatgtggaggacgagatcttgtgggttggagagaggatgcctttggcaacttccacggatcatggccacaacctccagactgtgcagctgttaataaagaaaaatcagaccctccagaaagaaatccaggggcaccagcctcgcattgacgacatctttgagaggagccaaaacatcgtcactgacagcagcagcctcagcgctgaggccatcagacagaggcttgccgacctgaagcagctgtggggtctcctcattgaggagacagagaaacgccacaggcggctggaggaggcgcacagggcccagcagtactactttgacgctgctgaggccgaagcctggatgagcgagcaggagctgtacatgatgtcagaggagaaggccaaggatgagcagagtgctgtctccatgttgaagaagcaccagatcttagaacaagctgtggaggactatgcagagaccgtgcatcagctctccaagaccagccgggccctggtggccgacagccatcctgaaagtgagcgcattagcatgcggcagtccaaagtggataaactgtacgctggtctgaaagaccttgctgaagagagaagaggcaagctggatgagagacacaggttattccagctcaaccgggaggtggacgacctggagcagtggatcgctgagagggaggtggtcgcagggtcccatgaactgggacaggactatgagcatgtcacgatgttacaagaacgattccgggagtttgcccgagacaccgggaacattgggcaggagcgcgtggacacggtcaatcacctggcagatgagctcatcaactctggacattcagatgccgccaccatcgctgaatggaaggatggcctcaatgaagcctgggccgacctcctggagctcattgacacaagaacacagattcttgccgcttcctatgaactgcacaagttttaccacgatgccaaggagatctttgggcgtatacaggacaaacacaagaaactccctgaggagcttgggagagatcagaacacagtggagaccttacagagaatgcacactacatttgagcatgacatccaggctctgggcacacaggtgaggcagctgcaggaggatgcagcccgcctccaggcggcctatgcgggtgacaaggccgacgatatccagaagcgcgagaacgaggtcctggaagcctggaagtccctcctggacgcctgtgagagccgcagggtgcggctggtggacacaggggacaagttccgcttcttcagcatggtgcgcgacctcatgctctggatggaggatgtcatccggcagatcgaggcccaggagaagccaagggatgtatcatctgttgaactcttaatgaataatcatcaaggcatcaaagctgaaattgatgcacgtaatgacagtttcacaacctgcattgaacttgggaaatccctgttggcgagaaaacactatgcatctgaggagatcaaggaaaaattactgcagttgacggaaaagaggaaagaaatgatcgacaagtgggaagaccgatgggaatggttaagactgattctggaggtccatcagttctcaagagacgccagtgtggccgaggcctggctgcttggacaggagccgtacctatccagccgagagataggccagagcgtggacgaggtggagaagctcatcaagcgccacgaggcatttgaaaagtctgcagcaacctgggatgagaggttctctgccctggaaaggctgactacattggagttactggaagtgcgcagacagcaagaggaagaggagaggaagaggcggccgccttctcccgagccgagcacgaaggtttcagaggaagccgagtcccagcagcagtgggatacttcaaaaggagaacaagtttcccaaaacggtttgccagctgaacagggatctccacggatggcagaaacggtggacacaagcgaaatggtcaacggcgctacagaacaaaggacgagctctaaagagtccagccccatcccctccccgacctctgatcgtaaagccaagactgccctcccagcccagagtgccgccaccttaccagccagaacccaggagacaccttcggcccagatggaaggcttcctcaatcggaaacacgagtgggaggcccacaataagaaagcctcaagcaggtcctggcacaatgtttattgtgtcataaataaccaagaaatgggtttctacaaagatgcaaagactgctgcttctggaattccctaccacagcgaggtccctgtgagtttgaaagaagctgtctgcgaagtggcccttgattacaaaaagaagaaacacgtattcaagctaagactaaatgatggcaatgagtacctcttccaagccaaagacgatgaggaaatgaacacatggatccaggctatctcttccgccatctcctctgataaacacgaggtgtctgccagcacccagagcacgccagcatccagccgcgcgcagaccctccccaccagcgtcgtcaccatcaccagcgagtccagtcccggcaagcgggaaaaggacaaagagaaagacaaagagaagcggttcagcctttttggcaaaaagaaatgaactcctttccttcacctcctgcccttctcttaccttttcagtgaaattccagcatgcaagctcagaaccaacacattactctctgtgcctaatgttcctcaatgtggttgatttttttttttttttaatttatagagcatttctcgcagagggggatttggcagggtcataggacaatagtggagggaaggtcagcagataaacaagtgaacaaaggtctctggttttcctaggcagaggaccctgcggacttccgcagtgttagtgtccctgggtccttgagattagggagtggtgatgactcttaacgagcatgctgccttcaagcatctgtttaacaaagcacatcttgcaccgcccttaatccatttaaccctgagtggacacagcacatgtaacagagagcacagggttgggggtaaggtcacagatcaacaggataagaatttttcttagtacagaacacaatgaaaagtctcccatgtctacctctttatacacagacacggcaac

SEQ ID NO: 357066 - DNA, 7545 bp, Homo sapiens
gtgagctgaagcagggcagggcatcaactcacccaggaagtgcaaggggtttggggattttcctttcctagccaagggaaggcatgacagactgtacctggaaaaacaggacactcttgcccaaatactgcactttttgcacagtcttagcaactggcagaccaggagattctctcctgtgcctgattcattgggtcccacacccatagggccttgcttactgccagtgcagcagtctgagattaacaccccatccccgggagaactctaagaaggagctgatgtggaggagcagctgagacagttcaagatgacgaccacagtagccacagactatgacaacattgagatccagcagcagtacagtgatgtcaacaaccgctgggatgtcgacgactgggacaatgagaacagctctgcgcggctttttgagcggtcccgcatcaaggctctggcagatgagcgtgaagccgtgcagaagaagaccttcaccaagtgggtcaattcccaccttgcccgtgtgtcctgccggatcacagacctgtacactgaccttcgagatggacggatgctcatcaagctgctggaggtcctctctggagagaggctgcctaaacccaccaagggacgaatgcgcatccactgcttagagaatgtggacaaggcccttcagttcctgaaggagcagagagtccatcttgagaacatggggtcccatgacatcgtggatggaaaccaccggctgacccttggcctcatctggaccatcatcctgcgcttccagatccaggatatcagtgtggaaactgaagacaacaaagagaagaaatctgccaaggatgcattgctgttgtggtgccagatgaagacagctgggtaccccaatgtcaacattcacaatttcaccactagctggagggacggcatggccttcaatgcactgatacacaaacaccggcctgacctgatagattttgacaaactaaagaaatctaacgcacactacaacctgcagaatgcatttaatctggcagaacagcacctcggcctcactaaactgttggaccccgaagacatcagcgtggaccatcctgatgagaagtccataatcacttatgtggtgacttattaccactacttctctaagatgaaggccttagctgttgaaggaaaacgaattggaaaggtgcttgacaatgctattgaaacagaaaaaatgattgaaaagtatgaatcacttgcctctgaccttctggaatggattgaacaaaccatcatcattctgaacaatcgcaaatttgccaattcactggtcggggttcaacagcagcttcaggcattcaacacttaccgcactgtggagaaaccacccaaatttactgagaaggggaacttggaagtgctgctcttcaccattcagagcaagatgagggccaacaaccagaaggtctacatgccccgggaggggaagctcatctctgacatcaacaaggcctgggaaagactggaaaaagcggaacacgaaagagaactggctttgcggaatgagctcataagacaggagaaactggaacagctcgcccgcagatttgatcgcaaggcagctatgagggagacttggctgagcgaaaaccagcgtctggtgtctcaggacaactttgggtttgaccttcctgcagttgaggccgccacaaaaaagcacgaggccattgagacagacattgccgcatacgaggagcgtgtgcaggctgtggtagccgtggccagggagctcgaggccgagaattaccacgacatcaagcgcatcacagcgaggaaggacaatgtcatccggctctgggaatacctactggaactgctcagggcccggagacagcggctcgagatgaacctggggctgcagaagatattccaggaaatgctctacattatggactggatggatgaaatgaaggtgctagtattgtctcaagactatggcaaacacttacttggtgtggaagacctgttacagaagcacaccctggttgaagcagacattggcatccaggcagagcgggtgagaggtgtcaatgcctccgcccagaagttcgcaacagacggggaaggttacaagccctgtgacccccaggtgatccgagaccgcgtggcccacatggagttctgttatcaagagctttgccagctggcggctgagcgcagggcccgtctggaagagtcccgccgcctctggaagttcttctgggagatggcagaagaggaaggctggatacgggagaaggagaagatcctgtcctcggacgattacgggaaagacctgaccagcgtcatgcgcctgctcagcaagcaccgggcgttcgaggacgagatgagcggccgcagtggccactttgagcaggccatcaaggaaggcgaagacatgatcgcggaggagcacttcgggtcggagaagatccgtgagaggatcatttacatccgggagcagtgggccaacctagagcagctctcggccattcggaagaagcgcctggaggaggcctccctgctgcaccagttccaggcagatgctgatgacattgatgcctggatgctggacatcctcaagattgtctccagcagcgacgtgggccacgatgagtattccacacagtctctggtcaagaaacacaaggacgtggcggaagagatcgccaattacaggcccacccttgacacgctgcacgaacaagccagcgccctcccccaggagcatgccgagtctccagacgtgaggggcaggctgtcgggcatcgaggagcggtataaggaggtggcagagctgacgcggctgcggaagcaggcactccaggacactctggccctgtacaagatgttcagcgaggctgatgcctgtgagctctggatcgacgagaaggagcagtggctcaacaacatgcagatcccagagaagctggaggatctggaggtcatccagcacagatttgagagcctagaaccagaaatgaacaaccaggcttcccgggttgcagtggtgaaccagattgcacgccagctgatgcacagcggccacccaagtgagaaggaaatcaaagcccagcaggacaaactcaacacaaggtggagccagttcagagaactggttgacaggaagaaggatgccctcctgtctgccctgagcatccagaactaccacctcgagtgcaatgaaaccaaatcctggattcgggaaaagaccaaggtcatcgagtccacccaggacctgggcaatgacctggctggcgtcatggccctgcagcgcaagctgaccggcatggagcgggacttggtggccattgaggcaaagctgagtgacctgcagaaggaggcggagaagctggagtccgagcaccccgaccaggcccaggccatcctgtctcggctggccgagatcagcgacgtgtgggaggagatgaagaccaccctgaaaaaccgagaggcctccctgggagaggccagcaagctgcagcagttcctacgggacttggacgacttccagtcctggctctctaggacccagacagcgatcgcctcggaggacatgccaaacaccctgaccgaggctgagaagctgctcacgcagcacgagaacatcaagaacgagatcgacaactacgaggaggactaccagaagatgagggacatgggcgagatggtcacccaggggcagaccgatgcccagtacatgtttctgcggcagcggctgcaggccctggacactggatggaacgagctccacaagatgtgggagaacagacaaaatctcctatcccagtcacatgcctaccagcagttcctcagagacacgaagcaagccgaagcctttcttaacaaccaggagtatgttctggctcacactgaaatgcctaccaccttggaaggagctgaagcagcaattaaaaagcaagaggacttcatgaccaccatggacgccaatgaggagaagatcaatgctgtggtggagactggccggaggctggtgagcgatgggaacatcaactcagatcgcatccaggagaaggtggactctattgatgacagacataggaagaatcgtgagacagccagtgaacttttgatgaggttgaaggacaacagggatctacagaaattcctgcaagattgtcaagagctgtctctctggatcaatgagaagatgctcacagcccaggacatgtcttacgatgaagccagaaatctgcacagtaaatggttgaagcatcaagcatttatggcagaacttgcatccaacaaagaatggcttgacaaaatcgagaaggaaggaatgcagctcatttcagaaaagcctgagacggaagctgtggtgaaggagaaactcactggtttacataaaatgtgggaagtccttgaatccactacccagacaaaggcccagcggctctttgatgcaaacaaggccgaacttttcacccagagctgtgcagatctagacaaatggctgcacggcctggagagtcagattcagtctgatgactatggcaaagacctgaccagtgtcaatatcctgctgaaaaagcaacagatgctggagaatcagatggaagtgcggaagaaggagatcgaagagctccaaagccaagcccaggccctgagtcaggaagggaagagcaccgacgaggtagacagcaagcgcctcaccgtgcagaccaagttcatggagttgctggagcccttgaacgagaggaagcataacctgctggcctccaaagagatccatcagttcaacagggatgtggaggacgagatcttgtgggttggagagaggatgcctttggcaacttccacggatcatggccacaacctccagactgtgcagctgttaataaagaaaaatcagaccctccagaaagaaatccaggggcaccagcctcgcattgacgacatctttgagaggagccaaaacatcgtcactgacagcagcagcctcagcgctgaggccatcagacagaggcttgccgacctgaagcagctgtggggtctcctcattgaggagacagagaaacgccacaggcggctggaggaggcgcacagggcccagcagtactactttgacgctgctgaggccgaagcctggatgagcgagcaggagctgtacatgatgtcagaggagaaggccaaggatgagcagagtgctgtctccatgttgaagaagcaccagatcttagaacaagctgtggaggactatgcagagaccgtgcatcagctctccaagaccagccgggccctggtggccgacagccatcctgaaagtgagcgcattagcatgcggcagtccaaagtggataaactgtacgctggtctgaaagaccttgctgaagagagaagaggcaagctggatgagagacacaggttattccagctcaaccgggaggtggacgacctggagcagtggatcgctgagagggaggtggtcgcagggtcccatgaactgggacaggactatgagcatgtcacgatgttacaagaacgattccgggagtttgcccgagacaccgggaacattgggcaggagcgcgtggacacggtcaatcacctggcagatgagctcatcaactctggacattcagatgccgccaccatcgctgaatggaaggatggcctcaatgaagcctgggccgacctcctggagctcattgacacaagaacacagattcttgccgcttcctatgaactgcacaagttttaccacgatgccaaggagatctttgggcgtatacaggacaaacacaagaaactccctgaggagcttgggagagatcagaacacagtggagaccttacagagaatgcacactacatttgagcatgacatccaggctctgggcacacaggtgaggcagctgcaggaggatgcagcccgcctccaggcggcctatgcgggtgacaaggccgacgatatccagaagcgcgagaacgaggtcctggaagcctggaagtccctcctggacgcctgtgagagccgcagggtgcggctggtggacacaggggacaagttccgcttcttcagcatggtgcgcgacctcatgctctggatggaggatgtcatccggcagatcgaggcccaggagaagccaagggatgtatcatctgttgaactcttaatgaataatcatcaaggcatcaaagctgaaattgatgcacgtaatgacagtttcacaacctgcattgaacttgggaaatccctgttggcgagaaaacactatgcatctgaggagatcaaggaaaaattactgcagttgacggaaaagaggaaagaaatgatcgacaagtgggaagaccgatgggaatggttaagactgattctggaggtccatcagttctcaagagacgccagtgtggccgaggcctggctgcttggacaggagccgtacctatccagccgagagataggccagagcgtggacgaggtggagaagctcatcaagcgccacgaggcatttgaaaagtctgcagcaacctgggatgagaggttctctgccctggaaaggctgactacattggagttactggaagtgcgcagacagcaagaggaagaggagaggaagaggcggccgccttctcccgagccgagcacgaaggtttcagaggaagccgagtcccagcagcagtgggatacttcaaaaggagaacaagtttcccaaaacggtttgccagctgaacagggatctccacggatggcagaaacggtggacacaagcgaaatggtcaacggcgctacagaacaaaggacgagctctaaagagtccagccccatcccctccccgacctctgatcgtaaagccaagactgccctcccagcccagagtgccgccaccttaccagccagaacccaggagacaccttcggcccagatggaaggcttcctcaatcggaaacacgagtgggaggcccacaataagaaagcctcaagcaggtcctggcacaatgtttattgtgtcataaataaccaagaaatgggtttctacaaagatgcaaagactgctgcttctggaattccctaccacagcgaggtccctgtgagtttgaaagaagctgtctgcgaagtggcccttgattacaaaaagaagaaacacgtattcaagctaagactaaatgatggcaatgagtacctcttccaagccaaagacgatgaggaaatgaacacatggatccaggctatctcttccgccatctcctctgataaacacgaggtgtctgccagcacccagagcacgccagcatccagccgcgcgcagaccctccccaccagcgtcgtcaccatcaccagcgagtccagtcccggcaagcgggaaaaggacaaagagaaagacaaagagaagcggttcagcctttttggcaaaaagaaatgaactcctttccttcacctcctgcccttctcttaccttttcagtgaaattccagcatgcaagctcagaaccaacacattactctctgtgcctaatgttctcaatggggtgaattttaataataagacatccggggggggggg

SEQ ID NO: 357067 - DNA, 7524 bp, Homo sapiens
gtgagctgaagcagggcagggcatcaactcacccaggaagtgcaaggggtttggggattttcctttcctagccaagggaaggcatgacagactgtacctggaaaaacaggacactcttgcccaaatactgcactttttgcacagtcttagcaactggcagaccaggagattctctcctgtgcctgattcattgggtcccacacccatagggccttgcttactgccagtgcagcagtctgagattaacaccccatccccgggagaactctaagaaggagctgatgtggaggagcagctgagacagttcaagatgacgaccacagtagccacagactatgacaacattgagatccagcagcagtacagtgatgtcaacaaccgctgggatgtcgacgactgggacaatgagaacagctctgcgcggctttttgagcggtcccgcatcaaggctctggcagatgagcgtgaagccgtgcagaagaagaccttcaccaagtgggtcaattcccaccttgcccgtgtgtcctgccggatcacagacctgtacactgaccttcgagatggacggatgctcatcaagctgctggaggtcctctctggagagaggctgcctaaacccaccaagggacgaatgcgcatccactgcttagagaatgtggacaaggcccttcagttcctgaaggagcagagagtccatcttgagaacatggggtcccatgacatcgtggatggaaaccaccggctgacccttggcctcatctggaccatcatcctgcgcttccagatccaggatatcagtgtggaaactgaagacaacaaagagaagaaatctgccaaggatgcattgctgttgtggtgccagatgaagacagctgggtaccccaatgtcaacattcacaatttcaccactagctggagggacggcatggccttcaatgcactgatacacaaacaccggcctgacctgatagattttgacaaactaaagaaatctaacgcacactacaacctgcagaatgcatttaatctggcagaacagcacctcggcctcactaaactgttggaccccgaagacatcagcgtggaccatcctgatgagaagtccataatcacttatgtggtgacttattaccactacttctctaagatgaaggccttagctgttgaaggaaaacgaattggaaaggtgcttgacaatgctattgaaacagaaaaaatgattgaaaagtatgaatcacttgcctctgaccttctggaatggattgaacaaaccatcatcattctgaacaatcgcaaatttgccaattcactggtcggggttcaacagcagcttcaggcattcaacacttaccgcactgtggagaaaccacccaaatttactgagaaggggaacttggaagtgctgctcttcaccattcagagcaagatgagggccaacaaccagaaggtctacatgccccgggaggggaagctcatctctgacatcaacaaggcctgggaaagactggaaaaagcggaacacgaaagagaactggctttgcggaatgagctcataagacaggagaaactggaacagctcgcccgcagatttgatcgcaaggcagctatgagggagacttggctgagcgaaaaccagcgtctggtgtctcaggacaactttgggtttgaccttcctgcagttgaggccgccacaaaaaagcacgaggccattgagacagacattgccgcatacgaggagcgtgtgcaggctgtggtagccgtggccagggagctcgaggccgagaattaccacgacatcaagcgcatcacagcgaggaaggacaatgtcatccggctctgggaatacctactggaactgctcagggcccggagacagcggctcgagatgaacctggggctgcagaagatattccaggaaatgctctacattatggactggatggatgaaatgaaggtgctagtattgtctcaagactatggcaaacacttacttggtgtggaagacctgttacagaagcacaccctggttgaagcagacattggcatccaggcagagcgggtgagaggtgtcaatgcctccgcccagaagttcgcaacagacggggaaggttacaagccctgtgacccccaggtgatccgagaccgcgtggcccacatggagttctgttatcaagagctttgccagctggcggctgagcgcagggcccgtctggaagagtcccgccgcctctggaagttcttctgggagatggcagaagaggaaggctggatacgggagaaggagaagatcctgtcctcggacgattacgggaaagacctgaccagcgtcatgcgcctgctcagcaagcaccgggcgttcgaggacgagatgagcggccgcagtggccactttgagcaggccatcaaggaaggcgaagacatgatcgcggaggagcacttcgggtcggagaagatccgtgagaggatcatttacatccgggagcagtgggccaacctagagcagctctcggccattcggaagaagcgcctggaggaggcctccctgctgcaccagttccaggcagatgctgatgacattgatgcctggatgctggacatcctcaagattgtctccagcagcgacgtgggccacgatgagtattccacacagtctctggtcaagaaacacaaggacgtggcggaagagatcgccaattacaggcccacccttgacacgctgcacgaacaagccagcgccctcccccaggagcatgccgagtctccagacgtgaggggcaggctgtcgggcatcgaggagcggtataaggaggtggcagagctgacgcggctgcggaagcaggcactccaggacactctggccctgtacaagatgttcagcgaggctgatgcctgtgagctctggatcgacgagaaggagcagtggctcaacaacatgcagatcccagagaagctggaggatctggaggtcatccagcacagatttgagagcctagaaccagaaatgaacaaccaggcttcccgggttgcagtggtgaaccagattgcacgccagctgatgcacagcggccacccaagtgagaaggaaatcaaagcccagcaggacaaactcaacacaaggtggagccagttcagagaactggttgacaggaagaaggatgccctcctgtctgccctgagcatccagaactaccacctcgagtgcaatgaaaccaaatcctggattcgggaaaagaccaaggtcatcgagtccacccaggacctgggcaatgacctggctggcgtcatggccctgcagcgcaagctgaccggcatggagcgggacttggtggccattgaggcaaagctgagtgacctgcagaaggaggcggagaagctggagtccgagcaccccgaccaggcccaggccatcctgtctcggctggccgagatcagcgacgtgtgggaggagatgaagaccaccctgaaaaaccgagaggcctccctgggagaggccagcaagctgcagcagttcctacgggacttggacgacttccagtcctggctctctaggacccagacagcgatcgcctcggaggacatgccaaacaccctgaccgaggctgagaagctgctcacgcagcacgagaacatcaagaacgagatcgacaactacgaggaggactaccagaagatgagggacatgggcgagatggtcacccaggggcagaccgatgcccagtacatgtttctgcggcagcggctgcaggccctggacactggatggaacgagctccacaagatgtgggagaacagacaaaatctcctatcccagtcacatgcctaccagcagttcctcagagacacgaagcaagccgaagcctttcttaacaaccaggagtatgttctggctcacactgaaatgcctaccaccttggaaggagctgaagcagcaattaaaaagcaagaggacttcatgaccaccatggacgccaatgaggagaagatcaatgctgtggtggagactggccggaggctggtgagcgatgggaacatcaactcagatcgcatccaggagaaggtggactctattgatgacagacataggaagaatcgtgagacagccagtgaacttttgatgaggttgaaggacaacagggatctacagaaattcctgcaagattgtcaagagctgtctctctggatcaatgagaagatgctcacagcccaggacatgtcttacgatgaagccagaaatctgcacagtaaatggttgaagcatcaagcatttatggcagaacttgcatccaacaaagaatggcttgacaaaatcgagaaggaaggaatgcagctcatttcagaaaagcctgagacggaagctgtggtgaaggagaaactcactggtttacataaaatgtgggaagtccttgaatccactacccagacaaaggcccagcggctctttgatgcaaacaaggccgaacttttcacccagagctgtgcagatctagacaaatggctgcacggcctggagagtcagattcagtctgatgactatggcaaagacctgaccagtgtcaatatcctgctgaaaaagcaacagatgctggagaatcagatggaagtgcggaagaaggagatcgaagagctccaaagccaagcccaggccctgagtcaggaagggaagagcaccgacgaggtagacagcaagcgcctcaccgtgcagaccaagttcatggagttgctggagcccttgaacgagaggaagcataacctgctggcctccaaagagatccatcagttcaacagggatgtggaggacgagatcttgtgggttggagagaggatgcctttggcaacttccacggatcatggccacaacctccagactgtgcagctgttaataaagaaaaatcagaccctccagaaagaaatccaggggcaccagcctcgcattgacgacatctttgagaggagccaaaacatcgtcactgacagcagcagcctcagcgctgaggccatcagacagaggcttgccgacctgaagcagctgtggggtctcctcattgaggagacagagaaacgccacaggcggctggaggaggcgcacagggcccagcagtactactttgacgctgctgaggccgaagcctggatgagcgagcaggagctgtacatgatgtcagaggagaaggccaaggatgagcagagtgctgtctccatgttgaagaagcaccagatcttagaacaagctgtggaggactatgcagagaccgtgcatcagctctccaagaccagccgggccctggtggccgacagccatcctgaaagtgagcgcattagcatgcggcagtccaaagtggataaactgtacgctggtctgaaagaccttgctgaagagagaagaggcaagctggatgagagacacaggttattccagctcaaccgggaggtggacgacctggagcagtggatcgctgagagggaggtggtcgcagggtcccatgaactgggacaggactatgagcatgtcacgatgttacaagaacgattccgggagtttgcccgagacaccgggaacattgggcaggagcgcgtggacacggtcaatcacctggcagatgagctcatcaactctggacattcagatgccgccaccatcgctgaatggaaggatggcctcaatgaagcctgggccgacctcctggagctcattgacacaagaacacagattcttgccgcttcctatgaactgcacaagttttaccacgatgccaaggagatctttgggcgtatacaggacaaacacaagaaactccctgaggagcttgggagagatcagaacacagtggagaccttacagagaatgcacactacatttgagcatgacatccaggctctgggcacacaggtgaggcagctgcaggaggatgcagcccgcctccaggcggcctatgcgggtgacaaggccgacgatatccagaagcgcgagaacgaggtcctggaagcctggaagtccctcctggacgcctgtgagagccgcagggtgcggctggtggacacaggggacaagttccgcttcttcagcatggtgcgcgacctcatgctctggatggaggatgtcatccggcagatcgaggcccaggagaagccaagggatgtatcatctgttgaactcttaatgaataatcatcaaggcatcaaagctgaaattgatgcacgtaatgacagtttcacaacctgcattgaacttgggaaatccctgttggcgagaaaacactatgcatctgaggagatcaaggaaaaattactgcagttgacggaaaagaggaaagaaatgatcgacaagtgggaagaccgatgggaatggttaagactgattctggaggtccatcagttctcaagagacgccagtgtggccgaggcctggctgcttggacaggagccgtacctatccagccgagagataggccagagcgtggacgaggtggagaagctcatcaagcgccacgaggcatttgaaaagtctgcagcaacctgggatgagaggttctctgccctggaaaggctgactacattggagttactggaagtgcgcagacagcaagaggaagaggagaggaagaggcggccgccttctcccgagccgagcacgaaggtttcagaggaagccgagtcccagcagcagtgggatacttcaaaaggagaacaagtttcccaaaacggtttgccagctgaacagggatctccacggatggcagaaacggtggacacaagcgaaatggtcaacggcgctacagaacaaaggacgagctctaaagagtccagccccatcccctccccgacctctgatcgtaaagccaagactgccctcccagcccagagtgccgccaccttaccagccagaacccaggagacaccttcggcccagatggaaggcttcctcaatcggaaacacgagtgggaggcccacaataagaaagcctcaagcaggtcctggcacaatgtttattgtgtcataaataaccaagaaatgggtttctacaaagatgcaaagactgctgcttctggaattccctaccacagcgaggtccctgtgagtttgaaagaagctgtctgcgaagtggcccttgattacaaaaagaagaaacacgtattcaagctaagactaaatgatggcaatgagtacctcttccaagccaaagacgatgaggaaatgaacacatggatccaggctatctcttccgccatctcctctgataaacacgaggtgtctgccagcacccagagcacgccagcatccagccgcgcgcagaccctccccaccagcgtcgtcaccatcaccagcgagtccagtcccggcaagcgggaaaaggacaaagagaaagacaaagagaagcggttcagcctttttggcaaaaagaaatgaactcctttccttcacctcctgcccttctcttaccttttcagtgaaattccagcatgcaagctcagaaccacacaactcttggccgtataccgggatactctaggaacagctatgaccaa

SEQ ID NO: 357068 - DNA, 2423 bp, Homo sapiens
aggtcacctaaggatcccaaattgaggtcgggtggagccaagggatgtatcatctgttgaactcttaatgaataatcatcaaggcatcaaagctgaaattgatgcacgtaatgacagtttcacaacctgcattgaacttgggaaatccctgttggcgagaaaacactatgcatctgaggagatcaaggaaaaattactgcagttgacggaaaagaggaaagaaatgatcgacaagtgggaagaccgatgggaatggttaagactgattctggaggtccatcagttctcaagagacgccagtgtggccgaggcctggctgcttggacaggagccgtacctatccagccgagagataggccagagcgtggacgaggtggagaagctcatcaagcgccacgaggcatttgaaaagtctgcagcaacctgggatgagaggttctctgccctggaaaggctgactacattggagttactggaagtgcgcagacagcaagaggaagaggagaggaagaggcggccgccttctcccgagccgagcacgaaggtttcagaggaagccgagtcccagcagcagtgggatacttcaaaaggagaacaagtttcccaaaacggtttgccagctgaacagggatctccacggatggcagaaacggtggacacaagcgaaatggtcaacggcgctacagaacaaaggacgagctctaaagagtccagccccatcccctccccgacctctgatcgtaaagccaagactgccctcccagcccagagtgccgccaccttaccagccagaacccaggagacaccttcggcccagatggaaggcttcctcaatcggaaacacgagtgggaggcccacaataagaaagcctcaagcaggtcctggcacaatgtttattgtgtcataaataaccaagaaatgggtttctacaaagatgcaaagactgctgcttctggaattccctaccacagcgaggtccctgtgagtttgaaagaagctgtctgcgaagtggcccttgattacaaaaagaagaaacacgtattcaagctaagactaaatgatggcaatgagtacctcttccaagccaaagacgatgaggaaatgaacacatggatccaggctatctcttccgccatctcctctgataaacacgaggtgtctgccagcacccagagcacgccagcatccagccgcgcgcagaccctccccaccagcgtcgtcaccatcaccagcgagtccagtcccggcaagcgggaaaaggacaaagagaaagacaaagagaagcggttcagcctttttggcaaaaagaaatgaactcctttccttcacctcctgcccttctcttaccttttcagtgaaattccagcatgcaagctcagaaccaacacattactctctgtgcctaatgttcctcaatgtggttgatttttttttttttttaatttatagagcatttcggggggggtgggggaaacacacctaaacactttatctccaagttacaaaagtttgaggtgcagagggaaggccagattttttttttaatgaaattatatagattagatctcagtatttaaactgttcctcaattttgtgaggctgtgttggaaataacccgcctctagtgctgttggtatgcaaggcagcggtgcttaatcaatatttcctgtgctcaccagaggcaaaatgtaccaatatcctgacaccattctctctccatttacttctggtggttaccctgactcttgactcttagaagtgcccgagatggggctaacctttattaaacagatcgcatattatgatcttgctgcagccacagtgcagctccacattaactctacagaccaaaccatttgtatctggcatcacttactaacacacgacatgcggcttttctgcatcaactgctatgacggttaagaatgtcagtatacaagaaggaatagaaaactgatactgttttaaataatctgtaatttcaattttttttttttttgctgaaatacattatattgtacgtttgagataattctagtacaaagtataataaaactagatgtataataaaccctttaaatcattggtaagtgtacaagtggtggaactgaagcatttactggacaaagtaatgttactctaatggttacttgctcgtgcgttgccacactgtgttataatttgcttcatttccttgctatttgatacatagtgtgcatttctctgtcactgtaactattgtaatgacaaattttcatcttactgcacaatcaaaatgacattgataggaatgaactccagaggctgggcctgaacagggaggtggtcgctcaggcctggtgctcagtcgtacgacctgtacctctcaacttttgccctatctgttaaatatatgctatgtcattaaatgcttttaaatcta

SEQ ID NO: 357069 - DNA, 7326 bp, Homo sapiens
gtgagctgaagcagggcagggcatcaactcacccaggaagtgcaaggggtttggggattttcctttcctagccaagggaaggcatgacagactgtacctggaaaaacaggacactcttgcccaaatactgcactttttgcacagtcttagcaactggcagaccaggagattctctcctgtgcctgattcattgggtcccacacccatagggccttgcttactgccagtgcagcagtctgagattaacaccccatccccgggagaactctaagaaggagctgatgtggaggagcagctgagacagttcaagatgacgaccacagtagccacagactatgacaacattgagatccagcagcagtacagtgatgtcaacaaccgctgggatgtcgacgactgggacaatgagaacagctctgcgcggctttttgagcggtcccgcatcaaggctctggcagatgagcgtgaagccgtgcagaagaagaccttcaccaagtgggtcaattcccaccttgcccgtgtgtcctgccggatcacagacctgtacactgaccttcgagatggacggatgctcatcaagctgctggaggtcctctctggagagaggctgcctaaacccaccaagggacgaatgcgcatccactgcttagagaatgtggacaaggcccttcagttcctgaaggagcagagagtccatcttgagaacatggggtcccatgacatcgtggatggaaaccaccggctgacccttggcctcatctggaccatcatcctgcgcttccagatccaggatatcagtgtggaaactgaagacaacaaagagaagaaatctgccaaggatgcattgctgttgtggtgccagatgaagacagctgggtaccccaatgtcaacattcacaatttcaccactagctggagggacggcatggccttcaatgcactgatacacaaacaccggcctgacctgatagattttgacaaactaaagaaatctaacgcacactacaacctgcagaatgcatttaatctggcagaacagcacctcggcctcactaaactgttggaccccgaagacatcagcgtggaccatcctgatgagaagtccataatcacttatgtggtgacttattaccactacttctctaagatgaaggccttagctgttgaaggaaaacgaattggaaaggtgcttgacaatgctattgaaacagaaaaaatgattgaaaagtatgaatcacttgcctctgaccttctggaatggattgaacaaaccatcatcattctgaacaatcgcaaatttgccaattcactggtcggggttcaacagcagcttcaggcattcaacacttaccgcactgtggagaaaccacccaaatttactgagaaggggaacttggaagtgctgctcttcaccattcagagcaagatgagggccaacaaccagaaggtctacatgccccgggaggggaagctcatctctgacatcaacaaggcctgggaaagactggaaaaagcggaacacgaaagagaactggctttgcggaatgagctcataagacaggagaaactggaacagctcgcccgcagatttgatcgcaaggcagctatgagggagacttggctgagcgaaaaccagcgtctggtgtctcaggacaactttgggtttgaccttcctgcagttgaggccgccacaaaaaagcacgaggccattgagacagacattgccgcatacgaggagcgtgtgcaggctgtggtagccgtggccagggagctcgaggccgagaattaccacgacatcaagcgcatcacagcgaggaaggacaatgtcatccggctctgggaatacctactggaactgctcagggcccggagacagcggctcgagatgaacctggggctgcagaagatattccaggaaatgctctacattatggactggatggatgaaatgaaggtgctagtattgtctcaagactatggcaaacacttacttggtgtggaagacctgttacagaagcacaccctggttgaagcagacattggcatccaggcagagcgggtgagaggtgtcaatgcctccgcccagaagttcgcaacagacggggaaggttacaagccctgtgacccccaggtgatccgagaccgcgtggcccacatggagttctgttatcaagagctttgccagctggcggctgagcgcagggcccgtctggaagagtcccgccgcctctggaagttcttctgggagatggcagaagaggaaggctggatacgggagaaggagaagatcctgtcctcggacgattacgggaaagacctgaccagcgtcatgcgcctgctcagcaagcaccgggcgttcgaggacgagatgagcggccgcagtggccactttgagcaggccatcaaggaaggcgaagacatgatcgcggaggagcacttcgggtcggagaagatccgtgagaggatcatttacatccgggagcagtgggccaacctagagcagctctcggccattcggaagaagcgcctggaggaggcctccctgctgcaccagttccaggcagatgctgatgacattgatgcctggatgctggacatcctcaagattgtctccagcagcgacgtgggccacgatgagtattccacacagtctctggtcaagaaacacaaggacgtggcggaagagatcgccaattacaggcccacccttgacacgctgcacgaacaagccagcgccctcccccaggagcatgccgagtctccagacgtgaggggcaggctgtcgggcatcgaggagcggtataaggaggtggcagagctgacgcggctgcggaagcaggcactccaggacactctggccctgtacaagatgttcagcgaggctgatgcctgtgagctctggatcgacgagaaggagcagtggctcaacaacatgcagatcccagagaagctggaggatctggaggtcatccagcacagatttgagagcctagaaccagaaatgaacaaccaggcttcccgggttgcagtggtgaaccagattgcacgccagctgatgcacagcggccacccaagtgagaaggaaatcaaagcccagcaggacaaactcaacacaaggtggagccagttcagagaactggttgacaggaagaaggatgccctcctgtctgccctgagcatccagaactaccacctcgagtgcaatgaaaccaaatcctggattcgggaaaagaccaaggtcatcgagtccacccaggacctgggcaatgacctggctggcgtcatggccctgcagcgcaagctgaccggcatggagcgggacttggtggccattgaggcaaagctgagtgacctgcagaaggaggcggagaagctggagtccgagcaccccgaccaggcccaggccatcctgtctcggctggccgagatcagcgacgtgtgggaggagatgaagaccaccctgaaaaaccgagaggcctccctgggagaggccagcaagctgcagcagttcctacgggacttggacgacttccagtcctggctctctaggacccagacagcgatcgcctcggaggacatgccaaacaccctgaccgaggctgagaagctgctcacgcagcacgagaacatcaagaacgagatcgacaactacgaggaggactaccagaagatgagggacatgggcgagatggtcacccaggggcagaccgatgcccagtacatgtttctgcggcagcggctgcaggccctggacactggatggaacgagctccacaagatgtgggagaacagacaaaatctcctatcccagtcacatgcctaccagcagttcctcagagacacgaagcaagccgaagcctttcttaacaaccaggagtatgttctggctcacactgaaatgcctaccaccttggaaggagctgaagcagcaattaaaaagcaagaggacttcatgaccaccatggacgccaatgaggagaagatcaatgctgtggtggagactggccggaggctggtgagcgatgggaacatcaactcagatcgcatccaggagaaggtggactctattgatgacagacataggaagaatcgtgagacagccagtgaacttttgatgaggttgaaggacaacagggatctacagaaattcctgcaagattgtcaagagctgtctctctggatcaatgagaagatgctcacagcccaggacatgtcttacgatgaagccagaaatctgcacagtaaatggttgaagcatcaagcatttatggcagaacttgcatccaacaaagaatggcttgacaaaatcgagaaggaaggaatgcagctcatttcagaaaagcctgagacggaagctgtggtgaaggagaaactcactggtttacataaaatgtgggaagtccttgaatccactacccagacaaaggcccagcggctctttgatgcaaacaaggccgaacttttcacccagagctgtgcagatctagacaaatggctgcacggcctggagagtcagattcagtctgatgactatggcaaagacctgaccagtgtcaatatcctgctgaaaaagcaacagatgctggagaatcagatggaagtgcggaagaaggagatcgaagagctccaaagccaagcccaggccctgagtcaggaagggaagagcaccgacgaggtagacagcaagcgcctcaccgtgcagaccaagttcatggagttgctggagcccttgaacgagaggaagcataacctgctggcctccaaagagatccatcagttcaacagggatgtggaggacgagatcttgtgggttggagagaggatgcctttggcaacttccacggatcatggccacaacctccagactgtgcagctgttaataaagaaaaatcagaccctccagaaagaaatccaggggcaccagcctcgcattgacgacatctttgagaggagccaaaacatcgtcactgacagcagcagcctcagcgctgaggccatcagacagaggcttgccgacctgaagcagctgtggggtctcctcattgaggagacagagaaacgccacaggcggctggaggaggcgcacagggcccagcagtactactttgacgctgctgaggccgaagcctggatgagcgagcaggagctgtacatgatgtcagaggagaaggccaaggatgagcagagtgctgtctccatgttgaagaagcaccagatcttagaacaagctgtggaggactatgcagagaccgtgcatcagctctccaagaccagccgggccctggtggccgacagccatcctgaaagtgagcgcattagcatgcggcagtccaaagtggataaactgtacgctggtctgaaagaccttgctgaagagagaagaggcaagctggatgagagacacaggttattccagctcaaccgggaggtggacgacctggagcagtggatcgctgagagggaggtggtcgcagggtcccatgaactgggacaggactatgagcatgtcacgatgttacaagaacgattccgggagtttgcccgagacaccgggaacattgggcaggagcgcgtggacacggtcaatcacctggcagatgagctcatcaactctggacattcagatgccgccaccatcgctgaatggaaggatggcctcaatgaagcctgggccgacctcctggagctcattgacacaagaacacagattcttgccgcttcctatgaactgcacaagttttaccacgatgccaaggagatctttgggcgtatacaggacaaacacaagaaactccctgaggagcttgggagagatcagaacacagtggagaccttacagagaatgcacactacatttgagcatgacatccaggctctgggcacacaggtgaggcagctgcaggaggatgcagcccgcctccaggcggcctatgcgggtgacaaggccgacgatatccagaagcgcgagaacgaggtcctggaagcctggaagtccctcctggacgcctgtgagagccgcagggtgcggctggtggacacaggggacaagttccgcttcttcagcatggtgcgcgacctcatgctctggatggaggatgtcatccggcagatcgaggcccaggagaagccaagggatgtatcatctgttgaactcttaatgaataatcatcaaggcatcaaagctgaaattgatgcacgtaatgacagtttcacaacctgcattgaacttgggaaatccctgttggcgagaaaacactatgcatctgaggagatcaaggaaaaattactgcagttgacggaaaagaggaaagaaatgatcgacaagtgggaagaccgatgggaatggttaagactgattctggaggtccatcagttctcaagagacgccagtgtggccgaggcctggctgcttggacaggagccgtacctatccagccgagagataggccagagcgtggacgaggtggagaagctcatcaagcgccacgaggcatttgaaaagtctgcagcaacctgggatgagaggttctctgccctggaaaggctgactacattggagttactggaagtgcgcagacagcaagaggaagaggagaggaagaggcggccgccttctcccgagccgagcacgaaggtttcagaggaagccgagtcccagcagcagtgggatacttcaaaaggagaacaagtttcccaaaacggtttgccagctgaacagggatctccacggatggcagaaacggtggacacaagcgaaatggtcaacggcgctacagaacaaaggacgagctctaaagagtccagccccatcccctccccgacctctgatcgtaaagccaagactgccctcccagcccagagtgccgccaccttaccagccagaacccaggagacaccttcggcccagatggaaggcttcctcaatcggaaacacgagtgggaggcccacaataagaaagcctcaagcaggtcctggcacaatgtttattgtgtcataaataaccaagaaatgggtttctacaaagatgcaaagactgctgcttctggaattccctaccacagcgaggtccctgtgagtttgaaagaagctgtctgcgaagtggcccttgattacaaaaagaagaaacacgtattcaagctaagactaaatgatggcaatgagtacctcttccaagccaaagacgatgaggaaatgaacacatggatccaggctatctcttccgccatctcctctgataaacacgaggtgtctgccagcacccagagcacgccagcatccagccgcgcgcagaccctccccaacagcgtcgtcaccatgatgcagct

SEQ ID NO: 357070 - DNA, 7341 bp, Homo sapiens
gtgagctgaagcagggcagggcatcaactcacccaggaagtgcaaggggtttggggattttcctttcctagccaagggaaggcatgacagactgtacctggaaaaacaggacactcttgcccaaatactgcactttttgcacagtcttagcaactggcagaccaggagattctctcctgtgcctgattcattgggtcccacacccatagggccttgcttactgccagtgcagcagtctgagattaacaccccatccccgggagaactctaagaaggagctgatgtggaggagcagctgagacagttcaagatgacgaccacagtagccacagactatgacaacattgagatccagcagcagtacagtgatgtcaacaaccgctgggatgtcgacgactgggacaatgagaacagctctgcgcggctttttgagcggtcccgcatcaaggctctggcagatgagcgtgaagccgtgcagaagaagaccttcaccaagtgggtcaattcccaccttgcccgtgtgtcctgccggatcacagacctgtacactgaccttcgagatggacggatgctcatcaagctgctggaggtcctctctggagagaggctgcctaaacccaccaagggacgaatgcgcatccactgcttagagaatgtggacaaggcccttcagttcctgaaggagcagagagtccatcttgagaacatggggtcccatgacatcgtggatggaaaccaccggctgacccttggcctcatctggaccatcatcctgcgcttccagatccaggatatcagtgtggaaactgaagacaacaaagagaagaaatctgccaaggatgcattgctgttgtggtgccagatgaagacagctgggtaccccaatgtcaacattcacaatttcaccactagctggagggacggcatggccttcaatgcactgatacacaaacaccggcctgacctgatagattttgacaaactaaagaaatctaacgcacactacaacctgcagaatgcatttaatctggcagaacagcacctcggcctcactaaactgttggaccccgaagacatcagcgtggaccatcctgatgagaagtccataatcacttatgtggtgacttattaccactacttctctaagatgaaggccttagctgttgaaggaaaacgaattggaaaggtgcttgacaatgctattgaaacagaaaaaatgattgaaaagtatgaatcacttgcctctgaccttctggaatggattgaacaaaccatcatcattctgaacaatcgcaaatttgccaattcactggtcggggttcaacagcagcttcaggcattcaacacttaccgcactgtggagaaaccacccaaatttactgagaaggggaacttggaagtgctgctcttcaccattcagagcaagatgagggccaacaaccagaaggtctacatgccccgggaggggaagctcatctctgacatcaacaaggcctgggaaagactggaaaaagcggaacacgaaagagaactggctttgcggaatgagctcataagacaggagaaactggaacagctcgcccgcagatttgatcgcaaggcagctatgagggagacttggctgagcgaaaaccagcgtctggtgtctcaggacaactttgggtttgaccttcctgcagttgaggccgccacaaaaaagcacgaggccattgagacagacattgccgcatacgaggagcgtgtgcaggctgtggtagccgtggccagggagctcgaggccgagaattaccacgacatcaagcgcatcacagcgaggaaggacaatgtcatccggctctgggaatacctactggaactgctcagggcccggagacagcggctcgagatgaacctggggctgcagaagatattccaggaaatgctctacattatggactggatggatgaaatgaaggtgctagtattgtctcaagactatggcaaacacttacttggtgtggaagacctgttacagaagcacaccctggttgaagcagacattggcatccaggcagagcgggtgagaggtgtcaatgcctccgcccagaagttcgcaacagacggggaaggttacaagccctgtgacccccaggtgatccgagaccgcgtggcccacatggagttctgttatcaagagctttgccagctggcggctgagcgcagggcccgtctggaagagtcccgccgcctctggaagttcttctgggagatggcagaagaggaaggctggatacgggagaaggagaagatcctgtcctcggacgattacgggaaagacctgaccagcgtcatgcgcctgctcagcaagcaccgggcgttcgaggacgagatgagcggccgcagtggccactttgagcaggccatcaaggaaggcgaagacatgatcgcggaggagcacttcgggtcggagaagatccgtgagaggatcatttacatccgggagcagtgggccaacctagagcagctctcggccattcggaagaagcgcctggaggaggcctccctgctgcaccagttccaggcagatgctgatgacattgatgcctggatgctggacatcctcaagattgtctccagcagcgacgtgggccacgatgagtattccacacagtctctggtcaagaaacacaaggacgtggcggaagagatcgccaattacaggcccacccttgacacgctgcacgaacaagccagcgccctcccccaggagcatgccgagtctccagacgtgaggggcaggctgtcgggcatcgaggagcggtataaggaggtggcagagctgacgcggctgcggaagcaggcactccaggacactctggccctgtacaagatgttcagcgaggctgatgcctgtgagctctggatcgacgagaaggagcagtggctcaacaacatgcagatcccagagaagctggaggatctggaggtcatccagcacagatttgagagcctagaaccagaaatgaacaaccaggcttcccgggttgcagtggtgaaccagattgcacgccagctgatgcacagcggccacccaagtgagaaggaaatcaaagcccagcaggacaaactcaacacaaggtggagccagttcagagaactggttgacaggaagaaggatgccctcctgtctgccctgagcatccagaactaccacctcgagtgcaatgaaaccaaatcctggattcgggaaaagaccaaggtcatcgagtccacccaggacctgggcaatgacctggctggcgtcatggccctgcagcgcaagctgaccggcatggagcgggacttggtggccattgaggcaaagctgagtgacctgcagaaggaggcggagaagctggagtccgagcaccccgaccaggcccaggccatcctgtctcggctggccgagatcagcgacgtgtgggaggagatgaagaccaccctgaaaaaccgagaggcctccctgggagaggccagcaagctgcagcagttcctacgggacttggacgacttccagtcctggctctctaggacccagacagcgatcgcctcggaggacatgccaaacaccctgaccgaggctgagaagctgctcacgcagcacgagaacatcaagaacgagatcgacaactacgaggaggactaccagaagatgagggacatgggcgagatggtcacccaggggcagaccgatgcccagtacatgtttctgcggcagcggctgcaggccctggacactggatggaacgagctccacaagatgtgggagaacagacaaaatctcctatcccagtcacatgcctaccagcagttcctcagagacacgaagcaagccgaagcctttcttaacaaccaggagtatgttctggctcacactgaaatgcctaccaccttggaaggagctgaagcagcaattaaaaagcaagaggacttcatgaccaccatggacgccaatgaggagaagatcaatgctgtggtggagactggccggaggctggtgagcgatgggaacatcaactcagatcgcatccaggagaaggtggactctattgatgacagacataggaagaatcgtgagacagccagtgaacttttgatgaggttgaaggacaacagggatctacagaaattcctgcaagattgtcaagagctgtctctctggatcaatgagaagatgctcacagcccaggacatgtcttacgatgaagccagaaatctgcacagtaaatggttgaagcatcaagcatttatggcagaacttgcatccaacaaagaatggcttgacaaaatcgagaaggaaggaatgcagctcatttcagaaaagcctgagacggaagctgtggtgaaggagaaactcactggtttacataaaatgtgggaagtccttgaatccactacccagacaaaggcccagcggctctttgatgcaaacaaggccgaacttttcacccagagctgtgcagatctagacaaatggctgcacggcctggagagtcagattcagtctgatgactatggcaaagacctgaccagtgtcaatatcctgctgaaaaagcaacagatgctggagaatcagatggaagtgcggaagaaggagatcgaagagctccaaagccaagcccaggccctgagtcaggaagggaagagcaccgacgaggtagacagcaagcgcctcaccgtgcagaccaagttcatggagttgctggagcccttgaacgagaggaagcataacctgctggcctccaaagagatccatcagttcaacagggatgtggaggacgagatcttgtgggttggagagaggatgcctttggcaacttccacggatcatggccacaacctccagactgtgcagctgttaataaagaaaaatcagaccctccagaaagaaatccaggggcaccagcctcgcattgacgacatctttgagaggagccaaaacatcgtcactgacagcagcagcctcagcgctgaggccatcagacagaggcttgccgacctgaagcagctgtggggtctcctcattgaggagacagagaaacgccacaggcggctggaggaggcgcacagggcccagcagtactactttgacgctgctgaggccgaagcctggatgagcgagcaggagctgtacatgatgtcagaggagaaggccaaggatgagcagagtgctgtctccatgttgaagaagcaccagatcttagaacaagctgtggaggactatgcagagaccgtgcatcagctctccaagaccagccgggccctggtggccgacagccatcctgaaagtgagcgcattagcatgcggcagtccaaagtggataaactgtacgctggtctgaaagaccttgctgaagagagaagaggcaagctggatgagagacacaggttattccagctcaaccgggaggtggacgacctggagcagtggatcgctgagagggaggtggtcgcagggtcccatgaactgggacaggactatgagcatgtcacgatgttacaagaacgattccgggagtttgcccgagacaccgggaacattgggcaggagcgcgtggacacggtcaatcacctggcagatgagctcatcaactctggacattcagatgccgccaccatcgctgaatggaaggatggcctcaatgaagcctgggccgacctcctggagctcattgacacaagaacacagattcttgccgcttcctatgaactgcacaagttttaccacgatgccaaggagatctttgggcgtatacaggacaaacacaagaaactccctgaggagcttgggagagatcagaacacagtggagaccttacagagaatgcacactacatttgagcatgacatccaggctctgggcacacaggtgaggcagctgcaggaggatgcagcccgcctccaggcggcctatgcgggtgacaaggccgacgatatccagaagcgcgagaacgaggtcctggaagcctggaagtccctcctggacgcctgtgagagccgcagggtgcggctggtggacacaggggacaagttccgcttcttcagcatggtgcgcgacctcatgctctggatggaggatgtcatccggcagatcgaggcccaggagaagccaagggatgtatcatctgttgaactcttaatgaataatcatcaaggcatcaaagctgaaattgatgcacgtaatgacagtttcacaacctgcattgaacttgggaaatccctgttggcgagaaaacactatgcatctgaggagatcaaggaaaaattactgcagttgacggaaaagaggaaagaaatgatcgacaagtgggaagaccgatgggaatggttaagactgattctggaggtccatcagttctcaagagacgccagtgtggccgaggcctggctgcttggacaggagccgtacctatccagccgagagataggccagagcgtggacgaggtggagaagctcatcaagcgccacgaggcatttgaaaagtctgcagcaacctgggatgagaggttctctgccctggaaaggctgactacattggagttactggaagtgcgcagacagcaagaggaagaggagaggaagaggcggccgccttctcccgagccgagcacgaaggtttcagaggaagccgagtcccagcagcagtgggatacttcaaaaggagaacaagtttcccaaaacggtttgccagctgaacagggatctccacggatggcagaaacggtggacacaagcgaaatggtcaacggcgctacagaacaaaggacgagctctaaagagtccagccccatcccctccccgacctctgatcgtaaagccaagactgccctcccagcccagagtgccgccaccttaccagccagaacccaggagacaccttcggcccagatggaaggcttcctcaatcggaaacacgagtgggaggcccacaataagaaagcctcaagcaggtcctggcacaatgtttattgtgtcataaataaccaagaaatgggtttctacaaagatgcaaagactgctgcttctggaattccctaccacagcgaggtccctgtgagtttgaaagaagctgtctgcgaagtggcccttgattacaaaaagaagaaacacgtattcaagctaagagactaaatgatggcaatgagtacctcttccaagccaaaagacgatgaggaaatgaacacatggatccaggctatctcttccgccatctcctctgataaacacgaggtgtctgccagcacccagagcacgccagcatccagccgcgcgcagaccctccccaccagcgccgtcgcctccgcacgtgaatcctctagagt

SEQ ID NO: 357071 - DNA, 7272 bp, Homo sapiens
  misc_feature (7243)..(7243): n is a, c, g, or t
gtgagctgaagcagggcagggcatcaactcacccaggaagtgcaaggggtttggggattttcctttcctagccaagggaaggcatgacagactgtacctggaaaaacaggacactcttgcccaaatactgcactttttgcacagtcttagcaactggcagaccaggagattctctcctgtgcctgattcattgggtcccacacccatagggccttgcttactgccagtgcagcagtctgagattaacaccccatccccgggagaactctaagaaggagctgatgtggaggagcagctgagacagttcaagatgacgaccacagtagccacagactatgacaacattgagatccagcagcagtacagtgatgtcaacaaccgctgggatgtcgacgactgggacaatgagaacagctctgcgcggctttttgagcggtcccgcatcaaggctctggcagatgagcgtgaagccgtgcagaagaagaccttcaccaagtgggtcaattcccaccttgcccgtgtgtcctgccggatcacagacctgtacactgaccttcgagatggacggatgctcatcaagctgctggaggtcctctctggagagaggctgcctaaacccaccaagggacgaatgcgcatccactgcttagagaatgtggacaaggcccttcagttcctgaaggagcagagagtccatcttgagaacatggggtcccatgacatcgtggatggaaaccaccggctgacccttggcctcatctggaccatcatcctgcgcttccagatccaggatatcagtgtggaaactgaagacaacaaagagaagaaatctgccaaggatgcattgctgttgtggtgccagatgaagacagctgggtaccccaatgtcaacattcacaatttcaccactagctggagggacggcatggccttcaatgcactgatacacaaacaccggcctgacctgatagattttgacaaactaaagaaatctaacgcacactacaacctgcagaatgcatttaatctggcagaacagcacctcggcctcactaaactgttggaccccgaagacatcagcgtggaccatcctgatgagaagtccataatcacttatgtggtgacttattaccactacttctctaagatgaaggccttagctgttgaaggaaaacgaattggaaaggtgcttgacaatgctattgaaacagaaaaaatgattgaaaagtatgaatcacttgcctctgaccttctggaatggattgaacaaaccatcatcattctgaacaatcgcaaatttgccaattcactggtcggggttcaacagcagcttcaggcattcaacacttaccgcactgtggagaaaccacccaaatttactgagaaggggaacttggaagtgctgctcttcaccattcagagcaagatgagggccaacaaccagaaggtctacatgccccgggaggggaagctcatctctgacatcaacaaggcctgggaaagactggaaaaagcggaacacgaaagagaactggctttgcggaatgagctcataagacaggagaaactggaacagctcgcccgcagatttgatcgcaaggcagctatgagggagacttggctgagcgaaaaccagcgtctggtgtctcaggacaactttgggtttgaccttcctgcagttgaggccgccacaaaaaagcacgaggccattgagacagacattgccgcatacgaggagcgtgtgcaggctgtggtagccgtggccagggagctcgaggccgagaattaccacgacatcaagcgcatcacagcgaggaaggacaatgtcatccggctctgggaatacctactggaactgctcagggcccggagacagcggctcgagatgaacctggggctgcagaagatattccaggaaatgctctacattatggactggatggatgaaatgaaggtgctagtattgtctcaagactatggcaaacacttacttggtgtggaagacctgttacagaagcacaccctggttgaagcagacattggcatccaggcagagcgggtgagaggtgtcaatgcctccgcccagaagttcgcaacagacggggaaggttacaagccctgtgacccccaggtgatccgagaccgcgtggcccacatggagttctgttatcaagagctttgccagctggcggctgagcgcagggcccgtctggaagagtcccgccgcctctggaagttcttctgggagatggcagaagaggaaggctggatacgggagaaggagaagatcctgtcctcggacgattacgggaaagacctgaccagcgtcatgcgcctgctcagcaagcaccgggcgttcgaggacgagatgagcggccgcagtggccactttgagcaggccatcaaggaaggcgaagacatgatcgcggaggagcacttcgggtcggagaagatccgtgagaggatcatttacatccgggagcagtgggccaacctagagcagctctcggccattcggaagaagcgcctggaggaggcctccctgctgcaccagttccaggcagatgctgatgacattgatgcctggatgctggacatcctcaagattgtctccagcagcgacgtgggccacgatgagtattccacacagtctctggtcaagaaacacaaggacgtggcggaagagatcgccaattacaggcccacccttgacacgctgcacgaacaagccagcgccctcccccaggagcatgccgagtctccagacgtgaggggcaggctgtcgggcatcgaggagcggtataaggaggtggcagagctgacgcggctgcggaagcaggcactccaggacactctggccctgtacaagatgttcagcgaggctgatgcctgtgagctctggatcgacgagaaggagcagtggctcaacaacatgcagatcccagagaagctggaggatctggaggtcatccagcacagatttgagagcctagaaccagaaatgaacaaccaggcttcccgggttgcagtggtgaaccagattgcacgccagctgatgcacagcggccacccaagtgagaaggaaatcaaagcccagcaggacaaactcaacacaaggtggagccagttcagagaactggttgacaggaagaaggatgccctcctgtctgccctgagcatccagaactaccacctcgagtgcaatgaaaccaaatcctggattcgggaaaagaccaaggtcatcgagtccacccaggacctgggcaatgacctggctggcgtcatggccctgcagcgcaagctgaccggcatggagcgggacttggtggccattgaggcaaagctgagtgacctgcagaaggaggcggagaagctggagtccgagcaccccgaccaggcccaggccatcctgtctcggctggccgagatcagcgacgtgtgggaggagatgaagaccaccctgaaaaaccgagaggcctccctgggagaggccagcaagctgcagcagttcctacgggacttggacgacttccagtcctggctctctaggacccagacagcgatcgcctcggaggacatgccaaacaccctgaccgaggctgagaagctgctcacgcagcacgagaacatcaagaacgagatcgacaactacgaggaggactaccagaagatgagggacatgggcgagatggtcacccaggggcagaccgatgcccagtacatgtttctgcggcagcggctgcaggccctggacactggatggaacgagctccacaagatgtgggagaacagacaaaatctcctatcccagtcacatgcctaccagcagttcctcagagacacgaagcaagccgaagcctttcttaacaaccaggagtatgttctggctcacactgaaatgcctaccaccttggaaggagctgaagcagcaattaaaaagcaagaggacttcatgaccaccatggacgccaatgaggagaagatcaatgctgtggtggagactggccggaggctggtgagcgatgggaacatcaactcagatcgcatccaggagaaggtggactctattgatgacagacataggaagaatcgtgagacagccagtgaacttttgatgaggttgaaggacaacagggatctacagaaattcctgcaagattgtcaagagctgtctctctggatcaatgagaagatgctcacagcccaggacatgtcttacgatgaagccagaaatctgcacagtaaatggttgaagcatcaagcatttatggcagaacttgcatccaacaaagaatggcttgacaaaatcgagaaggaaggaatgcagctcatttcagaaaagcctgagacggaagctgtggtgaaggagaaactcactggtttacataaaatgtgggaagtccttgaatccactacccagacaaaggcccagcggctctttgatgcaaacaaggccgaacttttcacccagagctgtgcagatctagacaaatggctgcacggcctggagagtcagattcagtctgatgactatggcaaagacctgaccagtgtcaatatcctgctgaaaaagcaacagatgctggagaatcagatggaagtgcggaagaaggagatcgaagagctccaaagccaagcccaggccctgagtcaggaagggaagagcaccgacgaggtagacagcaagcgcctcaccgtgcagaccaagttcatggagttgctggagcccttgaacgagaggaagcataacctgctggcctccaaagagatccatcagttcaacagggatgtggaggacgagatcttgtgggttggagagaggatgcctttggcaacttccacggatcatggccacaacctccagactgtgcagctgttaataaagaaaaatcagaccctccagaaagaaatccaggggcaccagcctcgcattgacgacatctttgagaggagccaaaacatcgtcactgacagcagcagcctcagcgctgaggccatcagacagaggcttgccgacctgaagcagctgtggggtctcctcattgaggagacagagaaacgccacaggcggctggaggaggcgcacagggcccagcagtactactttgacgctgctgaggccgaagcctggatgagcgagcaggagctgtacatgatgtcagaggagaaggccaaggatgagcagagtgctgtctccatgttgaagaagcaccagatcttagaacaagctgtggaggactatgcagagaccgtgcatcagctctccaagaccagccgggccctggtggccgacagccatcctgaaagtgagcgcattagcatgcggcagtccaaagtggataaactgtacgctggtctgaaagaccttgctgaagagagaagaggcaagctggatgagagacacaggttattccagctcaaccgggaggtggacgacctggagcagtggatcgctgagagggaggtggtcgcagggtcccatgaactgggacaggactatgagcatgtcacgatgttacaagaacgattccgggagtttgcccgagacaccgggaacattgggcaggagcgcgtggacacggtcaatcacctggcagatgagctcatcaactctggacattcagatgccgccaccatcgctgaatggaaggatggcctcaatgaagcctgggccgacctcctggagctcattgacacaagaacacagattcttgccgcttcctatgaactgcacaagttttaccacgatgccaaggagatctttgggcgtatacaggacaaacacaagaaactccctgaggagcttgggagagatcagaacacagtggagaccttacagagaatgcacactacatttgagcatgacatccaggctctgggcacacaggtgaggcagctgcaggaggatgcagcccgcctccaggcggcctatgcgggtgacaaggccgacgatatccagaagcgcgagaacgaggtcctggaagcctggaagtccctcctggacgcctgtgagagccgcagggtgcggctggtggacacaggggacaagttccgcttcttcagcatggtgcgcgacctcatgctctggatggaggatgtcatccggcagatcgaggcccaggagaagccaagggatgtatcatctgttgaactcttaatgaataatcatcaaggcatcaaagctgaaattgatgcacgtaatgacagtttcacaacctgcattgaacttgggaaatccctgttggcgagaaaacactatgcatctgaggagatcaaggaaaaattactgcagttgacggaaaagaggaaagaaatgatcgacaagtgggaagaccgatgggaatggttaagactgattctggaggtccatcagttctcaagagacgccagtgtggccgaggcctggctgcttggacaggagccgtacctatccagccgagagataggccagagcgtggacgaggtggagaagctcatcaagcgccacgaggcatttgaaaagtctgcagcaacctgggatgagaggttctctgccctggaaaggctgactacattggagttactggaagtgcgcagacagcaagaggaagaggagaggaagaggcggccgccttctcccgagccgagcacgaaggtttcagaggaagccgagtcccagcagcagtgggatacttcaaaaggagaacaagtttcccaaaacggtttgccagctgaacagggatctccacggatggcagaaacggtggacacaagcgaaatggtcaacggcgctacagaacaaaggacgagctctaaagagtccagccccatcccctccccgacctctgatcgtaaagccaagactgccctcccagcccagagtgccgccaccttaccagccagaacccaggagacaccttcggcccagatggaaggcttcctcaatcggaaacacgagtgggaggcccacaataagaaagcctcaagcaggtcctggcacaatgtttattgtgtcataaataaccaagaaatgggtttctacaaagatgcaaagactgctgcttctggaattccctaccacagcgaggtccctgtgagtttgaaagaagctgtctgcgaagtggcccttgattaaagacgatgaggaaatgaacacatggatccaggctatctcttccgccatctcctctgataaacacgaggtgtctgccagcacccagagcacgcccagcattcaggcgggcgcagacccttcccaaccagngtggtaaccattccagcgggttccgttcc

SEQ ID NO: 357072 - DNA, 7237 bp, Homo sapiens
gtgagctgaagcagggcagggcatcaactcacccaggaagtgcaaggggtttggggattttcctttcctagccaagggaaggcatgacagactgtacctggaaaaacaggacactcttgcccaaatactgcactttttgcacagtcttagcaactggcagaccaggagattctctcctgtgcctgattcattgggtcccacacccatagggccttgcttactgccagtgcagcagtctgagattaacaccccatccccgggagaactctaagaaggagctgatgtggaggagcagctgagacagttcaagatgacgaccacagtagccacagactatgacaacattgagatccagcagcagtacagtgatgtcaacaaccgctgggatgtcgacgactgggacaatgagaacagctctgcgcggctttttgagcggtcccgcatcaaggctctggcagatgagcgtgaagccgtgcagaagaagaccttcaccaagtgggtcaattcccaccttgcccgtgtgtcctgccggatcacagacctgtacactgaccttcgagatggacggatgctcatcaagctgctggaggtcctctctggagagaggctgcctaaacccaccaagggacgaatgcgcatccactgcttagagaatgtggacaaggcccttcagttcctgaaggagcagagagtccatcttgagaacatggggtcccatgacatcgtggatggaaaccaccggctgacccttggcctcatctggaccatcatcctgcgcttccagatccaggatatcagtgtggaaactgaagacaacaaagagaagaaatctgccaaggatgcattgctgttgtggtgccagatgaagacagctgggtaccccaatgtcaacattcacaatttcaccactagctggagggacggcatggccttcaatgcactgatacacaaacaccggcctgacctgatagattttgacaaactaaagaaatctaacgcacactacaacctgcagaatgcatttaatctggcagaacagcacctcggcctcactaaactgttggaccccgaagacatcagcgtggaccatcctgatgagaagtccataatcacttatgtggtgacttattaccactacttctctaagatgaaggccttagctgttgaaggaaaacgaattggaaaggtgcttgacaatgctattgaaacagaaaaaatgattgaaaagtatgaatcacttgcctctgaccttctggaatggattgaacaaaccatcatcattctgaacaatcgcaaatttgccaattcactggtcggggttcaacagcagcttcaggcattcaacacttaccgcactgtggagaaaccacccaaatttactgagaaggggaacttggaagtgctgctcttcaccattcagagcaagatgagggccaacaaccagaaggtctacatgccccgggaggggaagctcatctctgacatcaacaaggcctgggaaagactggaaaaagcggaacacgaaagagaactggctttgcggaatgagctcataagacaggagaaactggaacagctcgcccgcagatttgatcgcaaggcagctatgagggagacttggctgagcgaaaaccagcgtctggtgtctcaggacaactttgggtttgaccttcctgcagttgaggccgccacaaaaaagcacgaggccattgagacagacattgccgcatacgaggagcgtgtgcaggctgtggtagccgtggccagggagctcgaggccgagaattaccacgacatcaagcgcatcacagcgaggaaggacaatgtcatccggctctgggaatacctactggaactgctcagggcccggagacagcggctcgagatgaacctggggctgcagaagatattccaggaaatgctctacattatggactggatggatgaaatgaaggtgctagtattgtctcaagactatggcaaacacttacttggtgtggaagacctgttacagaagcacaccctggttgaagcagacattggcatccaggcagagcgggtgagaggtgtcaatgcctccgcccagaagttcgcaacagacggggaaggttacaagccctgtgacccccaggtgatccgagaccgcgtggcccacatggagttctgttatcaagagctttgccagctggcggctgagcgcagggcccgtctggaagagtcccgccgcctctggaagttcttctgggagatggcagaagaggaaggctggatacgggagaaggagaagatcctgtcctcggacgattacgggaaagacctgaccagcgtcatgcgcctgctcagcaagcaccgggcgttcgaggacgagatgagcggccgcagtggccactttgagcaggccatcaaggaaggcgaagacatgatcgcggaggagcacttcgggtcggagaagatccgtgagaggatcatttacatccgggagcagtgggccaacctagagcagctctcggccattcggaagaagcgcctggaggaggcctccctgctgcaccagttccaggcagatgctgatgacattgatgcctggatgctggacatcctcaagattgtctccagcagcgacgtgggccacgatgagtattccacacagtctctggtcaagaaacacaaggacgtggcggaagagatcgccaattacaggcccacccttgacacgctgcacgaacaagccagcgccctcccccaggagcatgccgagtctccagacgtgaggggcaggctgtcgggcatcgaggagcggtataaggaggtggcagagctgacgcggctgcggaagcaggcactccaggacactctggccctgtacaagatgttcagcgaggctgatgcctgtgagctctggatcgacgagaaggagcagtggctcaacaacatgcagatcccagagaagctggaggatctggaggtcatccagcacagatttgagagcctagaaccagaaatgaacaaccaggcttcccgggttgcagtggtgaaccagattgcacgccagctgatgcacagcggccacccaagtgagaaggaaatcaaagcccagcaggacaaactcaacacaaggtggagccagttcagagaactggttgacaggaagaaggatgccctcctgtctgccctgagcatccagaactaccacctcgagtgcaatgaaaccaaatcctggattcgggaaaagaccaaggtcatcgagtccacccaggacctgggcaatgacctggctggcgtcatggccctgcagcgcaagctgaccggcatggagcgggacttggtggccattgaggcaaagctgagtgacctgcagaaggaggcggagaagctggagtccgagcaccccgaccaggcccaggccatcctgtctcggctggccgagatcagcgacgtgtgggaggagatgaagaccaccctgaaaaaccgagaggcctccctgggagaggccagcaagctgcagcagttcctacgggacttggacgacttccagtcctggctctctaggacccagacagcgatcgcctcggaggacatgccaaacaccctgaccgaggctgagaagctgctcacgcagcacgagaacatcaagaacgagatcgacaactacgaggaggactaccagaagatgagggacatgggcgagatggtcacccaggggcagaccgatgcccagtacatgtttctgcggcagcggctgcaggccctggacactggatggaacgagctccacaagatgtgggagaacagacaaaatctcctatcccagtcacatgcctaccagcagttcctcagagacacgaagcaagccgaagcctttcttaacaaccaggagtatgttctggctcacactgaaatgcctaccaccttggaaggagctgaagcagcaattaaaaagcaagaggacttcatgaccaccatggacgccaatgaggagaagatcaatgctgtggtggagactggccggaggctggtgagcgatgggaacatcaactcagatcgcatccaggagaaggtggactctattgatgacagacataggaagaatcgtgagacagccagtgaacttttgatgaggttgaaggacaacagggatctacagaaattcctgcaagattgtcaagagctgtctctctggatcaatgagaagatgctcacagcccaggacatgtcttacgatgaagccagaaatctgcacagtaaatggttgaagcatcaagcatttatggcagaacttgcatccaacaaagaatggcttgacaaaatcgagaaggaaggaatgcagctcatttcagaaaagcctgagacggaagctgtggtgaaggagaaactcactggtttacataaaatgtgggaagtccttgaatccactacccagacaaaggcccagcggctctttgatgcaaacaaggccgaacttttcacccagagctgtgcagatctagacaaatggctgcacggcctggagagtcagattcagtctgatgactatggcaaagacctgaccagtgtcaatatcctgctgaaaaagcaacagatgctggagaatcagatggaagtgcggaagaaggagatcgaagagctccaaagccaagcccaggccctgagtcaggaagggaagagcaccgacgaggtagacagcaagcgcctcaccgtgcagaccaagttcatggagttgctggagcccttgaacgagaggaagcataacctgctggcctccaaagagatccatcagttcaacagggatgtggaggacgagatcttgtgggttggagagaggatgcctttggcaacttccacggatcatggccacaacctccagactgtgcagctgttaataaagaaaaatcagaccctccagaaagaaatccaggggcaccagcctcgcattgacgacatctttgagaggagccaaaacatcgtcactgacagcagcagcctcagcgctgaggccatcagacagaggcttgccgacctgaagcagctgtggggtctcctcattgaggagacagagaaacgccacaggcggctggaggaggcgcacagggcccagcagtactactttgacgctgctgaggccgaagcctggatgagcgagcaggagctgtacatgatgtcagaggagaaggccaaggatgagcagagtgctgtctccatgttgaagaagcaccagatcttagaacaagctgtggaggactatgcagagaccgtgcatcagctctccaagaccagccgggccctggtggccgacagccatcctgaaagtgagcgcattagcatgcggcagtccaaagtggataaactgtacgctggtctgaaagaccttgctgaagagagaagaggcaagctggatgagagacacaggttattccagctcaaccgggaggtggacgacctggagcagtggatcgctgagagggaggtggtcgcagggtcccatgaactgggacaggactatgagcatgtcacgatgttacaagaacgattccgggagtttgcccgagacaccgggaacattgggcaggagcgcgtggacacggtcaatcacctggcagatgagctcatcaactctggacattcagatgccgccaccatcgctgaatggaaggatggcctcaatgaagcctgggccgacctcctggagctcattgacacaagaacacagattcttgccgcttcctatgaactgcacaagttttaccacgatgccaaggagatctttgggcgtatacaggacaaacacaagaaactccctgaggagcttgggagagatcagaacacagtggagaccttacagagaatgcacactacatttgagcatgacatccaggctctgggcacacaggtgaggcagctgcaggaggatgcagcccgcctccaggcggcctatgcgggtgacaaggccgacgatatccagaagcgcgagaacgaggtcctggaagcctggaagtccctcctggacgcctgtgagagccgcagggtgcggctggtggacacaggggacaagttccgcttcttcagcatggtgcgcgacctcatgctctggatggaggatgtcatccggcagatcgaggcccaggagaagccaagggatgtatcatctgttgaactcttaatgaataatcatcaaggcatcaaagctgaaattgatgcacgtaatgacagtttcacaacctgcattgaacttgggaaatccctgttggcgagaaaacactatgcatctgaggagatcaaggaaaaattactgcagttgacggaaaagaggaaagaaatgatcgacaagtgggaagaccgatgggaatggttaagactgattctggaggtccatcagttctcaagagacgccagtgtggccgaggcctggctgcttggacaggagccgtacctatccagccgagagataggccagagcgtggacgaggtggagaagctcatcaagcgccacgaggcatttgaaaagtctgcagcaacctgggatgagaggttctctgccctggaaaggctgactacattggagttactggaagtgcgcagacagcaagaggaagaggagaggaagaggcggccgccttctcccgagccgagcacgaaggtttcagaggaagccgagtcccagcagcagtgggatacttcaaaaggagaacaagtttcccaaaacggtttgccagctgaacagggatctccacggatggcagaaacggtggacacaagcgaaatggtcaacggcgctacagaacaaaggacgagctctaaagagtccagccccatcccctccccgacctctgatcgtaaagccaagactgccctcccagcccagagtgccgccaccttaccagccagaacccaggagacaccttcggcccagatggaaggcttcctcaatcggaaacacgagtgggaggcccacaataagaaagcctcaagcaggtcctggcacaatgtttattgtgtcataaataaccaagaaatgggtttctacaaagatgcaaagactgctgcttctggaattccctaccacagcgaggtccctgtgagtttgaaagaagctgtctgcgaagtggcccttgattagcttctccacctcgtccacgctgtggcatatctctcgggtggataggtacggctcctgtccaagcagccaggcctcggccacactggcgtctcttgagaactgatggacctccagaatcagtct

SEQ ID NO: 357073 - DNA, 9502 bp, Homo sapiens
  misc_feature (9038)..(9038): n is a, c, g, or t
gtgagctgaagcagggcagggcatcaactcacccaggaagtgcaaggggtttggggattttcctttcctagccaagggaaggcatgacagactgtacctggaaaaacaggacactcttgcccaaatactgcactttttgcacagtcttagcaactggcagaccaggagattctctcctgtgcctgattcattgggtcccacacccatagggccttgcttactgccagtgcagcagtctgagattaacaccccatccccgggagaactctaagaaggagctgatgtggaggagcagctgagacagttcaagatgacgaccacagtagccacagactatgacaacattgagatccagcagcagtacagtgatgtcaacaaccgctgggatgtcgacgactgggacaatgagaacagctctgcgcggctttttgagcggtcccgcatcaaggctctggcagatgagcgtgaagccgtgcagaagaagaccttcaccaagtgggtcaattcccaccttgcccgtgtgtcctgccggatcacagacctgtacactgaccttcgagatggacggatgctcatcaagctgctggaggtcctctctggagagaggctgcctaaacccaccaagggacgaatgcgcatccactgcttagagaatgtggacaaggcccttcagttcctgaaggagcagagagtccatcttgagaacatggggtcccatgacatcgtggatggaaaccaccggctgacccttggcctcatctggaccatcatcctgcgcttccagatccaggatatcagtgtggaaactgaagacaacaaagagaagaaatctgccaaggatgcattgctgttgtggtgccagatgaagacagctgggtaccccaatgtcaacattcacaatttcaccactagctggagggacggcatggccttcaatgcactgatacacaaacaccggcctgacctgatagattttgacaaactaaagaaatctaacgcacactacaacctgcagaatgcatttaatctggcagaacagcacctcggcctcactaaactgttggaccccgaagacatcagcgtggaccatcctgatgagaagtccataatcacttatgtggtgacttattaccactacttctctaagatgaaggccttagctgttgaaggaaaacgaattggaaaggtgcttgacaatgctattgaaacagaaaaaatgattgaaaagtatgaatcacttgcctctgaccttctggaatggattgaacaaaccatcatcattctgaacaatcgcaaatttgccaattcactggtcggggttcaacagcagcttcaggcattcaacacttaccgcactgtggagaaaccacccaaatttactgagaaggggaacttggaagtgctgctcttcaccattcagagcaagatgagggccaacaaccagaaggtctacatgccccgggaggggaagctcatctctgacatcaacaaggcctgggaaagactggaaaaagcggaacacgaaagagaactggctttgcggaatgagctcataagacaggagaaactggaacagctcgcccgcagatttgatcgcaaggcagctatgagggagacttggctgagcgaaaaccagcgtctggtgtctcaggacaactttgggtttgaccttcctgcagttgaggccgccacaaaaaagcacgaggccattgagacagacattgccgcatacgaggagcgtgtgcaggctgtggtagccgtggccagggagctcgaggccgagaattaccacgacatcaagcgcatcacagcgaggaaggacaatgtcatccggctctgggaatacctactggaactgctcagggcccggagacagcggctcgagatgaacctggggctgcagaagatattccaggaaatgctctacattatggactggatggatgaaatgaaggtgctagtattgtctcaagactatggcaaacacttacttggtgtggaagacctgttacagaagcacaccctggttgaagcagacattggcatccaggcagagcgggtgagaggtgtcaatgcctccgcccagaagttcgcaacagacggggaaggttacaagccctgtgacccccaggtgatccgagaccgcgtggcccacatggagttctgttatcaagagctttgccagctggcggctgagcgcagggcccgtctggaagagtcccgccgcctctggaagttcttctgggagatggcagaagaggaaggctggatacgggagaaggagaagatcctgtcctcggacgattacgggaaagacctgaccagcgtcatgcgcctgctcagcaagcaccgggcgttcgaggacgagatgagcggccgcagtggccactttgagcaggccatcaaggaaggcgaagacatgatcgcggaggagcacttcgggtcggagaagatccgtgagaggatcatttacatccgggagcagtgggccaacctagagcagctctcggccattcggaagaagcgcctggaggaggcctccctgctgcaccagttccaggcagatgctgatgacattgatgcctggatgctggacatcctcaagattgtctccagcagcgacgtgggccacgatgagtattccacacagtctctggtcaagaaacacaaggacgtggcggaagagatcgccaattacaggcccacccttgacacgctgcacgaacaagccagcgccctcccccaggagcatgccgagtctccagacgtgaggggcaggctgtcgggcatcgaggagcggtataaggaggtggcagagctgacgcggctgcggaagcaggcactccaggacactctggccctgtacaagatgttcagcgaggctgatgcctgtgagctctggatcgacgagaaggagcagtggctcaacaacatgcagatcccagagaagctggaggatctggaggtcatccagcacagatttgagagcctagaaccagaaatgaacaaccaggcttcccgggttgcagtggtgaaccagattgcacgccagctgatgcacagcggccacccaagtgagaaggaaatcaaagcccagcaggacaaactcaacacaaggtggagccagttcagagaactggttgacaggaagaaggatgccctcctgtctgccctgagcatccagaactaccacctcgagtgcaatgaaaccaaatcctggattcgggaaaagaccaaggtcatcgagtccacccaggacctgggcaatgacctggctggcgtcatggccctgcagcgcaagctgaccggcatggagcgggacttggtggccattgaggcaaagctgagtgacctgcagaaggaggcggagaagctggagtccgagcaccccgaccaggcccaggccatcctgtctcggctggccgagatcagcgacgtgtgggaggagatgaagaccaccctgaaaaaccgagaggcctccctgggagaggccagcaagctgcagcagttcctacgggacttggacgacttccagtcctggctctctaggacccagacagcgatcgcctcggaggacatgccaaacaccctgaccgaggctgagaagctgctcacgcagcacgagaacatcaagaacgagatcgacaactacgaggaggactaccagaagatgagggacatgggcgagatggtcacccaggggcagaccgatgcccagtacatgtttctgcggcagcggctgcaggccctggacactggatggaacgagctccacaagatgtgggagaacagacaaaatctcctatcccagtcacatgcctaccagcagttcctcagagacacgaagcaagccgaagcctttcttaacaaccaggagtatgttctggctcacactgaaatgcctaccaccttggaaggagctgaagcagcaattaaaaagcaagaggacttcatgaccaccatggacgccaatgaggagaagatcaatgctgtggtggagactggccggaggctggtgagcgatgggaacatcaactcagatcgcatccaggagaaggtggactctattgatgacagacataggaagaatcgtgagacagccagtgaacttttgatgaggttgaaggacaacagggatctacagaaattcctgcaagattgtcaagagctgtctctctggatcaatgagaagatgctcacagcccaggacatgtcttacgatgaagccagaaatctgcacagtaaatggttgaagcatcaagcatttatggcagaacttgcatccaacaaagaatggcttgacaaaatcgagaaggaaggaatgcagctcatttcagaaaagcctgagacggaagctgtggtgaaggagaaactcactggtttacataaaatgtgggaagtccttgaatccactacccagacaaaggcccagcggctctttgatgcaaacaaggccgaacttttcacccagagctgtgcagatctagacaaatggctgcacggcctggagagtcagattcagtctgatgactatggcaaagacctgaccagtgtcaatatcctgctgaaaaagcaacagatgctggagaatcagatggaagtgcggaagaaggagatcgaagagctccaaagccaagcccaggccctgagtcaggaagggaagagcaccgacgaggtagacagcaagcgcctcaccgtgcagaccaagttcatggagttgctggagcccttgaacgagaggaagcataacctgctggcctccaaagagatccatcagttcaacagggatgtggaggacgagatcttgtgggttggagagaggatgcctttggcaacttccacggatcatggccacaacctccagactgtgcagctgttaataaagaaaaatcagaccctccagaaagaaatccaggggcaccagcctcgcattgacgacatctttgagaggagccaaaacatcgtcactgacagcagcagcctcagcgctgaggccatcagacagaggcttgccgacctgaagcagctgtggggtctcctcattgaggagacagagaaacgccacaggcggctggaggaggcgcacagggcccagcagtactactttgacgctgctgaggccgaagcctggatgagcgagcaggagctgtacatgatgtcagaggagaaggccaaggatgagcagagtgctgtctccatgttgaagaagcaccagatcttagaacaagctgtggaggactatgcagagaccgtgcatcagctctccaagaccagccgggccctggtggccgacagccatcctgaaagtgagcgcattagcatgcggcagtccaaagtggataaactgtacgctggtctgaaagaccttgctgaagagagaagaggcaagctggatgagagacacaggttattccagctcaaccgggaggtggacgacctggagcagtggatcgctgagagggaggtggtcgcagggtcccatgaactgggacaggactatgagcatgtcacgatgttacaagaacgattccgggagtttgcccgagacaccgggaacattgggcaggagcgcgtggacacggtcaatcacctggcagatgagctcatcaactctggacattcagatgccgccaccatcgctgaatggaaggatggcctcaatgaagcctgggccgacctcctggagctcattgacacaagaacacagattcttgccgcttcctatgaactgcacaagttttaccacgatgccaaggagatctttgggcgtatacaggacaaacacaagaaactccctgaggagcttgggagagatcagaacacagtggagaccttacagagaatgcacactacatttgagcatgacatccaggctctgggcacacaggtgaggcagctgcaggaggatgcagcccgcctccaggcggcctatgcgggtgacaaggccgacgatatccagaagcgcgagaacgaggtcctggaagcctggaagtccctcctggacgcctgtgagagccgcagggtgcggctggtggacacaggggacaagttccgcttcttcagcatggtgcgcgacctcatgctctggatggaggatgtcatccggcagatcgaggcccaggagaagccaagggatgtatcatctgttgaactcttaatgaataatcatcaaggcatcaaagctgaaattgatgcacgtaatgacagtttcacaacctgcattgaacttgggaaatccctgttggcgagaaaacactatgcatctgaggagatcaaggaaaaattactgcagttgacggaaaagaggaaagaaatgatcgacaagtgggaagaccgatgggaatggttaagactgattctggaggtccatcagttctcaagagacgccagtgtggccgaggcctggctgcttggacaggagccgtacctatccagccgagagataggccagagcgtggacgaggtggagaagctcatcaagcgccacgaggcatttgaaaagtctgcagcaacctgggatgagaggttctctgccctggaaaggctgactacattggagttactggaagtgcgcagacagcaagaggaagaggagaggaagaggcggccgccttctcccgagccgagcacgaaggtttcagaggaagccgagtcccagcagcagtgggatacttcaaaaggagaacaagtttcccaaaacggtttgccagctgaacagggatctccacgggttagttaccgctctcaaacctaccaaaactacaaaaactttaatagcagacggacagccagtgaccagccatggtctggactgtgaagttcactaccatttgtcaagaatcaccctttccaaatcctctgggttttgactttttggcttccacttcacccaaaatgttaaaatttttacttaattcatagccttccttggtttcatatttgtttgcatttaattcatgtttgagtctcttaactgatggatgcccacttgccttaaagcagcatacttattttttgtttatttattgtgagctttttactttattaagattttacagcgaaacccttacatgagtaattgaaatgaaattaaatgagattacagcataatgaagaagaaaactagaatctaacaggtatgacacattcagttattctaacagggcacagtactgtgctatatgtagccgcctttacagatgttattaacctatagtagtttactattaactaggaagactggtgtatgaggagggagacattctgtaataagattaaaacctaaagtcagctgtgtaacattccatgaaagatgcattcatttattgaagatgacaaaaaagggagtcagatatattctggaagctattttaattttaggcacacaatctcatacattttgagacccttgggtcatttattactttttacaaactagttcctctctttttttctgccaagtcctgaattgaaaactgtaggcttccttgcacagatgttgcagccagcctcaggagtaaagtgcccgctgactgctgccgccacctctgtctcgctccctgtcagtgctgctggcacgtgggacgcggcaggtgacagccgttctcagcatgttttagaagcttgcctcacagacttccatgcctctccattcagccgatgacttcagggtgtcaaactgttttaatttttcaaacaaatggaacagaagccattgtggttcatcctgattacttgaacgttgcacttggtggaccgtgcctgggagcgctcgcatgccccctggcttcagaagtcatgtcagtgtctctgtagacaaactccactgtacatcttggattaatcttctgattcattgttcattttctcaagactttttgtggaattctctgataaaggaagcttttaggatggtatctatcaggccaccagcaggaattgaaaatgttttcacaaaaatccttttccttagaaataaaagctggtgacagagatggtttccttgtaccgataaaaacaaaaccaaatccatattatacatcaaaaccttgtgagacattcacttgctcttttgccatatttagatgtgttagtggaatcagaaacctgttttgatatgtgttctccatgagttaagtctgatttgtctttttatttcatgatgcatgtcttttttttcttttgtcaggataacgtcatatagcatcttgtttgtttttccttatctctatgtacatatctatctacttctgactgtagatgggtatatagatagatgccaagcttcttatgttctgggggtagtatgcatcattattgggtctctgccttaaaacacatcaaaattcattttagacaaaaaaacttctgccttgtctttggtcattagggagctctaatgtgtgtttgtggctccaagttacattttgtgtttcattgatctatatgtatatatgtgatgttttcatatatatatgtgtgtgtgtttaaattttgtatcatcaggactgacacccaatttgacactttttgtatctagaagaccctccaaaaaaggaaccacataagcacacaagaaaagagtgctatgatgttcttagcatttgctatcatgcctatttttatctagatttttaaatgtagcttgtcataacaaaattttaattacaattggcttgtatgagaagaaaaagtatttttattgttttgagtgatgacgcagagactcaatgaacttgaaaatagcattgcttcgtgcactttgaataccaatcaggtgttttctgtgctactagttgtcacgttgcattcatgttcacctcctgatttaagtatctcgggtgtgcccagccactaaagcactctggactaatcgctaaagagaagcaacgtggggggtggggttgcgagggatgtgttcacatgtacccatcatttgatcatagcactgtgattgcttttgatgtgtgtctctagtggtgtgttgtctgttggcatgcttaaagcacatgtccattaaaattcattttgttcctttnaaaaaaaaaaaaaaaaaaaaaaaaaaaaaaaaaaaaaaaaaaaaaaaaaaaaaaaaaaaaggggggggggggaaaaataaccccggggggggccattgcccccccttttttttaaaggggggcccccaaaaggggggcgatataaaaaaaagacagacgggggcgggtaaaaaaccgcggcgagcggaaacacggccactggggtcattggggaagagagaccacctcgcgggggggacacagggggcaccaccccacaagatataggccggggaaaaaaaaatgggctttagtgtaccccgaccaatcgcgggggaaaatcgtccggtttattcaaattatgaggctccataaacacgagaagaagacagacagaagaggcgacgcacacagagagagagaagagacgaagtacagaggaagaaaacaagagcagaaagagagcaagacgagaacagcccaca

SEQ ID NO: 357074 - DNA, 6347 bp, Homo sapiens
gtgagctgaagcagggcagggcatcaactcacccaggaagtgcaaggggtttggggattttcctttcctagccaagggaaggcatgacagactgtacctggaaaaacaggacactcttgcccaaatactgcactttttgcacagtcttagcaactggcagaccaggagattctctcctgtgcctgattcattgggtcccacacccatagggccttgcttactgccagtgcagcagtctgagattaacaccccatccccgggagaactctaagaaggagctgatgtggaggagcagctgagacagttcaagatgacgaccacagtagccacagactatgacaacattgagatccagcagcagtacagtgatgtcaacaaccgctgggatgtcgacgactgggacaatgagaacagctctgcgcggctttttgagcggtcccgcatcaaggctctggcagatgagcgtgaagccgtgcagaagaagaccttcaccaagtgggtcaattcccaccttgcccgtgtgtcctgccggatcacagacctgtacactgaccttcgagatggacggatgctcatcaagctgctggaggtcctctctggagagaggctgcctaaacccaccaagggacgaatgcgcatccactgcttagagaatgtggacaaggcccttcagttcctgaaggagcagagagtccatcttgagaacatggggtcccatgacatcgtggatggaaaccaccggctgacccttggcctcatctggaccatcatcctgcgcttccagatccaggatatcagtgtggaaactgaagacaacaaagagaagaaatctgccaaggatgcattgctgttgtggtgccagatgaagacagctgggtaccccaatgtcaacattcacaatttcaccactagctggagggacggcatggccttcaatgcactgatacacaaacaccggcctgacctgatagattttgacaaactaaagaaatctaacgcacactacaacctgcagaatgcatttaatctggcagaacagcacctcggcctcactaaactgttggaccccgaagacatcagcgtggaccatcctgatgagaagtccataatcacttatgtggtgacttattaccactacttctctaagatgaaggccttagctgttgaaggaaaacgaattggaaaggtgcttgacaatgctattgaaacagaaaaaatgattgaaaagtatgaatcacttgcctctgaccttctggaatggattgaacaaaccatcatcattctgaacaatcgcaaatttgccaattcactggtcggggttcaacagcagcttcaggcattcaacacttaccgcactgtggagaaaccacccaaatttactgagaaggggaacttggaagtgctgctcttcaccattcagagcaagatgagggccaacaaccagaaggtctacatgccccgggaggggaagctcatctctgacatcaacaaggcctgggaaagactggaaaaagcggaacacgaaagagaactggctttgcggaatgagctcataagacaggagaaactggaacagctcgcccgcagatttgatcgcaaggcagctatgagggagacttggctgagcgaaaaccagcgtctggtgtctcaggacaactttgggtttgaccttcctgcagttgaggccgccacaaaaaagcacgaggccattgagacagacattgccgcatacgaggagcgtgtgcaggctgtggtagccgtggccagggagctcgaggccgagaattaccacgacatcaagcgcatcacagcgaggaaggacaatgtcatccggctctgggaatacctactggaactgctcagggcccggagacagcggctcgagatgaacctggggctgcagaagatattccaggaaatgctctacattatggactggatggatgaaatgaaggtgctagtattgtctcaagactatggcaaacacttacttggtgtggaagacctgttacagaagcacaccctggttgaagcagacattggcatccaggcagagcgggtgagaggtgtcaatgcctccgcccagaagttcgcaacagacggggaaggttacaagccctgtgacccccaggtgatccgagaccgcgtggcccacatggagttctgttatcaagagctttgccagctggcggctgagcgcagggcccgtctggaagagtcccgccgcctctggaagttcttctgggagatggcagaagaggaaggctggatacgggagaaggagaagatcctgtcctcggacgattacgggaaagacctgaccagcgtcatgcgcctgctcagcaagcaccgggcgttcgaggacgagatgagcggccgcagtggccactttgagcaggccatcaaggaaggcgaagacatgatcgcggaggagcacttcgggtcggagaagatccgtgagaggatcatttacatccgggagcagtgggccaacctagagcagctctcggccattcggaagaagcgcctggaggaggcctccctgctgcaccagttccaggcagatgctgatgacattgatgcctggatgctggacatcctcaagattgtctccagcagcgacgtgggccacgatgagtattccacacagtctctggtcaagaaacacaaggacgtggcggaagagatcgccaattacaggcccacccttgacacgctgcacgaacaagccagcgccctcccccaggagcatgccgagtctccagacgtgaggggcaggctgtcgggcatcgaggagcggtataaggaggtggcagagctgacgcggctgcggaagcaggcactccaggacactctggccctgtacaagatgttcagcgaggctgatgcctgtgagctctggatcgacgagaaggagcagtggctcaacaacatgcagatcccagagaagctggaggatctggaggtcatccagcacagatttgagagcctagaaccagaaatgaacaaccaggcttcccgggttgcagtggtgaaccagattgcacgccagctgatgcacagcggccacccaagtgagaaggaaatcaaagcccagcaggacaaactcaacacaaggtggagccagttcagagaactggttgacaggaagaaggatgccctcctgtctgccctgagcatccagaactaccacctcgagtgcaatgaaaccaaatcctggattcgggaaaagaccaaggtcatcgagtccacccaggacctgggcaatgacctggctggcgtcatggccctgcagcgcaagctgaccggcatggagcgggacttggtggccattgaggcaaagctgagtgacctgcagaaggaggcggagaagctggagtccgagcaccccgaccaggcccaggccatcctgtctcggctggccgagatcagcgacgtgtgggaggagatgaagaccaccctgaaaaaccgagaggcctccctgggagaggccagcaagctgcagcagttcctacgggacttggacgacttccagtcctggctctctaggacccagacagcgatcgcctcggaggacatgccaaacaccctgaccgaggctgagaagctgctcacgcagcacgagaacatcaagaacgagatcgacaactacgaggaggactaccagaagatgagggacatgggcgagatggtcacccaggggcagaccgatgcccagtacatgtttctgcggcagcggctgcaggccctggacactggatggaacgagctccacaagatgtgggagaacagacaaaatctcctatcccagtcacatgcctaccagcagttcctcagagacacgaagcaagccgaagcctttcttaacaaccaggagtatgttctggctcacactgaaatgcctaccaccttggaaggagctgaagcagcaattaaaaagcaagaggacttcatgaccaccatggacgccaatgaggagaagatcaatgctgtggtggagactggccggaggctggtgagcgatgggaacatcaactcagatcgcatccaggagaaggtggactctattgatgacagacataggaagaatcgtgagacagccagtgaacttttgatgaggttgaaggacaacagggatctacagaaattcctgcaagattgtcaagagctgtctctctggatcaatgagaagatgctcacagcccaggacatgtcttacgatgaagccagaaatctgcacagtaaatggttgaagcatcaagcatttatggcagaacttgcatccaacaaagaatggcttgacaaaatcgagaaggaaggaatgcagctcatttcagaaaagcctgagacggaagctgtggtgaaggagaaactcactggtttacataaaatgtgggaagtccttgaatccactacccagacaaaggcccagcggctctttgatgcaaacaaggccgaacttttcacccagagctgtgcagatctagacaaatggctgcacggcctggagagtcagattcagtctgatgactatggcaaagacctgaccagtgtcaatatcctgctgaaaaagcaacagatgctggagaatcagatggaagtgcggaagaaggagatcgaagagctccaaagccaagcccaggccctgagtcaggaagggaagagcaccgacgaggtagacagcaagcgcctcaccgtgcagaccaagttcatggagttgctggagcccttgaacgagaggaagcataacctgctggcctccaaagagatccatcagttcaacagggatgtggaggacgagatcttgtgggttggagagaggatgcctttggcaacttccacggatcatggccacaacctccagactgtgcagctgttaataaagaaaaatcagaccctccagaaagaaatccaggggcaccagcctcgcattgacgacatctttgagaggagccaaaacatcgtcactgacagcagcagcctcagcgctgaggccatcagacagaggcttgccgacctgaagcagctgtggggtctcctcattgaggagacagagaaacgccacaggcggctggaggaggcgcacagggcccagcagtactactttgacgctgctgaggccgaagcctggatgagcgagcaggagctgtacatgatgtcagaggagaaggccaaggatgagcagagtgctgtctccatgttgaagaagcaccagatcttagaacaagctgtggaggactatgcagagaccgtgcatcagctctccaagaccagccgggccctggtggccgacagccatcctgaaagtgagcgcattagcatgcggcagtccaaagtggataaactgtacgctggtctgaaagaccttgctgaagagagaagaggcaagctggatgagagacacaggttattccagctcaaccgggaggtggacgacctggagcagtggatcgctgagagggaggtggtcgcagggtcccatgaactgggacaggactatgagcatgtcacgatgttacaagaacgattccgggagtttgcccgagacaccgggaacattgggcaggagcgcgtggacacggtcaatcacctggcagatgagctcatcaactctggacattcagatgccgccaccatcgctgaatggaaggatggcctcaatgaagcctgggccgacctcctggagctcattgacacaagaacacagattcttgccgcttcctatgaactgcacaagttttaccacgatgccaaggagatctttgggcgtatacaggacaaacacaagaaactccctgaggagcttgggagagatcagaacacagtggagaccttacagagaatgcacactacatttgagcatgacatccaggctctgggcacacaggtgaggcagctgcaggaggatgcagcccgcctccaggcggcctatgcgggtgacaaggccgacgatatccagaagcgcgagaacgaggtcctggaagcctggaagtccctcctggacgcctgtgagagccgcagggtgcggctggtggacacaggggacaagttccgcttcttcagcatggtgcgcgacctcatgctctggatggaggatgtcatccggcagatcgaggcccaggagaagccaagggatgtatcatctgttgaactcttaatgaataatcatcaaggcatcaaagctgaaattgatgcacgtaatgacattgataggaatgaactccagaggctgggcctgaacagggaggtggtcgctcaggcctggtgctcagtcgtacgacctgtacctctcaacttttgccctatctgttaaatatatgctatgtcattaaatgcttttaaatcta

SEQ ID NO: 357075 - DNA, 6954 bp, Homo sapiens
gtgagctgaagcagggcagggcatcaactcacccaggaagtgcaaggggtttggggattttcctttcctagccaagggaaggcatgacagactgtacctggaaaaacaggacactcttgcccaaatactgcactttttgcacagtcttagcaactggcagaccaggagattctctcctgtgcctgattcattgggtcccacacccatagggccttgcttactgccagtgcagcagtctgagattaacaccccatccccgggagaactctaagaaggagctgatgtggaggagcagctgagacagttcaagatgacgaccacagtagccacagactatgacaacattgagatccagcagcagtacagtgatgtcaacaaccgctgggatgtcgacgactgggacaatgagaacagctctgcgcggctttttgagcggtcccgcatcaaggctctggcagatgagcgtgaagccgtgcagaagaagaccttcaccaagtgggtcaattcccaccttgcccgtgtgtcctgccggatcacagacctgtacactgaccttcgagatggacggatgctcatcaagctgctggaggtcctctctggagagaggctgcctaaacccaccaagggacgaatgcgcatccactgcttagagaatgtggacaaggcccttcagttcctgaaggagcagagagtccatcttgagaacatggggtcccatgacatcgtggatggaaaccaccggctgacccttggcctcatctggaccatcatcctgcgcttccagatccaggatatcagtgtggaaactgaagacaacaaagagaagaaatctgccaaggatgcattgctgttgtggtgccagatgaagacagctgggtaccccaatgtcaacattcacaatttcaccactagctggagggacggcatggccttcaatgcactgatacacaaacaccggcctgacctgatagattttgacaaactaaagaaatctaacgcacactacaacctgcagaatgcatttaatctggcagaacagcacctcggcctcactaaactgttggaccccgaagacatcagcgtggaccatcctgatgagaagtccataatcacttatgtggtgacttattaccactacttctctaagatgaaggccttagctgttgaaggaaaacgaattggaaaggtgcttgacaatgctattgaaacagaaaaaatgattgaaaagtatgaatcacttgcctctgaccttctggaatggattgaacaaaccatcatcattctgaacaatcgcaaatttgccaattcactggtcggggttcaacagcagcttcaggcattcaacacttaccgcactgtggagaaaccacccaaatttactgagaaggggaacttggaagtgctgctcttcaccattcagagcaagatgagggccaacaaccagaaggtctacatgccccgggaggggaagctcatctctgacatcaacaaggcctgggaaagactggaaaaagcggaacacgaaagagaactggctttgcggaatgagctcataagacaggagaaactggaacagctcgcccgcagatttgatcgcaaggcagctatgagggagacttggctgagcgaaaaccagcgtctggtgtctcaggacaactttgggtttgaccttcctgcagttgaggccgccacaaaaaagcacgaggccattgagacagacattgccgcatacgaggagcgtgtgcaggctgtggtagccgtggccagggagctcgaggccgagaattaccacgacatcaagcgcatcacagcgaggaaggacaatgtcatccggctctgggaatacctactggaactgctcagggcccggagacagcggctcgagatgaacctggggctgcagaagatattccaggaaatgctctacattatggactggatggatgaaatgaaggtgctagtattgtctcaagactatggcaaacacttacttggtgtggaagacctgttacagaagcacaccctggttgaagcagacattggcatccaggcagagcgggtgagaggtgtcaatgcctccgcccagaagttcgcaacagacggggaaggttacaagccctgtgacccccaggtgatccgagaccgcgtggcccacatggagttctgttatcaagagctttgccagctggcggctgagcgcagggcccgtctggaagagtcccgccgcctctggaagttcttctgggagatggcagaagaggaaggctggatacgggagaaggagaagatcctgtcctcggacgattacgggaaagacctgaccagcgtcatgcgcctgctcagcaagcaccgggcgttcgaggacgagatgagcggccgcagtggccactttgagcaggccatcaaggaaggcgaagacatgatcgcggaggagcacttcgggtcggagaagatccgtgagaggatcatttacatccgggagcagtgggccaacctagagcagctctcggccattcggaagaagcgcctggaggaggcctccctgctgcaccagttccaggcagatgctgatgacattgatgcctggatgctggacatcctcaagattgtctccagcagcgacgtgggccacgatgagtattccacacagtctctggtcaagaaacacaaggacgtggcggaagagatcgccaattacaggcccacccttgacacgctgcacgaacaagccagcgccctcccccaggagcatgccgagtctccagacgtgaggggcaggctgtcgggcatcgaggagcggtataaggaggtggcagagctgacgcggctgcggaagcaggcactccaggacactctggccctgtacaagatgttcagcgaggctgatgcctgtgagctctggatcgacgagaaggagcagtggctcaacaacatgcagatcccagagaagctggaggatctggaggtcatccagcacagatttgagagcctagaaccagaaatgaacaaccaggcttcccgggttgcagtggtgaaccagattgcacgccagctgatgcacagcggccacccaagtgagaaggaaatcaaagcccagcaggacaaactcaacacaaggtggagccagttcagagaactggttgacaggaagaaggatgccctcctgtctgccctgagcatccagaactaccacctcgagtgcaatgaaaccaaatcctggattcgggaaaagaccaaggtcatcgagtccacccaggacctgggcaatgacctggctggcgtcatggccctgcagcgcaagctgaccggcatggagcgggacttggtggccattgaggcaaagctgagtgacctgcagaaggaggcggagaagctggagtccgagcaccccgaccaggcccaggccatcctgtctcggctggccgagatcagcgacgtgtgggaggagatgaagaccaccctgaaaaaccgagaggcctccctgggagaggccagcaagctgcagcagttcctacgggacttggacgacttccagtcctggctctctaggacccagacagcgatcgcctcggaggacatgccaaacaccctgaccgaggctgagaagctgctcacgcagcacgagaacatcaagaacgagatcgacaactacgaggaggactaccagaagatgagggacatgggcgagatggtcacccaggggcagaccgatgcccagtacatgtttctgcggcagcggctgcaggccctggacactggatggaacgagctccacaagatgtgggagaacagacaaaatctcctatcccagtcacatgcctaccagcagttcctcagagacacgaagcaagccgaagcctttcttaacaaccaggagtatgttctggctcacactgaaatgcctaccaccttggaaggagctgaagcagcaattaaaaagcaagaggacttcatgaccaccatggacgccaatgaggagaagatcaatgctgtggtggagactggccggaggctggtgagcgatgggaacatcaactcagatcgcatccaggagaaggtggactctattgatgacagacataggaagaatcgtgagacagccagtgaacttttgatgaggttgaaggacaacagggatctacagaaattcctgcaagattgtcaagagctgtctctctggatcaatgagaagatgctcacagcccaggacatgtcttacgatgaagccagaaatctgcacagtaaatggttgaagcatcaagcatttatggcagaacttgcatccaacaaagaatggcttgacaaaatcgagaaggaaggaatgcagctcatttcagaaaagcctgagacggaagctgtggtgaaggagaaactcactggtttacataaaatgtgggaagtccttgaatccactacccagacaaaggcccagcggctctttgatgcaaacaaggccgaacttttcacccagagctgtgcagatctagacaaatggctgcacggcctggagagtcagattcagtctgatgactatggcaaagacctgaccagtgtcaatatcctgctgaaaaagcaacagatgctggagaatcagatggaagtgcggaagaaggagatcgaagagctccaaagccaagcccaggccctgagtcaggaagggaagagcaccgacgaggtagacagcaagcgcctcaccgtgcagaccaagttcatggagttgctggagcccttgaacgagaggaagcataacctgctggcctccaaagagatccatcagttcaacagggatgtggaggacgagatcttgtgggttggagagaggatgcctttggcaacttccacggatcatggccacaacctccagactgtgcagctgttaataaagaaaaatcagaccctccagaaagaaatccaggggcaccagcctcgcattgacgacatctttgagaggagccaaaacatcgtcactgacagcagcagcctcagcgctgaggccatcagacagaggcttgccgacctgaagcagctgtggggtctcctcattgaggagacagagaaacgccacaggcggctggaggaggcgcacagggcccagcagtactactttgacgctgctgaggccgaagcctggatgagcgagcaggagctgtacatgatgtcagaggagaaggccaaggatgagcagagtgctgtctccatgttgaagaagcaccagatcttagaacaagctgtggaggactatgcagagaccgtgcatcagctctccaagaccagccgggccctggtggccgacagccatcctgaaagtgagcgcattagcatgcggcagtccaaagtggataaactgtacgctggtctgaaagaccttgctgaagagagaagaggcaagctggatgagagacacaggttattccagctcaaccgggaggtggacgacctggagcagtggatcgctgagagggaggtggtcgcagggtcccatgaactgggacaggactatgagcatgtcactgtcaaactgttttaatttttcaaacaaatggaacagaagccattgtggttcatcctgattacttgaacgttgcacttggtggaccgtgcctgggagcgctcgcatgccccctggcttcagaagtcatgtcagtgtctctgtagacaaactccactgtacatcttggattaatcttctgattcattgttcattttctcaagactttttgtggaattctctgataaaggaagcttttaggatggtatctatcaggccaccagcaggaattgaaaatgttttcacaaaaatccttttccttagaaataaaagctggtgacagagatggtttccttgtaccgataaaaacaaaaccaaatccatattatacatcaaaaccttgtgagacattcacttgctcttttgccatatttagatgtgttagtggaatcagaaacctgttttgatatgtgttctccatgagttaagtctgatttgtctttttatttcatgatgcatgtcttttttttcttttgtcaggataacgtcatatagcatcttgtttgtttttccttatctctatgtacatatctatctacttctgactgtagatgggtatatagatagatgccaagcttcttatgttctgggggtagtatgcatcattattgggtctctgccttaaaacacatcaaaattcattttagacaaaaaaacttctgccttgtctttggtcattagggagctctaatgtgtgtttgtggctccaagttacattttgtgtttcattgatctatatgtatatatgtgatgttttcatatatatatgtgtgtgtgtttaaattttgtatcatcaggactgacacccaatttgacactttttgtatctagaagaccctccaaaaaaggaaccacataagcacacaagaaaagagtgctatgatgttcttagcatttgctatcatgcctatttttatctagatttttaaatgtagcttgtcataacaaaattttaattacaattggcttgtatgagaagaaaaagtatttttattgttttgagtgatgacgcagagactcaatgaacttgaaaatagcattgcttcgtgcactttgaataccaatcaggtgttttctgtgctactagttgtcacgttgcattcatgttcacctcctgatttaagtatctcgggtgtgcccagccactaaagcactctggactaatcgctaaagagaagcaacgtggggggtggggttgcgagggatgtgttcacatgtacccatcatttgatcatagcactgtgattgcttttgatgtgtgtctctagtggtgtgttgtctgttggcatgcttaaagcacatgtccattaaaattcattttgttccttttattttccttgttttcttggttagtgattcatttgcataaacattaatgatctctgcatactggtttggggttttct

SEQ ID NO: 357076 - DNA, 4947 bp, Homo sapiens
gtgagctgaagcagggcagggcatcaactcacccaggaagtgcaaggggtttggggattttcctttcctagccaagggaaggcatgacagactgtacctggaaaaacaggacactcttgcccaaatactgcactttttgcacagtcttagcaactggcagaccaggagattctctcctgtgcctgattcattgggtcccacacccatagggccttgcttactgccagtgcagcagtctgagattaacaccccatccccgggagaactctaagaaggagctgatgtggaggagcagctgagacagttcaagatgacgaccacagtagccacagactatgacaacattgagatccagcagcagtacagtgatgtcaacaaccgctgggatgtcgacgactgggacaatgagaacagctctgcgcggctttttgagcggtcccgcatcaaggctctggcagatgagcgtgaagccgtgcagaagaagaccttcaccaagtgggtcaattcccaccttgcccgtgtgtcctgccggatcacagacctgtacactgaccttcgagatggacggatgctcatcaagctgctggaggtcctctctggagagaggctgcctaaacccaccaagggacgaatgcgcatccactgcttagagaatgtggacaaggcccttcagttcctgaaggagcagagagtccatcttgagaacatggggtcccatgacatcgtggatggaaaccaccggctgacccttggcctcatctggaccatcatcctgcgcttccagatccaggatatcagtgtggaaactgaagacaacaaagagaagaaatctgccaaggatgcattgctgttgtggtgccagatgaagacagctgggtaccccaatgtcaacattcacaatttcaccactagctggagggacggcatggccttcaatgcactgatacacaaacaccggcctgacctgatagattttgacaaactaaagaaatctaacgcacactacaacctgcagaatgcatttaatctggcagaacagcacctcggcctcactaaactgttggaccccgaagacatcagcgtggaccatcctgatgagaagtccataatcacttatgtggtgacttattaccactacttctctaagatgaaggccttagctgttgaaggaaaacgaattggaaaggtgcttgacaatgctattgaaacagaaaaaatgattgaaaagtatgaatcacttgcctctgaccttctggaatggattgaacaaaccatcatcattctgaacaatcgcaaatttgccaattcactggtcggggttcaacagcagcttcaggcattcaacacttaccgcactgtggagaaaccacccaaatttactgagaaggggaacttggaagtgctgctcttcaccattcagagcaagatgagggccaacaaccagaaggtctacatgccccgggaggggaagctcatctctgacatcaacaaggcctgggaaagactggaaaaagcggaacacgaaagagaactggctttgcggaatgagctcataagacaggagaaactggaacagctcgcccgcagatttgatcgcaaggcagctatgagggagacttggctgagcgaaaaccagcgtctggtgtctcaggacaactttgggtttgaccttcctgcagttgaggccgccacaaaaaagcacgaggccattgagacagacattgccgcatacgaggagcgtgtgcaggctgtggtagccgtggccagggagctcgaggccgagaattaccacgacatcaagcgcatcacagcgaggaaggacaatgtcatccggctctgggaatacctactggaactgctcagggcccggagacagcggctcgagatgaacctggggctgcagaagatattccaggaaatgctctacattatggactggatggatgaaatgaaggtgctagtattgtctcaagactatggcaaacacttacttggtgtggaagacctgttacagaagcacaccctggttgaagcagacattggcatccaggcagagcgggtgagaggtgtcaatgcctccgcccagaagttcgcaacagacggggaaggttacaagccctgtgacccccaggtgatccgagaccgcgtggcccacatggagttctgttatcaagagctttgccagctggcggctgagcgcagggcccgtctggaagagtcccgccgcctctggaagttcttctgggagatggcagaagaggaaggctggatacgggagaaggagaagatcctgtcctcggacgattacgggaaagacctgaccagcgtcatgcgcctgctcagcaagcaccgggcgttcgaggacgagatgagcggccgcagtggccactttgagcaggccatcaaggaaggcgaagacatgatcgcggaggagcacttcgggtcggagaagatccgtgagaggatcatttacatccgggagcagtgggccaacctagagcagctctcggccattcggaagaagcgcctggaggaggcctccctgctgcaccagttccaggcagatgctgatgacattgatgcctggatgctggacatcctcaagattgtctccagcagcgacgtgggccacgatgagtattccacacagtctctggtcaagaaacacaaggacgtggcggaagagatcgccaattacaggcccacccttgacacgctgcacgaacaagccagcgccctcccccaggagcatgccgagtctccagacgtgaggggcaggctgtcgggcatcgaggagcggtataaggaggtggcagagctgacgcggctgcggaagcaggcactccaggacactctggccctgtacaagatgttcagcgaggctgatgcctgtgagctctggatcgacgagaaggagcagtggctcaacaacatgcagatcccagagaagctggaggatctggaggtcatccagcacagatttgagagcctagaaccagaaatgaacaaccaggcttcccgggttgcagtggtgaaccagattgcacgccagctgatgcacagcggccacccaagtgagaaggaaatcaaagcccagcaggacaaactcaacacaaggtggagccagttcagagaactggttgacaggaagaaggatgccctcctgtctgccctgagcatccagaactaccacctcgagtgcaatgaaaccaaatcctggattcgggaaaagaccaaggtcatcgagtccacccaggacctgggcaatgacctggctggcgtcatggccctgcagcgcaagctgaccggcatggagcgggacttggtggccattgaggcaaagctgagtgacctgcagaaggaggcggagaagctggagtccgagcaccccgaccaggcccaggccatcctgtctcggctggccgagatcagcgacgtgtgggaggagatgaagaccaccctgaaaaaccgagaggcctccctgggagaggccagcaagctgcagcagttcctacgggacttggacgacttccagtcctggctctctaggacccagacagcgatcgcctcggaggacatgccaaacaccctgaccgaggctgagaagctgctcacgcagcacgagaacatcaagaacgagatcgacaactacgaggaggactaccagaagatgagggacatgggcgagatggtcacccaggggcagaccgatgcccagtacatgtttctgcggcagcggctgcaggccctggacactggatggaacgagctccacaagatgtgggagaacagacaaaatctcctatcccagtcacatgcctaccagcagttcctcagagacacgaagcaagccgaagcctttcttaacaaccaggagtatgttctggctcacactgaaatgcctaccaccttggaaggagctgaagcagcaattaaaaagcaagaggacttcatgaccaccatggacgccaatgaggagaagatcaatgctgtggtggagactggccggaggctggtgagcgatgggaacatcaactcagatcgcatccaggagaaggtggactctattgatgacagacataggaagaatcgtgagacagccagtgaacttttgatgaggttgaaggacaacagggatctacagaaattcctgcaagattgtcaagagctgtctctctggatcaatgagaagatgctcacagcccaggacatgtcttacgatgaagccagaaatctgcacagtaaatggttgaagcatcaagcatttatggcagaacttgcatccaacaaagaatggcttgacaaaatcgagaaggaaggaatgcagctcatttcagaaaagcctgagacggaagctgtggtgaaggagaaactcactggtttacataaaatgtgggaagtccttgaatccactacccagacaaaggcccagcggctctttgatgcaaacaaggccgaacttttcacccagagctgtgcagatctagacaaatggctgcacggcctggagagtcagattcagtctgatgactatggcaaagacctgaccagtgtcaatatcctgctgaaaaagcaacagatgctggagaatcagatggaagtgcggaagaaggagatcgaagagctccaaagccaagcccaggccctgagtcaggaagggaagagcaccgacgaggtagacagcaagcgcctcaccgtgcagaccaagttcatggagttgctggagcccttgaacgagaggaagcataacctgctggcctccaaagagatccatcagttcaacagggatgtggaggacgagatcttgtgggttggagagaggatgcctttggcaacttccacggatcatggccacaacctccagactgtgcagctgttaataaagaaaaatcagaccctccaggaacccatgatgtccagaaacccgtccagaccccaatgatggta

SEQ ID NO: 357077 - DNA, 5089 bp, Homo sapiens
  misc_feature (4824)..(4824): n is a, c, g, or t
gtgagctgaagcagggcagggcatcaactcacccaggaagtgcaaggggtttggggattttcctttcctagccaagggaaggcatgacagactgtacctggaaaaacaggacactcttgcccaaatactgcactttttgcacagtcttagcaactggcagaccaggagattctctcctgtgcctgattcattgggtcccacacccatagggccttgcttactgccagtgcagcagtctgagattaacaccccatccccgggagaactctaagaaggagctgatgtggaggagcagctgagacagttcaagatgacgaccacagtagccacagactatgacaacattgagatccagcagcagtacagtgatgtcaacaaccgctgggatgtcgacgactgggacaatgagaacagctctgcgcggctttttgagcggtcccgcatcaaggctctggcagatgagcgtgaagccgtgcagaagaagaccttcaccaagtgggtcaattcccaccttgcccgtgtgtcctgccggatcacagacctgtacactgaccttcgagatggacggatgctcatcaagctgctggaggtcctctctggagagaggctgcctaaacccaccaagggacgaatgcgcatccactgcttagagaatgtggacaaggcccttcagttcctgaaggagcagagagtccatcttgagaacatggggtcccatgacatcgtggatggaaaccaccggctgacccttggcctcatctggaccatcatcctgcgcttccagatccaggatatcagtgtggaaactgaagacaacaaagagaagaaatctgccaaggatgcattgctgttgtggtgccagatgaagacagctgggtaccccaatgtcaacattcacaatttcaccactagctggagggacggcatggccttcaatgcactgatacacaaacaccggcctgacctgatagattttgacaaactaaagaaatctaacgcacactacaacctgcagaatgcatttaatctggcagaacagcacctcggcctcactaaactgttggaccccgaagacatcagcgtggaccatcctgatgagaagtccataatcacttatgtggtgacttattaccactacttctctaagatgaaggccttagctgttgaaggaaaacgaattggaaaggtgcttgacaatgctattgaaacagaaaaaatgattgaaaagtatgaatcacttgcctctgaccttctggaatggattgaacaaaccatcatcattctgaacaatcgcaaatttgccaattcactggtcggggttcaacagcagcttcaggcattcaacacttaccgcactgtggagaaaccacccaaatttactgagaaggggaacttggaagtgctgctcttcaccattcagagcaagatgagggccaacaaccagaaggtctacatgccccgggaggggaagctcatctctgacatcaacaaggcctgggaaagactggaaaaagcggaacacgaaagagaactggctttgcggaatgagctcataagacaggagaaactggaacagctcgcccgcagatttgatcgcaaggcagctatgagggagacttggctgagcgaaaaccagcgtctggtgtctcaggacaactttgggtttgaccttcctgcagttgaggccgccacaaaaaagcacgaggccattgagacagacattgccgcatacgaggagcgtgtgcaggctgtggtagccgtggccagggagctcgaggccgagaattaccacgacatcaagcgcatcacagcgaggaaggacaatgtcatccggctctgggaatacctactggaactgctcagggcccggagacagcggctcgagatgaacctggggctgcagaagatattccaggaaatgctctacattatggactggatggatgaaatgaaggtgctagtattgtctcaagactatggcaaacacttacttggtgtggaagacctgttacagaagcacaccctggttgaagcagacattggcatccaggcagagcgggtgagaggtgtcaatgcctccgcccagaagttcgcaacagacggggaaggttacaagccctgtgacccccaggtgatccgagaccgcgtggcccacatggagttctgttatcaagagctttgccagctggcggctgagcgcagggcccgtctggaagagtcccgccgcctctggaagttcttctgggagatggcagaagaggaaggctggatacgggagaaggagaagatcctgtcctcggacgattacgggaaagacctgaccagcgtcatgcgcctgctcagcaagcaccgggcgttcgaggacgagatgagcggccgcagtggccactttgagcaggccatcaaggaaggcgaagacatgatcgcggaggagcacttcgggtcggagaagatccgtgagaggatcatttacatccgggagcagtgggccaacctagagcagctctcggccattcggaagaagcgcctggaggaggcctccctgctgcaccagttccaggcagatgctgatgacattgatgcctggatgctggacatcctcaagattgtctccagcagcgacgtgggccacgatgagtattccacacagtctctggtcaagaaacacaaggacgtggcggaagagatcgccaattacaggcccacccttgacacgctgcacgaacaagccagcgccctcccccaggagcatgccgagtctccagacgtgaggggcaggctgtcgggcatcgaggagcggtataaggaggtggcagagctgacgcggctgcggaagcaggcactccaggacactctggccctgtacaagatgttcagcgaggctgatgcctgtgagctctggatcgacgagaaggagcagtggctcaacaacatgcagatcccagagaagctggaggatctggaggtcatccagcacagatttgagagcctagaaccagaaatgaacaaccaggcttcccgggttgcagtggtgaaccagattgcacgccagctgatgcacagcggccacccaagtgagaaggaaatcaaagcccagcaggacaaactcaacacaaggtggagccagttcagagaactggttgacaggaagaaggatgccctcctgtctgccctgagcatccagaactaccacctcgagtgcaatgaaaccaaatcctggattcgggaaaagaccaaggtcatcgagtccacccaggacctgggcaatgacctggctggcgtcatggccctgcagcgcaagctgaccggcatggagcgggacttggtggccattgaggcaaagctgagtgacctgcagaaggaggcggagaagctggagtccgagcaccccgaccaggcccaggccatcctgtctcggctggccgagatcagcgacgtgtgggaggagatgaagaccaccctgaaaaaccgagaggcctccctgggagaggccagcaagctgcagcagttcctacgggacttggacgacttccagtcctggctctctaggacccagacagcgatcgcctcggaggacatgccaaacaccctgaccgaggctgagaagctgctcacgcagcacgagaacatcaagaacgagatcgacaactacgaggaggactaccagaagatgagggacatgggcgagatggtcacccaggggcagaccgatgcccagtacatgtttctgcggcagcggctgcaggccctggacactggatggaacgagctccacaagatgtgggagaacagacaaaatctcctatcccagtcacatgcctaccagcagttcctcagagacacgaagcaagccgaagcctttcttaacaaccaggagtatgttctggctcacactgaaatgcctaccaccttggaaggagctgaagcagcaattaaaaagcaagaggacttcatgaccaccatggacgccaatgaggagaagatcaatgctgtggtggagactggccggaggctggtgagcgatgggaacatcaactcagatcgcatccaggagaaggtggactctattgatgacagacataggaagaatcgtgagacagccagtgaacttttgatgaggttgaaggacaacagggatctacagaaattcctgcaagattgtcaagagctgtctctctggatcaatgagaagatgctcacagcccaggacatgtcttacgatgaagccagaaatctgcacagtaaatggttgaagcatcaagcatttatggcagaacttgcatccaacaaagaatggcttgacaaaatcgagaaggaaggaatgcagctcatttcagaaaagcctgagacggaagctgtggtgaaggagaaactcactggtttacataaaatgtgggaagtccttgaatccactacccagacaaaggcccagcggctctttgatgcaaacaaggccgaacttttcacccagagctgtgcagatctagacaaatggctgcacggcctggagagtcagattcagtctgatgactatggcaaagacctgaccagtgtcaatatcctgctgaaaaagcaacagatgctggagaatcagatggaagtgcggaagaaggagatcgaagagctccaaagccaagcccaggccctgagtcaggaagggaagagcaccgacgaggtagacagcaagcgcctcaccgtgcagaccaagttcatggagttgctggagcccttgaacgagaggaagcataacctgctggcctccaaagagatccatcagttcaacagggatgtggaggacgagatcgtgagtcgacccctactgcnacacatggttctttccacgagcccccttgcctgtgctaaagcccacattctcacttctcagtcatcctcaccttgggccacgttggcaagctgagctgccaaagtcccgccgcctctggaagttcttctgggagatggcagaagaggaaggctggatacgggagaaggagaagatcctgtcctcggacgattacgggaaagacctgacaagcgtcatgcgcttgctcagcaagcaccgggcgttcgaggacgagatgagcggccg

SEQ ID NO: 357078 - DNA, 4340 bp, Homo sapiens
gtgagctgaagcagggcagggcatcaactcacccaggaagtgcaaggggtttggggattttcctttcctagccaagggaaggcatgacagactgtacctggaaaaacaggacactcttgcccaaatactgcactttttgcacagtcttagcaactggcagaccaggagattctctcctgtgcctgattcattgggtcccacacccatagggccttgcttactgccagtgcagcagtctgagattaacaccccatccccgggagaactctaagaaggagctgatgtggaggagcagctgagacagttcaagatgacgaccacagtagccacagactatgacaacattgagatccagcagcagtacagtgatgtcaacaaccgctgggatgtcgacgactgggacaatgagaacagctctgcgcggctttttgagcggtcccgcatcaaggctctggcagatgagcgtgaagccgtgcagaagaagaccttcaccaagtgggtcaattcccaccttgcccgtgtgtcctgccggatcacagacctgtacactgaccttcgagatggacggatgctcatcaagctgctggaggtcctctctggagagaggctgcctaaacccaccaagggacgaatgcgcatccactgcttagagaatgtggacaaggcccttcagttcctgaaggagcagagagtccatcttgagaacatggggtcccatgacatcgtggatggaaaccaccggctgacccttggcctcatctggaccatcatcctgcgcttccagatccaggatatcagtgtggaaactgaagacaacaaagagaagaaatctgccaaggatgcattgctgttgtggtgccagatgaagacagctgggtaccccaatgtcaacattcacaatttcaccactagctggagggacggcatggccttcaatgcactgatacacaaacaccggcctgacctgatagattttgacaaactaaagaaatctaacgcacactacaacctgcagaatgcatttaatctggcagaacagcacctcggcctcactaaactgttggaccccgaagacatcagcgtggaccatcctgatgagaagtccataatcacttatgtggtgacttattaccactacttctctaagatgaaggccttagctgttgaaggaaaacgaattggaaaggtgcttgacaatgctattgaaacagaaaaaatgattgaaaagtatgaatcacttgcctctgaccttctggaatggattgaacaaaccatcatcattctgaacaatcgcaaatttgccaattcactggtcggggttcaacagcagcttcaggcattcaacacttaccgcactgtggagaaaccacccaaatttactgagaaggggaacttggaagtgctgctcttcaccattcagagcaagatgagggccaacaaccagaaggtctacatgccccgggaggggaagctcatctctgacatcaacaaggcctgggaaagactggaaaaagcggaacacgaaagagaactggctttgcggaatgagctcataagacaggagaaactggaacagctcgcccgcagatttgatcgcaaggcagctatgagggagacttggctgagcgaaaaccagcgtctggtgtctcaggacaactttgggtttgaccttcctgcagttgaggccgccacaaaaaagcacgaggccattgagacagacattgccgcatacgaggagcgtgtgcaggctgtggtagccgtggccagggagctcgaggccgagaattaccacgacatcaagcgcatcacagcgaggaaggacaatgtcatccggctctgggaatacctactggaactgctcagggcccggagacagcggctcgagatgaacctggggctgcagaagatattccaggaaatgctctacattatggactggatggatgaaatgaaggtgctagtattgtctcaagactatggcaaacacttacttggtgtggaagacctgttacagaagcacaccctggttgaagcagacattggcatccaggcagagcgggtgagaggtgtcaatgcctccgcccagaagttcgcaacagacggggaaggttacaagccctgtgacccccaggtgatccgagaccgcgtggcccacatggagttctgttatcaagagctttgccagctggcggctgagcgcagggcccgtctggaagagtcccgccgcctctggaagttcttctgggagatggcagaagaggaaggctggatacgggagaaggagaagatcctgtcctcggacgattacgggaaagacctgaccagcgtcatgcgcctgctcagcaagcaccgggcgttcgaggacgagatgagcggccgcagtggccactttgagcaggccatcaaggaaggcgaagacatgatcgcggaggagcacttcgggtcggagaagatccgtgagaggatcatttacatccgggagcagtgggccaacctagagcagctctcggccattcggaagaagcgcctggaggaggcctccctgctgcaccagttccaggcagatgctgatgacattgatgcctggatgctggacatcctcaagattgtctccagcagcgacgtgggccacgatgagtattccacacagtctctggtcaagaaacacaaggacgtggcggaagagatcgccaattacaggcccacccttgacacgctgcacgaacaagccagcgccctcccccaggagcatgccgagtctccagacgtgaggggcaggctgtcgggcatcgaggagcggtataaggaggtggcagagctgacgcggctgcggaagcaggcactccaggacactctggccctgtacaagatgttcagcgaggctgatgcctgtgagctctggatcgacgagaaggagcagtggctcaacaacatgcagatcccagagaagctggaggatctggaggtcatccagcacagatttgagagcctagaaccagaaatgaacaaccaggcttcccgggttgcagtggtgaaccagattgcacgccagctgatgcacagcggccacccaagtgagaaggaaatcaaagcccagcaggacaaactcaacacaaggtggagccagttcagagaactggttgacaggaagaaggatgccctcctgtctgccctgagcatccagaactaccacctcgagtgcaatgaaaccaaatcctggattcgggaaaagaccaaggtcatcgagtccacccaggacctgggcaatgacctggctggcgtcatggccctgcagcgcaagctgaccggcatggagcgggacttggtggccattgaggcaaagctgagtgacctgcagaaggaggcggagaagctggagtccgagcaccccgaccaggcccaggccatcctgtctcggctggccgagatcagcgacgtgtgggaggagatgaagaccaccctgaaaaaccgagaggcctccctgggagaggccagcaagctgcagcagttcctacgggacttggacgacttccagtcctggctctctaggacccagacagcgatcgcctcggaggacatgccaaacaccctgaccgaggctgagaagctgctcacgcagcacgagaacatcaagaacgagatcgacaactacgaggaggactaccagaagatgagggacatgggcgagatggtcacccaggggcagaccgatgcccagtacatgtttctgcggcagcggctgcaggccctggacactggatggaacgagctccacaagatgtgggagaacagacaaaatctcctatcccagtcacatgcctaccagcagttcctcagagacacgaagcaagccgaagcctttcttaacaaccaggtaaggtttgttcctgcctttgcttcctttcggtgaaagcagccctggctgccttttgaaatgttttggctggggcagctggtttaaaccacacctgtatggaattatatggataatttagagactgatttttttttccccatactcttaaggcattgaaatccatcacgttgtaggggacaggaattgaaagttgccataagagctgctttgccttacaaagtactgtttgatttcaactgccattgaggatctcttatgtgttcatagtatgtcttcataattgaggtattgatccaatttaaaagatacagtgagggccaggcatgatgactcactcctgtaatcccagctcttggggaggctgggacaggagaatcacttgagcccagcaggtcaagggtgaagttagccgtgatcgtgccactgcactccagcctggtggcagggtgagaccctgtctctt

SEQ ID NO: 357079 - DNA, 3428 bp, Homo sapiens
gtgagctgaagcagggcagggcatcaactcacccaggaagtgcaaggggtttggggattttcctttcctagccaagggaaggcatgacagactgtacctggaaaaacaggacactcttgcccaaatactgcactttttgcacagtcttagcaactggcagaccaggagattctctcctgtgcctgattcattgggtcccacacccatagggccttgcttactgccagtgcagcagtctgagattaacaccccatccccgggagaactctaagaaggagctgatgtggaggagcagctgagacagttcaagatgacgaccacagtagccacagactatgacaacattgagatccagcagcagtacagtgatgtcaacaaccgctgggatgtcgacgactgggacaatgagaacagctctgcgcggctttttgagcggtcccgcatcaaggctctggcagatgagcgtgaagccgtgcagaagaagaccttcaccaagtgggtcaattcccaccttgcccgtgtgtcctgccggatcacagacctgtacactgaccttcgagatggacggatgctcatcaagctgctggaggtcctctctggagagaggctgcctaaacccaccaagggacgaatgcgcatccactgcttagagaatgtggacaaggcccttcagttcctgaaggagcagagagtccatcttgagaacatggggtcccatgacatcgtggatggaaaccaccggctgacccttggcctcatctggaccatcatcctgcgcttccagatccaggatatcagtgtggaaactgaagacaacaaagagaagaaatctgccaaggatgcattgctgttgtggtgccagatgaagacagctgggtaccccaatgtcaacattcacaatttcaccactagctggagggacggcatggccttcaatgcactgatacacaaacaccggcctgacctgatagattttgacaaactaaagaaatctaacgcacactacaacctgcagaatgcatttaatctggcagaacagcacctcggcctcactaaactgttggaccccgaagacatcagcgtggaccatcctgatgagaagtccataatcacttatgtggtgacttattaccactacttctctaagatgaaggccttagctgttgaaggaaaacgaattggaaaggtgcttgacaatgctattgaaacagaaaaaatgattgaaaagtatgaatcacttgcctctgaccttctggaatggattgaacaaaccatcatcattctgaacaatcgcaaatttgccaattcactggtcggggttcaacagcagcttcaggcattcaacacttaccgcactgtggagaaaccacccaaatttactgagaaggggaacttggaagtgctgctcttcaccattcagagcaagatgagggccaacaaccagaaggtctacatgccccgggaggggaagctcatctctgacatcaacaaggcctgggaaagactggaaaaagcggaacacgaaagagaactggctttgcggaatgagctcataagacaggagaaactggaacagctcgcccgcagatttgatcgcaaggcagctatgagggagacttggctgagcgaaaaccagcgtctggtgtctcaggacaactttgggtttgaccttcctgcagttgaggccgccacaaaaaagcacgaggccattgagacagacattgccgcatacgaggagcgtgtgcaggctgtggtagccgtggccagggagctcgaggccgagaattaccacgacatcaagcgcatcacagcgaggaaggacaatgtcatccggctctgggaatacctactggaactgctcagggcccggagacagcggctcgagatgaacctggggctgcagaagatattccaggaaatgctctacattatggactggatggatgaaatgaaggtgctagtattgtctcaagactatggcaaacacttacttggtgtggaagacctgttacagaagcacaccctggttgaagcagacattggcatccaggcagagcgggtgagaggtgtcaatgcctccgcccagaagttcgcaacagacggggaaggttacaagccctgtgacccccaggtgatccgagaccgcgtggcccacatggagttctgttatcaagagctttgccagctggcggctgagcgcagggcccgtctggaagagtcccgccgcctctggaagttcttctgggagatggcagaagaggaaggctggatacgggagaaggagaagatcctgtcctcggacgattacgggaaagacctgaccagcgtcatgcgcctgctcagcaagcaccgggcgttcgaggacgagatgagcggccgcagtggccactttgagcaggccatcaaggaaggcgaagacatgatcgcggaggagcacttcgggtcggagaagatccgtgagaggatcatttacatccgggagcagtgggccaacctagagcagctctcggccattcggaagaagcgcctggaggaggcctccctgctgcaccagttccaggcagatgctgatgacattgatgcctggatgctggacatcctcaagattgtctccagcagcgacgtgggccacgatgagtattccacacagtctctggtcaagaaacacaaggacgtggcggaagagatcgccaattacaggcccacccttgacacgctgcacgaacaagccagcgccctcccccaggagcatgccgagtctccagacgtgaggggcaggctgtcgggcatcgaggagcggtataaggaggtggcagagctgacgcggctgcggaagcaggcactccaggacactctggccctgtacaagatgttcagcgaggctgatgcctgtgagctctggatcgacgagaaggagcagtggctcaacaacatgcagatcccagagaagctggaggatctggaggtcatccagcacagatttgagagcctagaaccagaaatgaacaaccaggcttcccgggttgcagtggtgaaccagattgcacgccagctgatgcacagcggccacccaagtgagaaggaaatcaaagcccagcaggacaaactcaacacaaggtggagccagttcagagaactggttgacaggaagaaggatgccctcctgtctgccctgagcatccagaactaccacctcgagtgcaatgaaaccaaatcctggattcgggaaaagaccaaggtcatcgagtccacccaggacctgggcaatgacctggctggcgtcatggccctgcagcgcaagctgaccggcatggagcgggacttggtggccattgaggcaaagctgagtgacctgcagaaggaggcggagaagctggagtccgagcaccccgaccaggcccaggcataaggccccacggcataagtgg

SEQ ID NO: 357080 - DNA, 2035 bp, Homo sapiens
gtgagctgaagcagggcagggcatcaactcacccaggaagtgcaaggggtttggggattttcctttcctagccaagggaaggcatgacagactgtacctggaaaaacaggacactcttgcccaaatactgcactttttgcacagtcttagcaactggcagaccaggagattctctcctgtgcctgattcattgggtcccacacccatagggccttgcttactgccagtgcagcagtctgagattaacaccccatccccgggagaactctaagaaggagctgatgtggaggagcagctgagacagttcaagatgacgaccacagtagccacagactatgacaacattgagatccagcagcagtacagtgatgtcaacaaccgctgggatgtcgacgactgggacaatgagaacagctctgcgcggctttttgagcggtcccgcatcaaggctctggcagatgagcgtgaagccgtgcagaagaagaccttcaccaagtgggtcaattcccaccttgcccgtgtgtcctgccggatcacagacctgtacactgaccttcgagatggacggatgctcatcaagctgctggaggtcctctctggagagaggctgcctaaacccaccaagggacgaatgcgcatccactgcttagagaatgtggacaaggcccttcagttcctgaaggagcagagagtccatcttgagaacatggggtcccatgacatcgtggatggaaaccaccggctgacccttggcctcatctggaccatcatcctgcgcttccagatccaggatatcagtgtggaaactgaagacaacaaagagaagaaatctgccaaggatgcattgctgttgtggtgccagatgaagacagctgggtaccccaatgtcaacattcacaatttcaccactagctggagggacggcatggccttcaatgcactgatacacaaacaccggcctgacctgatagattttgacaaactaaagaaatctaacgcacactacaacctgcagaatgcatttaatctggcagaacagcacctcggcctcactaaactgttggaccccgaagacatcagcgtggaccatcctgatgagaagtccataatcacttatgtggtgacttattaccactacttctctaagatgaaggccttagctgttgaaggaaaacgaattggaaaggtgcttgacaatgctattgaaacagaaaaaatgattgaaaagtatgaatcacttgcctctgaccttctggaatggattgaacaaaccatcatcattctgaacaatcgcaaatttgccaattcactggtcggggttcaacagcagcttcaggcattcaacacttaccgcactgtggagaaaccacccaaatttactgagaaggggaacttggaagtgctgctcttcaccattcagagcaagatgagggccaacaaccagaaggtctacatgccccgggaggggaagctcatctctgacatcaacaaggcctgggaaagactggaaaaagcggaacacgaaagagaactggctttgcggaatgagctcataagacaggagaaactggaacagctcgcccgcagatttgatcgcaaggcagctatgagggagacttggctgagcgaaaaccagcgtctggtgtctcaggacaactttgggtttgaccttcctgcagttgaggccgccacaaaaaagcacgaggccattgagacagacattgccgcatacgaggagcgtgtgcaggctgtggtagccgtggccagggagctcgaggccgagaattaccacgacatcaagcgcatcacagcgaggaaggacaatgtcatccggctctgggaatacctactggaactgctcagggcccggagacagcggctcgagatgaacctggggctgcagaagatattccaggaaatgctctacattatggactggatggatgaaatgaaggtgctagtattgtctcaagactatggcaaacacttacttggtgtggaagacctgttacagaagcaccagcacgaattccct

SEQ ID NO: 357081 - DNA, 842 bp, Homo sapiens
gtgagctgaagcagggcagggcatcaactcacccaggaagtgcaaggggtttggggattttcctttcctagccaagggaaggcatgacagactgtacctggaaaaacaggacactcttgcccaaatactgcactttttgcacagtcttagcaactggcagaccaggagattctctcctgtgcctgattcattgggtcccacacccatagggccttgcttactgccagtgcagcagtctgagattaacaccccatccccgggagaactctaagaaggagctgatgtggaggagcagctgagacagttcaagatgacgaccacagtagccacagactatgacaacattgagatccagcagcagtacagtgatgtcaacaaccgctgggatgtcgacgactgggacaatgagaacagctctgcgcggctttttgagcggtcccgcatcaaggctctggcagatgagcgtgaagccgtgcagaagaagaccttcaccaagtgggtcaattcccaccttgcccgtgtgtcctgccggatcacagacctgtacactgaccttcgagatggacggatgctcatcaagctgctggaggtcctctctggagagaggctgcctaaacccaccaagggacgaatgcgcatccactgcttagagaatgtggacaaggcccttcagttcctgaaggagcagagagtccatcttgagaacatggggtcccatgacatcgtggatggaaaccaccggctgacccttggcctcatctggaccatcatcctgcgcttccagatccaggatatcagtgtggaaagtgcacgggatcctcttgaacagctatgaccactat

SEQ ID NO: 357082 - DNA, 572 bp, Homo sapiens
aaaatgtacctgcatacatttgtgttaaaacagagtacttctggtacatccatatgactcatgaaatggctttgtttcagttagactattctgtggctttttaatgtgttgtttgggttttggctgaacacagatccccaccacagcacaagcggcttccttgagaattattgcagctctgtccctggtgtttgtctgagctctcctggggagtccagcatgaaccctcaggctcaggtacttttctcctcagcagagttgagagttgcatagttactttagaaattaaacccaagctcccaggggtcctacaaacaactcacaggaattttgccagcccatggaatagactatttcctgtagttttaggttgtagctgcagttcctgtgaacctaattccatttggctcaggatgttagagcttcttgtccagtgtggtccagtttagcaaactagacaggaggacttcctgggttcctagaacctttttctgaaaagaggcagagtttgggactctaccaaacatcactctattttctcttagttggagttactggaagtgcgcagacag

SEQ ID NO: 357083 - DNA, 375 bp, Homo sapiens
gacggatgctcatcaagctgctggaggtcctctctggagagaggctggtgagtggagaccttaggaagtgccgtgtgttgtaggtggaaaatatttttgaaaaatcaagtgtgacttgtctcctgttgaattctgcacttaatggttgatagttttgaggagaatcttgagaagtgagttgagcgcttcagggagagccttagtgtcacattctgagcgtggatgatgttcttgagctgtaataaagccactttgttctggtaatttgcaaggttgccacctttggtcagaaagaacttggctggggttcctgccaagaacagggcatggtgctggaatttgaagggccaggcttgggcgctggcttctagatga

SEQ ID NO: 357084 - DNA, 361 bp, Homo sapiens
tcctgcatgggatatgggagttgggggatttttatttctctgtaattaagtggtgactaactttcttccttgaaattacagactaaatgatggcaatgagtacctcttccaagccaaagacgatgtaagtttctaaatgttatttctctccactacttaggagtttgcaagtgtttgtgtgatgatgggctttattcagaaagttcttcatgtaaatgatgatcagtgatggtttctatcactgggctccagtcaccagcactagaaggtgtttggttctgtctctagaaggcagtgaatatgatctcactgtccctttgccgaggcaggatcccttaaagtcgatggaatctttgcctgt

SEQ ID NO: 357085 - DNA, 398 bp, Homo sapiens
tgaggcagagtttcactcttgtcattcaggctggagtgcagtggcgcaatctcggctcactgcaacctctgcttcccaggttcaagcgattttcctgccttagcctaccaagtagctggcattacaggcacgtgccaccacgcccggctaatttttgtatttttagtagagacagggtttcacaatgttggccaggctagtctcgaactcctgacctcaagtgatctgcccgcctcggcctcccaaagtgctgggattacaagcatgagctactgtgcccgggtggattttttattttccttcttttcattccgtttctctgtaggacaactttgggtttgaccttcctgcagttgaggccgccacaaaaaagcacgaggccattgagacagacattg

SEQ ID NO: 357086 - DNA, 344 bp, Homo sapiens
ccttatcgcatggccctgcatttacatttagcagtgagctggtaatcataagaatatggggtgtagcttactgcctgccagtgagcctgcacccatgctgagctccctcacacagccacgttccttccttgatgttaaacaggttacaagccctgtgacccccaggtgatccgagaccgcgtggcccacatggagttctgttatcaagagctttgccagctggcggctgagcgcagggcccgtctggaagagtcccgccgcctctggaagttcttctgggagatggcagaagaggaaggctggatacgggagaaggagaagatcctgtcctcggacgattacgg

SEQ ID NO: 357087 - DNA, 3335 bp, Homo sapiens
  misc_feature (510)..(510): n is a, c, g, or t
aagtcttttttcctaataatccattttccacattgccatgagggtaaagggttccaatcaaaaccaccattaaactgcatagtttctagtcttccctcagccctgatgctaattatgatagtttgcatagacataacttaaacttgtgattctccctccttccagagctttttgtagccctttttccccccaaaattagttttgttcaaaatcaagcattgggcccagccattaagataagacctaataagtgagagatacagttcccaagagtttacagatccaggtgttcacatggtggtggccagtctaccgtttatcttgtcaaggttgttactgctaatttggtgtcactttggtcttgggcagcggtggtgggcgacgtatctaatgagcgtgccattgacttctccatgtttgtctgtgtacgaggggtgcaggttgtctgtaatccactaaagtgtcagccacacccagctttagtaactcgctaatcgcacaccctgggtntatcagccaggggctgctacagttaatggtacacagttgatggtacacaggctgaaaatgataatgaatcaagaccctactacatttccaaagccgaaaagccatgagggttacaatttaaatgagcttgggaaggaacgctcccgaagacgtctccagcctgaagggtcagagccgctggaagcctggctgtctctgggctttctcgtctcagtgcagcaaggcaccgtgatcaaccaacccgtgatggggaaggccctggttctgtctttgtttgggggtaaatagctgtgtggtgttgagtgactgtgattggcttttccagctcctttaacacaaactacaacccactcacgatacaacttcggcagatgtggtcaaattgatgtttgttgacttgcctcatttccttccagctcttaagttccaaagtctaactgggatggtagatgtgaaatgcatgattgtcgtcctaatttctgcatgtgtttatgacaatgtgttgaggggagggggaggagagccagagagcattttcaggaaccgaggtctttccttgtcttactctgggggaatgccatgtagctctgatagagttgtctatcggtctgtttgtgaatgccctttcgcttaaacttccagcccttctggtggcatccttggttgtaaggtggctgctgtataacgtccactctctttcatatttaatatgtgtgattgttactgttgtctttttgttttaaagtaaccataagaggagatgatctgagttatatttattgatcagaggaatagagtgcagtaaaactcatactggcatttcgcttttctcatttccctgtaaatgggcgggtattaatccattcccaccttctaatgtccttgatgtccagctggctttgtgggtgtgcaatggttttactgtactgcctcgatctgtgccaggcatttatacacagccacatgtgcgagtcaggtagagcgtatgtggtcacccccatggctcacggagttagctgaatggcctctccgctgtccctagatggcagaaacggtggacacaagcgaaatggtcaacggcgctacagaacaaaggacgagctctaaagagtccagccccatcccctccccgacctctgatcgtaaagccaagactgccctcccagcccagagtgccgccaccttaccagccagaacccaggagacaccttcggcccagatggaaggcttcctcaatcggaaacacgagtgggaggcccacaataagaaagcctcaagcaggtcctggcacaatgtttattgtgtcataaataaccaagaaatgggtttctacaaagatgcaaagactgctgcttctggaattccctaccacagcgaggtccctgtgagtttgaaagaagctgtctgcgaagtggcccttgattacaaaaagaagaaacacgtattcaagctaagactaaatgatggcaatgagtacctcttccaagccaaagacgatgaggaaatgaacacatggatccaggctatctcttccgccatctcctctgataaacacgaggtgtctgccagcacccagagcacgccagcatccagccgcgcgcagaccctccccaccagcgtcgtcaccatcaccagcgagtccagtcccggcaagcgggaaaaggacaaagagaaagacaaagagaagcggttcagcctttttggcaaaaagaaatgaactcctttccttcacctcctgcccttctcttaccttttcagtgaaattccagcatgcaagctcagaaccaacacattactctctgtgcctaatgttcctcaatgtggttgatttttttttttttttaatttatagagcatttcggggggggtgggggaaacacacctaaacactttatctccaagttacaaaagtttgaggtgcagagggaaggccagattttttttttaatgaaattatatagattagatctcagtatttaaactgttcctcaattttgtgaggctgtgttggaaataacccgcctctagtgctgttggtatgcaaggcagcggtgcttaatcaatatttcctgtgctcaccagaggcaaaatgtaccaatatcctgacaccattctctctccatttacttctggtggttaccctgactcttgactcttagaagtgcccgagatggggctaacctttattaaacagatcgcatattatgatcttgctgcagccacagtgcagctccacattaactctacagaccaaaccatttgtatctggcatcacttactaacacacgacatgcggcttttctgcatcaactgctatgacggttaagaatgtcagtatacaagaaggaatagaaaactgatactgttttaaataatctgtaatttcaattttttttttttttgctgaaatacattatattgtacgtttgagataattctagtacaaagtataataaaactagatgtataataaaccctttaaatcattggtaagtgtacaagtggtggaactgaagcatttactggacaaagtaatgttactctaatggttacttgctcgtgcgttgccacactgtgttataatttgcttcatttccttgctatttgatacatagtgtgcatttctctgtcactgtaactattgtaatgacaaattttcatcttactgcacaatcaaaatgacattgataggaatgaactccagaggctgggcctgaacagggaggtggtcgctcaggcctggtgctcagtcgtacgacctgtacctctcaacttttgccctatctgttaaatatatgctatgtcattaaatgcttttaaatcta

SEQ ID NO: 357088 - DNA, 281 bp, Homo sapiens
tcatctcccgtaccgtctcatctcccgtaccgtctcatttcccttaccgtcctcatctcccttaccgtcctcatctcccttaccatcgctgaatggaaggatggcctcaatgaagcctgggccgacctcctggagctcattgacacaagaacacagattcttgccgcttcctatgaactgcacaagttttaccacgatgccaaggagatctttgacggtaagggagatgaggacggtaagggagatgagacggtaagggagatgagacggtaaggagatga

SEQ ID NO: 357089 - DNA, 8655 bp, Homo sapiens
gtgagctgaagcagggcagggcatcaactcacccaggaagtgcaaggggtttggggattttcctttcctagccaagggaaggcatgacagactgtacctggaaaaacaggacactcttgcccaaatactgcactttttgcacagtcttagcaactggcagaccaggagattctctcctgtgcctgattcattgggtcccacacccatagggccttgcttactgccagtgcagcagtctgagattaacaccccatccccgggagaactctaagaaggagctgatgtggaggagcagctgagacagttcaagatgacgaccacagtagccacagactatgacaacattgagatccagcagcagtacagtgatgtcaacaaccgctgggatgtcgacgactgggacaatgagaacagctctgcgcggctttttgagcggtcccgcatcaaggctctggcagatgagcgtgaagccgtgcagaagaagaccttcaccaagtgggtcaattcccaccttgcccgtgtgtcctgccggatcacagacctgtacactgaccttcgagatggacggatgctcatcaagctgctggaggtcctctctggagagaggctgcctaaacccaccaagggacgaatgcgcatccactgcttagagaatgtggacaaggcccttcagttcctgaaggagcagagagtccatcttgagaacatggggtcccatgacatcgtggatggaaaccaccggctgacccttggcctcatctggaccatcatcctgcgcttccagatccaggatatcagtgtggaaactgaagacaacaaagagaagaaatctgccaaggatgcattgctgttgtggtgccagatgaagacagctgggtaccccaatgtcaacattcacaatttcaccactagctggagggacggcatggccttcaatgcactgatacacaaacaccggcctgacctgatagattttgacaaactaaagaaatctaacgcacactacaacctgcagaatgcatttaatctggcagaacagcacctcggcctcactaaactgttggaccccgaagacatcagcgtggaccatcctgatgagaagtccataatcacttatgtggtgacttattaccactacttctctaagatgaaggccttagctgttgaaggaaaacgaattggaaaggtgcttgacaatgctattgaaacagaaaaaatgattgaaaagtatgaatcacttgcctctgaccttctggaatggattgaacaaaccatcatcattctgaacaatcgcaaatttgccaattcactggtcggggttcaacagcagcttcaggcattcaacacttaccgcactgtggagaaaccacccaaatttactgagaaggggaacttggaagtgctgctcttcaccattcagagcaagatgagggccaacaaccagaaggtctacatgccccgggaggggaagctcatctctgacatcaacaaggcctgggaaagactggaaaaagcggaacacgaaagagaactggctttgcggaatgagctcataagacaggagaaactggaacagctcgcccgcagatttgatcgcaaggcagctatgagggagacttggctgagcgaaaaccagcgtctggtgtctcaggacaactttgggtttgaccttcctgcagttgaggccgccacaaaaaagcacgaggccattgagacagacattgccgcatacgaggagcgtgtgcaggctgtggtagccgtggccagggagctcgaggccgagaattaccacgacatcaagcgcatcacagcgaggaaggacaatgtcatccggctctgggaatacctactggaactgctcagggcccggagacagcggctcgagatgaacctggggctgcagaagatattccaggaaatgctctacattatggactggatggatgaaatgaaggtgctagtattgtctcaagactatggcaaacacttacttggtgtggaagacctgttacagaagcacaccctggttgaagcagacattggcatccaggcagagcgggtgagaggtgtcaatgcctccgcccagaagttcgcaacagacggggaaggttacaagccctgtgacccccaggtgatccgagaccgcgtggcccacatggagttctgttatcaagagctttgccagctggcggctgagcgcagggcccgtctggaagagtcccgccgcctctggaagttcttctgggagatggcagaagaggaaggctggatacgggagaaggagaagatcctgtcctcggacgattacgggaaagacctgaccagcgtcatgcgcctgctcagcaagcaccgggcgttcgaggacgagatgagcggccgcagtggccactttgagcaggccatcaaggaaggcgaagacatgatcgcggaggagcacttcgggtcggagaagatccgtgagaggatcatttacatccgggagcagtgggccaacctagagcagctctcggccattcggaagaagcgcctggaggaggcctccctgctgcaccagttccaggcagatgctgatgacattgatgcctggatgctggacatcctcaagattgtctccagcagcgacgtgggccacgatgagtattccacacagtctctggtcaagaaacacaaggacgtggcggaagagatcgccaattacaggcccacccttgacacgctgcacgaacaagccagcgccctcccccaggagcatgccgagtctccagacgtgaggggcaggctgtcgggcatcgaggagcggtataaggaggtggcagagctgacgcggctgcggaagcaggcactccaggacactctggccctgtacaagatgttcagcgaggctgatgcctgtgagctctggatcgacgagaaggagcagtggctcaacaacatgcagatcccagagaagctggaggatctggaggtcatccagcacagatttgagagcctagaaccagaaatgaacaaccaggcttcccgggttgcagtggtgaaccagattgcacgccagctgatgcacagcggccacccaagtgagaaggaaatcaaagcccagcaggacaaactcaacacaaggtggagccagttcagagaactggttgacaggaagaaggatgccctcctgtctgccctgagcatccagaactaccacctcgagtgcaatgaaaccaaatcctggattcgggaaaagaccaaggtcatcgagtccacccaggacctgggcaatgacctggctggcgtcatggccctgcagcgcaagctgaccggcatggagcgggacttggtggccattgaggcaaagctgagtgacctgcagaaggaggcggagaagctggagtccgagcaccccgaccaggcccaggccatcctgtctcggctggccgagatcagcgacgtgtgggaggagatgaagaccaccctgaaaaaccgagaggcctccctgggagaggccagcaagctgcagcagttcctacgggacttggacgacttccagtcctggctctctaggacccagacagcgatcgcctcggaggacatgccaaacaccctgaccgaggctgagaagctgctcacgcagcacgagaacatcaagaacgagatcgacaactacgaggaggactaccagaagatgagggacatgggcgagatggtcacccaggggcagaccgatgcccagtacatgtttctgcggcagcggctgcaggccctggacactggatggaacgagctccacaagatgtgggagaacagacaaaatctcctatcccagtcacatgcctaccagcagttcctcagagacacgaagcaagccgaagcctttcttaacaaccaggagtatgttctggctcacactgaaatgcctaccaccttggaaggagctgaagcagcaattaaaaagcaagaggacttcatgaccaccatggacgccaatgaggagaagatcaatgctgtggtggagactggccggaggctggtgagcgatgggaacatcaactcagatcgcatccaggagaaggtggactctattgatgacagacataggaagaatcgtgagacagccagtgaacttttgatgaggttgaaggacaacagggatctacagaaattcctgcaagattgtcaagagctgtctctctggatcaatgagaagatgctcacagcccaggacatgtcttacgatgaagccagaaatctgcacagtaaatggttgaagcatcaagcatttatggcagaacttgcatccaacaaagaatggcttgacaaaatcgagaaggaaggaatgcagctcatttcagaaaagcctgagacggaagctgtggtgaaggagaaactcactggtttacataaaatgtgggaagtccttgaatccactacccagacaaaggcccagcggctctttgatgcaaacaaggccgaacttttcacccagagctgtgcagatctagacaaatggctgcacggcctggagagtcagattcagtctgatgactatggcaaagacctgaccagtgtcaatatcctgctgaaaaagcaacagatgctggagaatcagatggaagtgcggaagaaggagatcgaagagctccaaagccaagcccaggccctgagtcaggaagggaagagcaccgacgaggtagacagcaagcgcctcaccgtgcagaccaagttcatggagttgctggagcccttgaacgagaggaagcataacctgctggcctccaaagagatccatcagttcaacagggatgtggaggacgagatcttgtgggttggagagaggatgcctttggcaacttccacggatcatggccacaacctccagactgtgcagctgttaataaagaaaaatcagaccctccagaaagaaatccaggggcaccagcctcgcattgacgacatctttgagaggagccaaaacatcgtcactgacagcagcagcctcagcgctgaggccatcagacagaggcttgccgacctgaagcagctgtggggtctcctcattgaggagacagagaaacgccacaggcggctggaggaggcgcacagggcccagcagtactactttgacgctgctgaggccgaagcctggatgagcgagcaggagctgtacatgatgtcagaggagaaggccaaggatgagcagagtgctgtctccatgttgaagaagcaccagatcttagaacaagctgtggaggactatgcagagaccgtgcatcagctctccaagaccagccgggccctggtggccgacagccatcctgaaagtgagcgcattagcatgcggcagtccaaagtggataaactgtacgctggtctgaaagaccttgctgaagagagaagaggcaagctggatgagagacacaggttattccagctcaaccgggaggtggacgacctggagcagtggatcgctgagagggaggtggtcgcagggtcccatgaactgggacaggactatgagcatgtcacgatgttacaagaacgattccgggagtttgcccgagacaccgggaacattgggcaggagcgcgtggacacggtcaatcacctggcagatgagctcatcaactctggacattcagatgccgccaccatcgctgaatggaaggatggcctcaatgaagcctgggccgacctcctggagctcattgacacaagaacacagattcttgccgcttcctatgaactgcacaagttttaccacgatgccaaggagatctttgggcgtatacaggacaaacacaagaaactccctgaggagcttgggagagatcagaacacagtggagaccttacagagaatgcacactacatttgagcatgacatccaggctctgggcacacaggtgaggcagctgcaggaggatgcagcccgcctccaggcggcctatgcgggtgacaaggccgacgatatccagaagcgcgagaacgaggtcctggaagcctggaagtccctcctggacgcctgtgagagccgcagggtgcggctggtggacacaggggacaagttccgcttcttcagcatggtgcgcgacctcatgctctggatggaggatgtcatccggcagatcgaggcccaggagaagccaagggatgtatcatctgttgaactcttaatgaataatcatcaaggcatcaaagctgaaattgatgcacgtaatgacagtttcacaacctgcattgaacttgggaaatccctgttggcgagaaaacactatgcatctgaggagatcaaggaaaaattactgcagttgacggaaaagaggaaagaaatgatcgacaagtgggaagaccgatgggaatggttaagactgattctggaggtccatcagttctcaagagacgccagtgtggccgaggcctggctgcttggacaggagccgtacctatccagccgagagataggccagagcgtggacgaggtggagaagctcatcaagcgccacgaggcatttgaaaagtctgcagcaacctgggatgagaggttctctgccctggaaaggctgactacattggagttactggaagtgcgcagacagcaagaggaagaggagaggaagaggcggccgccttctcccgagccgagcacgaaggtttcagaggaagccgagtcccagcagcagtgggatacttcaaaaggagaacaagtttcccaaaacggtttgccagctgaacagggatctccacggatggcagaaacggtggacacaagcgaaatggtcaacggcgctacagaacaaaggacgagctctaaagagtccagccccatcccctccccgacctctgatcgtaaagccaagactgccctcccagcccagagtgccgccaccttaccagccagaacccaggagacaccttcggcccagatggaaggcttcctcaatcggaaacacgagtgggaggcccacaataagaaagcctcaagcaggtcctggcacaatgtttattgtgtcataaataaccaagaaatgggtttctacaaagatgcaaagactgctgcttctggaattccctaccacagcgaggtccctgtgagtttgaaagaagctgtctgcgaagtggcccttgattacaaaaagaagaaacacgtattcaagctaagactaaatgatggcaatgagtacctcttccaagccaaagacgatgaggaaatgaacacatggatccaggctatctcttccgccatctcctctgataaacacgaggtgtctgccagcacccagagcacgccagcatccagccgcgcgcagaccctccccaccagcgtcgtcaccatcaccagcgagtccagtcccggcaagcgggaaaaggacaaagagaaagacaaagagaagcggttcagcctttttggcaaaaagaaatgaactcctttccttcacctcctgcccttctcttaccttttcagtgaaattccagcatgcaagctcagaaccaacacattactctctgtgcctaatgttcctcaatgtggttgatttttttttttttttaatttatagagcatttcggggggggtgggggaaacacacctaaacactttatctccaagttacaaaagtttgaggtgcagagggaaggccagattttttttttaatgaaattatatagattagatctcagtatttaaactgttcctcaattttgtgaggctgtgttggaaataacccgcctctagtgctgttggtatgcaaggcagcggtgcttaatcaatatttcctgtgctcaccagaggcaaaatgtaccaatatcctgacaccattctctctccatttacttctggtggttaccctgactcttgactcttagaagtgcccgagatggggctaacctttattaaacagatcgcatattatgatcttgctgcagccacagtgcagctccacattaactctacagaccaaaccatttgtatctggcatcacttactaacacacgacatgcggcttttctgcatcaactgctatgacggttaagaatgtcagtatacaagaaggaatagaaaactgatactgttttaaataatctgtaatttcaattttttttttttttgctgaaatacattatattgtacgtttgagataattctagtacaaagtataataaaactagatgtataataaaccctttaaatcattggtaagtgtacaagtggtggaactgaagcatttactggacaaagtaatgttactctaatggttacttgctcgtgcgttgccacactgtgttataatttgcttcatttccttgctatttgatacatagtgtgcatttctctgtcactgtaactattgtaatgacaaattttcatcttactgcacaatcaaaatgacattgataggaatgaactccagaggctgggcctgaacagggaggtggtcgctcaggcctggtgctcagtcgtacgacctgtacctctcaacttttgccctatctgttaaatatatgctatgtcattaaatgcttttaaatctaaaaaaaaaattaaataaaaaaaaaaaatctttttggggcgcccctgggccccggaaaagttttcaaaaacactctctttggggcccgggccccaaagggatagtcacaagggcgcaaacgggtcccaagagaacctggcaga

SEQ ID NO: 357090 - DNA, 8458 bp, Homo sapiens
gtgagctgaagcagggcagggcatcaactcacccaggaagtgcaaggggtttggggattttcctttcctagccaagggaaggcatgacagactgtacctggaaaaacaggacactcttgcccaaatactgcactttttgcacagtcttagcaactggcagaccaggagattctctcctgtgcctgattcattgggtcccacacccatagggccttgcttactgccagtgcagcagtctgagattaacaccccatccccgggagaactctaagaaggagctgatgtggaggagcagctgagacagttcaagatgacgaccacagtagccacagactatgacaacattgagatccagcagcagtacagtgatgtcaacaaccgctgggatgtcgacgactgggacaatgagaacagctctgcgcggctttttgagcggtcccgcatcaaggctctggcagatgagcgtgaagccgtgcagaagaagaccttcaccaagtgggtcaattcccaccttgcccgtgtgtcctgccggatcacagacctgtacactgaccttcgagatggacggatgctcatcaagctgctggaggtcctctctggagagaggctgcctaaacccaccaagggacgaatgcgcatccactgcttagagaatgtggacaaggcccttcagttcctgaaggagcagagagtccatcttgagaacatggggtcccatgacatcgtggatggaaaccaccggctgacccttggcctcatctggaccatcatcctgcgcttccagatccaggatatcagtgtggaaactgaagacaacaaagagaagaaatctgccaaggatgcattgctgttgtggtgccagatgaagacagctgggtaccccaatgtcaacattcacaatttcaccactagctggagggacggcatggccttcaatgcactgatacacaaacaccggcctgacctgatagattttgacaaactaaagaaatctaacgcacactacaacctgcagaatgcatttaatctggcagaacagcacctcggcctcactaaactgttggaccccgaagacatcagcgtggaccatcctgatgagaagtccataatcacttatgtggtgacttattaccactacttctctaagatgaaggccttagctgttgaaggaaaacgaattggaaaggtgcttgacaatgctattgaaacagaaaaaatgattgaaaagtatgaatcacttgcctctgaccttctggaatggattgaacaaaccatcatcattctgaacaatcgcaaatttgccaattcactggtcggggttcaacagcagcttcaggcattcaacacttaccgcactgtggagaaaccacccaaatttactgagaaggggaacttggaagtgctgctcttcaccattcagagcaagatgagggccaacaaccagaaggtctacatgccccgggaggggaagctcatctctgacatcaacaaggcctgggaaagactggaaaaagcggaacacgaaagagaactggctttgcggaatgagctcataagacaggagaaactggaacagctcgcccgcagatttgatcgcaaggcagctatgagggagacttggctgagcgaaaaccagcgtctggtgtctcaggacaactttgggtttgaccttcctgcagttgaggccgccacaaaaaagcacgaggccattgagacagacattgccgcatacgaggagcgtgtgcaggctgtggtagccgtggccagggagctcgaggccgagaattaccacgacatcaagcgcatcacagcgaggaaggacaatgtcatccggctctgggaatacctactggaactgctcagggcccggagacagcggctcgagatgaacctggggctgcagaagatattccaggaaatgctctacattatggactggatggatgaaatgaaggtgctagtattgtctcaagactatggcaaacacttacttggtgtggaagacctgttacagaagcacaccctggttgaagcagacattggcatccaggcagagcgggtgagaggtgtcaatgcctccgcccagaagttcgcaacagacggggaaggttacaagccctgtgacccccaggtgatccgagaccgcgtggcccacatggagttctgttatcaagagctttgccagctggcggctgagcgcagggcccgtctggaagagtcccgccgcctctggaagttcttctgggagatggcagaagaggaaggctggatacgggagaaggagaagatcctgtcctcggacgattacgggaaagacctgaccagcgtcatgcgcctgctcagcaagcaccgggcgttcgaggacgagatgagcggccgcagtggccactttgagcaggccatcaaggaaggcgaagacatgatcgcggaggagcacttcgggtcggagaagatccgtgagaggatcatttacatccgggagcagtgggccaacctagagcagctctcggccattcggaagaagcgcctggaggaggcctccctgctgcaccagttccaggcagatgctgatgacattgatgcctggatgctggacatcctcaagattgtctccagcagcgacgtgggccacgatgagtattccacacagtctctggtcaagaaacacaaggacgtggcggaagagatcgccaattacaggcccacccttgacacgctgcacgaacaagccagcgccctcccccaggagcatgccgagtctccagacgtgaggggcaggctgtcgggcatcgaggagcggtataaggaggtggcagagctgacgcggctgcggaagcaggcactccaggacactctggccctgtacaagatgttcagcgaggctgatgcctgtgagctctggatcgacgagaaggagcagtggctcaacaacatgcagatcccagagaagctggaggatctggaggtcatccagcacagatttgagagcctagaaccagaaatgaacaaccaggcttcccgggttgcagtggtgaaccagattgcacgccagctgatgcacagcggccacccaagtgagaaggaaatcaaagcccagcaggacaaactcaacacaaggtggagccagttcagagaactggttgacaggaagaaggatgccctcctgtctgccctgagcatccagaactaccacctcgagtgcaatgaaaccaaatcctggattcgggaaaagaccaaggtcatcgagtccacccaggacctgggcaatgacctggctggcgtcatggccctgcagcgcaagctgaccggcatggagcgggacttggtggccattgaggcaaagctgagtgacctgcagaaggaggcggagaagctggagtccgagcaccccgaccaggcccaggccatcctgtctcggctggccgagatcagcgacgtgtgggaggagatgaagaccaccctgaaaaaccgagaggcctccctgggagaggccagcaagctgcagcagttcctacgggacttggacgacttccagtcctggctctctaggacccagacagcgatcgcctcggaggacatgccaaacaccctgaccgaggctgagaagctgctcacgcagcacgagaacatcaagaacgagatcgacaactacgaggaggactaccagaagatgagggacatgggcgagatggtcacccaggggcagaccgatgcccagtacatgtttctgcggcagcggctgcaggccctggacactggatggaacgagctccacaagatgtgggagaacagacaaaatctcctatcccagtcacatgcctaccagcagttcctcagagacacgaagcaagccgaagcctttcttaacaaccaggagtatgttctggctcacactgaaatgcctaccaccttggaaggagctgaagcagcaattaaaaagcaagaggacttcatgaccaccatggacgccaatgaggagaagatcaatgctgtggtggagactggccggaggctggtgagcgatgggaacatcaactcagatcgcatccaggagaaggtggactctattgatgacagacataggaagaatcgtgagacagccagtgaacttttgatgaggttgaaggacaacagggatctacagaaattcctgcaagattgtcaagagctgtctctctggatcaatgagaagatgctcacagcccaggacatgtcttacgatgaagccagaaatctgcacagtaaatggttgaagcatcaagcatttatggcagaacttgcatccaacaaagaatggcttgacaaaatcgagaaggaaggaatgcagctcatttcagaaaagcctgagacggaagctgtggtgaaggagaaactcactggtttacataaaatgtgggaagtccttgaatccactacccagacaaaggcccagcggctctttgatgcaaacaaggccgaacttttcacccagagctgtgcagatctagacaaatggctgcacggcctggagagtcagattcagtctgatgactatggcaaagacctgaccagtgtcaatatcctgctgaaaaagcaacagatgctggagaatcagatggaagtgcggaagaaggagatcgaagagctccaaagccaagcccaggccctgagtcaggaagggaagagcaccgacgaggtagacagcaagcgcctcaccgtgcagaccaagttcatggagttgctggagcccttgaacgagaggaagcataacctgctggcctccaaagagatccatcagttcaacagggatgtggaggacgagatcttgtgggttggagagaggatgcctttggcaacttccacggatcatggccacaacctccagactgtgcagctgttaataaagaaaaatcagaccctccagaaagaaatccaggggcaccagcctcgcattgacgacatctttgagaggagccaaaacatcgtcactgacagcagcagcctcagcgctgaggccatcagacagaggcttgccgacctgaagcagctgtggggtctcctcattgaggagacagagaaacgccacaggcggctggaggaggcgcacagggcccagcagtactactttgacgctgctgaggccgaagcctggatgagcgagcaggagctgtacatgatgtcagaggagaaggccaaggatgagcagagtgctgtctccatgttgaagaagcaccagatcttagaacaagctgtggaggactatgcagagaccgtgcatcagctctccaagaccagccgggccctggtggccgacagccatcctgaaagtgagcgcattagcatgcggcagtccaaagtggataaactgtacgctggtctgaaagaccttgctgaagagagaagaggcaagctggatgagagacacaggttattccagctcaaccgggaggtggacgacctggagcagtggatcgctgagagggaggtggtcgcagggtcccatgaactgggacaggactatgagcatgtcacgatgttacaagaacgattccgggagtttgcccgagacaccgggaacattgggcaggagcgcgtggacacggtcaatcacctggcagatgagctcatcaactctggacattcagatgccgccaccatcgctgaatggaaggatggcctcaatgaagcctgggccgacctcctggagctcattgacacaagaacacagattcttgccgcttcctatgaactgcacaagttttaccacgatgccaaggagatctttgggcgtatacaggacaaacacaagaaactccctgaggagcttgggagagatcagaacacagtggagaccttacagagaatgcacactacatttgagcatgacatccaggctctgggcacacaggtgaggcagctgcaggaggatgcagcccgcctccaggcggcctatgcgggtgacaaggccgacgatatccagaagcgcgagaacgaggtcctggaagcctggaagtccctcctggacgcctgtgagagccgcagggtgcggctggtggacacaggggacaagttccgcttcttcagcatggtgcgcgacctcatgctctggatggaggatgtcatccggcagatcgaggcccaggagaagccaagggatgtatcatctgttgaactcttaatgaataatcatcaaggcatcaaagctgaaattgatgcacgtaatgacagtttcacaacctgcattgaacttgggaaatccctgttggcgagaaaacactatgcatctgaggagatcaaggaaaaattactgcagttgacggaaaagaggaaagaaatgatcgacaagtgggaagaccgatgggaatggttaagactgattctggaggtccatcagttctcaagagacgccagtgtggccgaggcctggctgcttggacaggagccgtacctatccagccgagagataggccagagcgtggacgaggtggagaagctcatcaagcgccacgaggcatttgaaaagtctgcagcaacctgggatgagaggttctctgccctggaaaggctgactacattggagttactggaagtgcgcagacagcaagaggaagaggagaggaagaggcggccgccttctcccgagccgagcacgaaggtttcagaggaagccgagtcccagcagcagtgggatacttcaaaaggagaacaagtttcccaaaacggtttgccagctgaacagggatctccacggatggcagaaacggtggacacaagcgaaatggtcaacggcgctacagaacaaaggacgagctctaaagagtccagccccatcccctccccgacctctgatcgtaaagccaagactgccctcccagcccagagtgccgccaccttaccagccagaacccaggagacaccttcggcccagatggaaggcttcctcaatcggaaacacgagtgggaggcccacaataagaaagcctcaagcaggtcctggcacaatgtttattgtgtcataaataaccaagaaatgggtttctacaaagatgcaaagactgctgcttctggaattccctaccacagcgaggtccctgtgagtttgaaagaagctgtctgcgaagtggcccttgattacaaaaagaagaaacacgtattcaagctaagactaaatgatggcaatgagtacctcttccaagccaaagacgatgaggaaatgaacacatggatccaggctatctcttccgccatctcctctgataaacacgaggtgtctgccagcacccagagcacgccagcatccagccgcgcgcagaccctccccaccagcgtcgtcaccatcaccagcgagtccagtcccggcaagcgggaaaaggacaaagagaaagacaaagagaagcggttcagcctttttggcaaaaagaaatgaactcctttccttcacctcctgcccttctcttaccttttcagtgaaattccagcatgcaagctcagaaccaacacattactctctgtgcctaatgttcctcaatgtggttgatttttttttttttttaatttatagagcatttcggggggggtgggggaaacacacctaaacactttatctccaagttacaaaagtttgaggtgcagagggaaggccagattttttttttaatgaaattatatagattagatctcagtatttaaactgttcctcaattttgtgaggctgtgttggaaataacccgcctctagtgctgttggtatgcaaggcagcggtgcttaatcaatatttcctgtgctcaccagaggcaaaatgtaccaatatcctgacaccattctctctccatttacttctggtggttaccctgactcttgactcttagaagtgcccgagatggggctaacctttattaaacagatcgcatattatgatcttgctgcagccacagtgcagctccacattaactctacagaccaaaccatttgtatctggcatcacttactaacacacgacatgcggcttttctgcatcaactgctatgacggttaagaatgtcagtatacaagaaggaatagaatacattatattgtacgtttgagataattctagtacaaagtataataaaactagatgtataataaaccctttaaatcattggtaagtgtacaagtggtggaactgaagcatttactggacaaagtaatgttactctaatggttacttgctcgtgcgttgccacactgtgttataatttgcttcatttccttgctatttgatacatagtgtgcatttctctgtcactgtaactattgtaatgacaaattttcatcttactgcacaatcaaaatgacattgataggaatgaactccagaggctgggcctgaacagggaggtggtcgctcaggcctggtgctcagtcgtacgacctgtacctctcaacttttgccctatctgttaaatatatgctatgtcattaaatgcttttaaatcta

SEQ ID NO: 357091 - DNA, 8459 bp, Homo sapiens
gtgagctgaagcagggcagggcatcaactcacccaggaagtgcaaggggtttggggattttcctttcctagccaagggaaggcatgacagactgtacctggaaaaacaggacactcttgcccaaatactgcactttttgcacagtcttagcaactggcagaccaggagattctctcctgtgcctgattcattgggtcccacacccatagggccttgcttactgccagtgcagcagtctgagattaacaccccatccccgggagaactctaagaaggagctgatgtggaggagcagctgagacagttcaagatgacgaccacagtagccacagactatgacaacattgagatccagcagcagtacagtgatgtcaacaaccgctgggatgtcgacgactgggacaatgagaacagctctgcgcggctttttgagcggtcccgcatcaaggctctggcagatgagcgtgaagccgtgcagaagaagaccttcaccaagtgggtcaattcccaccttgcccgtgtgtcctgccggatcacagacctgtacactgaccttcgagatggacggatgctcatcaagctgctggaggtcctctctggagagaggctgcctaaacccaccaagggacgaatgcgcatccactgcttagagaatgtggacaaggcccttcagttcctgaaggagcagagagtccatcttgagaacatggggtcccatgacatcgtggatggaaaccaccggctgacccttggcctcatctggaccatcatcctgcgcttccagatccaggatatcagtgtggaaactgaagacaacaaagagaagaaatctgccaaggatgcattgctgttgtggtgccagatgaagacagctgggtaccccaatgtcaacattcacaatttcaccactagctggagggacggcatggccttcaatgcactgatacacaaacaccggcctgacctgatagattttgacaaactaaagaaatctaacgcacactacaacctgcagaatgcatttaatctggcagaacagcacctcggcctcactaaactgttggaccccgaagacatcagcgtggaccatcctgatgagaagtccataatcacttatgtggtgacttattaccactacttctctaagatgaaggccttagctgttgaaggaaaacgaattggaaaggtgcttgacaatgctattgaaacagaaaaaatgattgaaaagtatgaatcacttgcctctgaccttctggaatggattgaacaaaccatcatcattctgaacaatcgcaaatttgccaattcactggtcggggttcaacagcagcttcaggcattcaacacttaccgcactgtggagaaaccacccaaatttactgagaaggggaacttggaagtgctgctcttcaccattcagagcaagatgagggccaacaaccagaaggtctacatgccccgggaggggaagctcatctctgacatcaacaaggcctgggaaagactggaaaaagcggaacacgaaagagaactggctttgcggaatgagctcataagacaggagaaactggaacagctcgcccgcagatttgatcgcaaggcagctatgagggagacttggctgagcgaaaaccagcgtctggtgtctcaggacaactttgggtttgaccttcctgcagttgaggccgccacaaaaaagcacgaggccattgagacagacattgccgcatacgaggagcgtgtgcaggctgtggtagccgtggccagggagctcgaggccgagaattaccacgacatcaagcgcatcacagcgaggaaggacaatgtcatccggctctgggaatacctactggaactgctcagggcccggagacagcggctcgagatgaacctggggctgcagaagatattccaggaaatgctctacattatggactggatggatgaaatgaaggtgctagtattgtctcaagactatggcaaacacttacttggtgtggaagacctgttacagaagcacaccctggttgaagcagacattggcatccaggcagagcgggtgagaggtgtcaatgcctccgcccagaagttcgcaacagacggggaaggttacaagccctgtgacccccaggtgatccgagaccgcgtggcccacatggagttctgttatcaagagctttgccagctggcggctgagcgcagggcccgtctggaagagtcccgccgcctctggaagttcttctgggagatggcagaagaggaaggctggatacgggagaaggagaagatcctgtcctcggacgattacgggaaagacctgaccagcgtcatgcgcctgctcagcaagcaccgggcgttcgaggacgagatgagcggccgcagtggccactttgagcaggccatcaaggaaggcgaagacatgatcgcggaggagcacttcgggtcggagaagatccgtgagaggatcatttacatccgggagcagtgggccaacctagagcagctctcggccattcggaagaagcgcctggaggaggcctccctgctgcaccagttccaggcagatgctgatgacattgatgcctggatgctggacatcctcaagattgtctccagcagcgacgtgggccacgatgagtattccacacagtctctggtcaagaaacacaaggacgtggcggaagagatcgccaattacaggcccacccttgacacgctgcacgaacaagccagcgccctcccccaggagcatgccgagtctccagacgtgaggggcaggctgtcgggcatcgaggagcggtataaggaggtggcagagctgacgcggctgcggaagcaggcactccaggacactctggccctgtacaagatgttcagcgaggctgatgcctgtgagctctggatcgacgagaaggagcagtggctcaacaacatgcagatcccagagaagctggaggatctggaggtcatccagcacagatttgagagcctagaaccagaaatgaacaaccaggcttcccgggttgcagtggtgaaccagattgcacgccagctgatgcacagcggccacccaagtgagaaggaaatcaaagcccagcaggacaaactcaacacaaggtggagccagttcagagaactggttgacaggaagaaggatgccctcctgtctgccctgagcatccagaactaccacctcgagtgcaatgaaaccaaatcctggattcgggaaaagaccaaggtcatcgagtccacccaggacctgggcaatgacctggctggcgtcatggccctgcagcgcaagctgaccggcatggagcgggacttggtggccattgaggcaaagctgagtgacctgcagaaggaggcggagaagctggagtccgagcaccccgaccaggcccaggccatcctgtctcggctggccgagatcagcgacgtgtgggaggagatgaagaccaccctgaaaaaccgagaggcctccctgggagaggccagcaagctgcagcagttcctacgggacttggacgacttccagtcctggctctctaggacccagacagcgatcgcctcggaggacatgccaaacaccctgaccgaggctgagaagctgctcacgcagcacgagaacatcaagaacgagatcgacaactacgaggaggactaccagaagatgagggacatgggcgagatggtcacccaggggcagaccgatgcccagtacatgtttctgcggcagcggctgcaggccctggacactggatggaacgagctccacaagatgtgggagaacagacaaaatctcctatcccagtcacatgcctaccagcagttcctcagagacacgaagcaagccgaagcctttcttaacaaccaggagtatgttctggctcacactgaaatgcctaccaccttggaaggagctgaagcagcaattaaaaagcaagaggacttcatgaccaccatggacgccaatgaggagaagatcaatgctgtggtggagactggccggaggctggtgagcgatgggaacatcaactcagatcgcatccaggagaaggtggactctattgatgacagacataggaagaatcgtgagacagccagtgaacttttgatgaggttgaaggacaacagggatctacagaaattcctgcaagattgtcaagagctgtctctctggatcaatgagaagatgctcacagcccaggacatgtcttacgatgaagccagaaatctgcacagtaaatggttgaagcatcaagcatttatggcagaacttgcatccaacaaagaatggcttgacaaaatcgagaaggaaggaatgcagctcatttcagaaaagcctgagacggaagctgtggtgaaggagaaactcactggtttacataaaatgtgggaagtccttgaatccactacccagacaaaggcccagcggctctttgatgcaaacaaggccgaacttttcacccagagctgtgcagatctagacaaatggctgcacggcctggagagtcagattcagtctgatgactatggcaaagacctgaccagtgtcaatatcctgctgaaaaagcaacagatgctggagaatcagatggaagtgcggaagaaggagatcgaagagctccaaagccaagcccaggccctgagtcaggaagggaagagcaccgacgaggtagacagcaagcgcctcaccgtgcagaccaagttcatggagttgctggagcccttgaacgagaggaagcataacctgctggcctccaaagagatccatcagttcaacagggatgtggaggacgagatcttgtgggttggagagaggatgcctttggcaacttccacggatcatggccacaacctccagactgtgcagctgttaataaagaaaaatcagaccctccagaaagaaatccaggggcaccagcctcgcattgacgacatctttgagaggagccaaaacatcgtcactgacagcagcagcctcagcgctgaggccatcagacagaggcttgccgacctgaagcagctgtggggtctcctcattgaggagacagagaaacgccacaggcggctggaggaggcgcacagggcccagcagtactactttgacgctgctgaggccgaagcctggatgagcgagcaggagctgtacatgatgtcagaggagaaggccaaggatgagcagagtgctgtctccatgttgaagaagcaccagatcttagaacaagctgtggaggactatgcagagaccgtgcatcagctctccaagaccagccgggccctggtggccgacagccatcctgaaagtgagcgcattagcatgcggcagtccaaagtggataaactgtacgctggtctgaaagaccttgctgaagagagaagaggcaagctggatgagagacacaggttattccagctcaaccgggaggtggacgacctggagcagtggatcgctgagagggaggtggtcgcagggtcccatgaactgggacaggactatgagcatgtcacgatgttacaagaacgattccgggagtttgcccgagacaccgggaacattgggcaggagcgcgtggacacggtcaatcacctggcagatgagctcatcaactctggacattcagatgccgccaccatcgctgaatggaaggatggcctcaatgaagcctgggccgacctcctggagctcattgacacaagaacacagattcttgccgcttcctatgaactgcacaagttttaccacgatgccaaggagatctttgggcgtatacaggacaaacacaagaaactccctgaggagcttgggagagatcagaacacagtggagaccttacagagaatgcacactacatttgagcatgacatccaggctctgggcacacaggtgaggcagctgcaggaggatgcagcccgcctccaggcggcctatgcgggtgacaaggccgacgatatccagaagcgcgagaacgaggtcctggaagcctggaagtccctcctggacgcctgtgagagccgcagggtgcggctggtggacacaggggacaagttccgcttcttcagcatggtgcgcgacctcatgctctggatggaggatgtcatccggcagatcgaggcccaggagaagccaagggatgtatcatctgttgaactcttaatgaataatcatcaaggcatcaaagctgaaattgatgcacgtaatgacagtttcacaacctgcattgaacttgggaaatccctgttggcgagaaaacactatgcatctgaggagatcaaggaaaaattactgcagttgacggaaaagaggaaagaaatgatcgacaagtgggaagaccgatgggaatggttaagactgattctggaggtccatcagttctcaagagacgccagtgtggccgaggcctggctgcttggacaggagccgtacctatccagccgagagataggccagagcgtggacgaggtggagaagctcatcaagcgccacgaggcatttgaaaagtctgcagcaacctgggatgagaggttctctgccctggaaaggctgactacattggagttactggaagtgcgcagacagcaagaggaagaggagaggaagaggcggccgccttctcccgagccgagcacgaaggtttcagaggaagccgagtcccagcagcagtgggatacttcaaaaggagaacaagtttcccaaaacggtttgccagctgaacagggatctccacggatggcagaaacggtggacacaagcgaaatggtcaacggcgctacagaacaaaggacgagctctaaagagtccagccccatcccctccccgacctctgatcgtaaagccaagactgccctcccagcccagagtgccgccaccttaccagccagaacccaggagacaccttcggcccagatggaaggcttcctcaatcggaaacacgagtgggaggcccacaataagaaagcctcaagcaggtcctggcacaatgtttattgtgtcataaataaccaagaaatgggtttctacaaagatgcaaagactgctgcttctggaattccctaccacagcgaggtccctgtgagtttgaaagaagctgtctgcgaagtggcccttgattacaaaaagaagaaacacgtattcaagctaagactaaatgatggcaatgagtacctcttccaagccaaagacgatgaggaaatgaacacatggatccaggctatctcttccgccatctcctctgataaacacgaggtgtctgccagcacccagagcacgccagcatccagccgcgcgcagaccctccccaccagcgtcgtcaccatcaccagcgagtccagtcccggcaagcgggaaaaggacaaagagaaagacaaagagaagcggttcagcctttttggcaaaaagaaatgaactcctttccttcacctcctgcccttctcttaccttttcagtgaaattccagcatgcaagctcagaaccaacacattactctctgtgcctaatgttcctcaatgtggttgatttttttttttttttaatttatagagcatttcggggggggtgggggaaacacacctaaacactttatctccaagttacaaaagtttgaggtgcagagggaaggccagattttttttttaatgaaattatatagattagatctcagtatttaaactgttcctcaattttgtgaggctgtgttggaaataacccgcctctagtgctgttggtatgcaaggcagcggtgcttaatcaatatttcctgtgctcaccagaggcaaaatgtaccaatatcctgacaccattctctctccatttacttctggtggttaccctgactcttgactcttagaagtgcccgagatggggctaacctttattaaacagatcgcatattatgatcttgctgcagccacagtgcagctccacattaactctacagaccaaaccatttgtatctggcatcacttactaacacacgacatgcggcttttctgcatcaactgctatgacggttaagaatgtcagtatacaagaaggaatagaaaactgatactgttttaaataatctgtaatttcaattttttttttttttgctgaaatacattatattgtacgtttgagataattctagtacaaagtataataactgaagcatttactggacaaagtaatgttactctaatggttacttgctcgtgcgttgccacactgtgttataatttgcttcatttccttgctatttgatacatagtgtgcatttctctgtcactgtaactattgtaatgacaaattttcatcttactgcacaatcaaaatgacattgataggaatgaactccagaggctgggcctgaacagggaggtggtcgctcaggcctggtgctcagtcgtacgacctgtacctctcaacttttgccctatctgttaaatatatgctatgtcattaaatgcttttaaatcta

SEQ ID NO: 357092 - DNA, 9039 bp, Homo sapiens
  misc_feature (7950)..(7950): n is a, c, g, or t
  misc_feature (7956)..(7956): n is a, c, g, or t
  misc_feature (7959)..(7959): n is a, c, g, or t
  misc_feature (7966)..(7966): n is a, c, g, or t
  misc_feature (7968)..(7968): n is a, c, g, or t
  misc_feature (7970)..(7970): n is a, c, g, or t
  misc_feature (7981)..(7981): n is a, c, g, or t
  misc_feature (7984)..(7984): n is a, c, g, or t
  misc_feature (7987)..(7987): n is a, c, g, or t
  misc_feature (7989)..(7989): n is a, c, g, or t
  misc_feature (7992)..(7992): n is a, c, g, or t
  misc_feature (8007)..(8007): n is a, c, g, or t
  misc_feature (8009)..(8009): n is a, c, g, or t
  misc_feature (8013)..(8013): n is a, c, g, or t
  misc_feature (8015)..(8015): n is a, c, g, or t
  misc_feature (8019)..(8019): n is a, c, g, or t
  misc_feature (8032)..(8034): n is a, c, g, or t
  misc_feature (8042)..(8042): n is a, c, g, or t
  misc_feature (8049)..(8049): n is a, c, g, or t
  misc_feature (8053)..(8053): n is a, c, g, or t
  misc_feature (8075)..(8081): n is a, c, g, or t
  misc_feature (8084)..(8084): n is a, c, g, or t
  misc_feature (8086)..(8086): n is a, c, g, or t
  misc_feature (8090)..(8091): n is a, c, g, or t
gtgagctgaagcagggcagggcatcaactcacccaggaagtgcaaggggtttggggattttcctttcctagccaagggaaggcatgacagactgtacctggaaaaacaggacactcttgcccaaatactgcactttttgcacagtcttagcaactggcagaccaggagattctctcctgtgcctgattcattgggtcccacacccatagggccttgcttactgccagtgcagcagtctgagattaacaccccatccccgggagaactctaagaaggagctgatgtggaggagcagctgagacagttcaagatgacgaccacagtagccacagactatgacaacattgagatccagcagcagtacagtgatgtcaacaaccgctgggatgtcgacgactgggacaatgagaacagctctgcgcggctttttgagcggtcccgcatcaaggctctggcagatgagcgtgaagccgtgcagaagaagaccttcaccaagtgggtcaattcccaccttgcccgtgtgtcctgccggatcacagacctgtacactgaccttcgagatggacggatgctcatcaagctgctggaggtcctctctggagagaggctgcctaaacccaccaagggacgaatgcgcatccactgcttagagaatgtggacaaggcccttcagttcctgaaggagcagagagtccatcttgagaacatggggtcccatgacatcgtggatggaaaccaccggctgacccttggcctcatctggaccatcatcctgcgcttccagatccaggatatcagtgtggaaactgaagacaacaaagagaagaaatctgccaaggatgcattgctgttgtggtgccagatgaagacagctgggtaccccaatgtcaacattcacaatttcaccactagctggagggacggcatggccttcaatgcactgatacacaaacaccggcctgacctgatagattttgacaaactaaagaaatctaacgcacactacaacctgcagaatgcatttaatctggcagaacagcacctcggcctcactaaactgttggaccccgaagacatcagcgtggaccatcctgatgagaagtccataatcacttatgtggtgacttattaccactacttctctaagatgaaggccttagctgttgaaggaaaacgaattggaaaggtgcttgacaatgctattgaaacagaaaaaatgattgaaaagtatgaatcacttgcctctgaccttctggaatggattgaacaaaccatcatcattctgaacaatcgcaaatttgccaattcactggtcggggttcaacagcagcttcaggcattcaacacttaccgcactgtggagaaaccacccaaatttactgagaaggggaacttggaagtgctgctcttcaccattcagagcaagatgagggccaacaaccagaaggtctacatgccccgggaggggaagctcatctctgacatcaacaaggcctgggaaagactggaaaaagcggaacacgaaagagaactggctttgcggaatgagctcataagacaggagaaactggaacagctcgcccgcagatttgatcgcaaggcagctatgagggagacttggctgagcgaaaaccagcgtctggtgtctcaggacaactttgggtttgaccttcctgcagttgaggccgccacaaaaaagcacgaggccattgagacagacattgccgcatacgaggagcgtgtgcaggctgtggtagccgtggccagggagctcgaggccgagaattaccacgacatcaagcgcatcacagcgaggaaggacaatgtcatccggctctgggaatacctactggaactgctcagggcccggagacagcggctcgagatgaacctggggctgcagaagatattccaggaaatgctctacattatggactggatggatgaaatgaaggtgctagtattgtctcaagactatggcaaacacttacttggtgtggaagacctgttacagaagcacaccctggttgaagcagacattggcatccaggcagagcgggtgagaggtgtcaatgcctccgcccagaagttcgcaacagacggggaaggttacaagccctgtgacccccaggtgatccgagaccgcgtggcccacatggagttctgttatcaagagctttgccagctggcggctgagcgcagggcccgtctggaagagtcccgccgcctctggaagttcttctgggagatggcagaagaggaaggctggatacgggagaaggagaagatcctgtcctcggacgattacgggaaagacctgaccagcgtcatgcgcctgctcagcaagcaccgggcgttcgaggacgagatgagcggccgcagtggccactttgagcaggccatcaaggaaggcgaagacatgatcgcggaggagcacttcgggtcggagaagatccgtgagaggatcatttacatccgggagcagtgggccaacctagagcagctctcggccattcggaagaagcgcctggaggaggcctccctgctgcaccagttccaggcagatgctgatgacattgatgcctggatgctggacatcctcaagattgtctccagcagcgacgtgggccacgatgagtattccacacagtctctggtcaagaaacacaaggacgtggcggaagagatcgccaattacaggcccacccttgacacgctgcacgaacaagccagcgccctcccccaggagcatgccgagtctccagacgtgaggggcaggctgtcgggcatcgaggagcggtataaggaggtggcagagctgacgcggctgcggaagcaggcactccaggacactctggccctgtacaagatgttcagcgaggctgatgcctgtgagctctggatcgacgagaaggagcagtggctcaacaacatgcagatcccagagaagctggaggatctggaggtcatccagcacagatttgagagcctagaaccagaaatgaacaaccaggcttcccgggttgcagtggtgaaccagattgcacgccagctgatgcacagcggccacccaagtgagaaggaaatcaaagcccagcaggacaaactcaacacaaggtggagccagttcagagaactggttgacaggaagaaggatgccctcctgtctgccctgagcatccagaactaccacctcgagtgcaatgaaaccaaatcctggattcgggaaaagaccaaggtcatcgagtccacccaggacctgggcaatgacctggctggcgtcatggccctgcagcgcaagctgaccggcatggagcgggacttggtggccattgaggcaaagctgagtgacctgcagaaggaggcggagaagctggagtccgagcaccccgaccaggcccaggccatcctgtctcggctggccgagatcagcgacgtgtgggaggagatgaagaccaccctgaaaaaccgagaggcctccctgggagaggccagcaagctgcagcagttcctacgggacttggacgacttccagtcctggctctctaggacccagacagcgatcgcctcggaggacatgccaaacaccctgaccgaggctgagaagctgctcacgcagcacgagaacatcaagaacgagatcgacaactacgaggaggactaccagaagatgagggacatgggcgagatggtcacccaggggcagaccgatgcccagtacatgtttctgcggcagcggctgcaggccctggacactggatggaacgagctccacaagatgtgggagaacagacaaaatctcctatcccagtcacatgcctaccagcagttcctcagagacacgaagcaagccgaagcctttcttaacaaccaggagtatgttctggctcacactgaaatgcctaccaccttggaaggagctgaagcagcaattaaaaagcaagaggacttcatgaccaccatggacgccaatgaggagaagatcaatgctgtggtggagactggccggaggctggtgagcgatgggaacatcaactcagatcgcatccaggagaaggtggactctattgatgacagacataggaagaatcgtgagacagccagtgaacttttgatgaggttgaaggacaacagggatctacagaaattcctgcaagattgtcaagagctgtctctctggatcaatgagaagatgctcacagcccaggacatgtcttacgatgaagccagaaatctgcacagtaaatggttgaagcatcaagcatttatggcagaacttgcatccaacaaagaatggcttgacaaaatcgagaaggaaggaatgcagctcatttcagaaaagcctgagacggaagctgtggtgaaggagaaactcactggtttacataaaatgtgggaagtccttgaatccactacccagacaaaggcccagcggctctttgatgcaaacaaggccgaacttttcacccagagctgtgcagatctagacaaatggctgcacggcctggagagtcagattcagtctgatgactatggcaaagacctgaccagtgtcaatatcctgctgaaaaagcaacagatgctggagaatcagatggaagtgcggaagaaggagatcgaagagctccaaagccaagcccaggccctgagtcaggaagggaagagcaccgacgaggtagacagcaagcgcctcaccgtgcagaccaagttcatggagttgctggagcccttgaacgagaggaagcataacctgctggcctccaaagagatccatcagttcaacagggatgtggaggacgagatcttgtgggttggagagaggatgcctttggcaacttccacggatcatggccacaacctccagactgtgcagctgttaataaagaaaaatcagaccctccagaaagaaatccaggggcaccagcctcgcattgacgacatctttgagaggagccaaaacatcgtcactgacagcagcagcctcagcgctgaggccatcagacagaggcttgccgacctgaagcagctgtggggtctcctcattgaggagacagagaaacgccacaggcggctggaggaggcgcacagggcccagcagtactactttgacgctgctgaggccgaagcctggatgagcgagcaggagctgtacatgatgtcagaggagaaggccaaggatgagcagagtgctgtctccatgttgaagaagcaccagatcttagaacaagctgtggaggactatgcagagaccgtgcatcagctctccaagaccagccgggccctggtggccgacagccatcctgaaagtgagcgcattagcatgcggcagtccaaagtggataaactgtacgctggtctgaaagaccttgctgaagagagaagaggcaagctggatgagagacacaggttattccagctcaaccgggaggtggacgacctggagcagtggatcgctgagagggaggtggtcgcagggtcccatgaactgggacaggactatgagcatgtcacgatgttacaagaacgattccgggagtttgcccgagacaccgggaacattgggcaggagcgcgtggacacggtcaatcacctggcagatgagctcatcaactctggacattcagatgccgccaccatcgctgaatggaaggatggcctcaatgaagcctgggccgacctcctggagctcattgacacaagaacacagattcttgccgcttcctatgaactgcacaagttttaccacgatgccaaggagatctttgggcgtatacaggacaaacacaagaaactccctgaggagcttgggagagatcagaacacagtggagaccttacagagaatgcacactacatttgagcatgacatccaggctctgggcacacaggtgaggcagctgcaggaggatgcagcccgcctccaggcggcctatgcgggtgacaaggccgacgatatccagaagcgcgagaacgaggtcctggaagcctggaagtccctcctggacgcctgtgagagccgcagggtgcggctggtggacacaggggacaagttccgcttcttcagcatggtgcgcgacctcatgctctggatggaggatgtcatccggcagatcgaggcccaggagaagccaagggatgtatcatctgttgaactcttaatgaataatcatcaaggcatcaaagctgaaattgatgcacgtaatgacagtttcacaacctgcattgaacttgggaaatccctgttggcgagaaaacactatgcatctgaggagatcaaggaaaaattactgcagttgacggaaaagaggaaagaaatgatcgacaagtgggaagaccgatgggaatggttaagactgattctggaggtccatcagttctcaagagacgccagtgtggccgaggcctggctgcttggacaggagccgtacctatccagccgagagataggccagagcgtggacgaggtggagaagctcatcaagcgccacgaggcatttgaaaagtctgcagcaacctgggatgagaggttctctgccctggaaaggctgactacattggagttactggaagtgcgcagacagcaagaggaagaggagaggaagaggcggccgccttctcccgagccgagcacgaaggtttcagaggaagccgagtcccagcagcagtgggatacttcaaaaggagaacaagtttcccaaaacggtttgccagctgaacagggatctccacggatggcagaaacggtggacacaagcgaaatggtcaacggcgctacagaacaaaggacgagctctaaagagtccagccccatcccctccccgacctctgatcgtaaagccaagactgccctcccagcccagagtgccgccaccttaccagccagaacccaggagacaccttcggcccagatggaaggcttcctcaatcggaaacacgagtgggaggcccacaataagaaagcctcaagcaggtcctggcacaatgtttattgtgtcataaataaccaagaaatgggtttctacaaagatgcaaagactgctgcttctggaattccctaccacagcgaggtccctgtgagtttgaaagaagctgtctgcgaagtggcccttgattacaaaaagaagaaacacgtattcaagctaagactaaatgatggcaatgagtacctcttccaagccaaagacgatgaggaaatgaacacatggatccaggctatctcttccgccatctcctctgataaacacgaggtgtctgccagcacccagagcacgccagcatccagccgcgcgcagaccctccccaccagcgtcgtcaccatcaccagcgagtccagtcccggcaagcgggaaaaggacaaagagaaagacaaagagaagcggttcagcctttttggcaaaaagaaatgaactcctttccttcacctcctgcccttctcttaccttttcagtgaaattccagcatgcaagctcagaaccaacacattactctctgtgcctaatgttcctcaatgtggttgatttttttttttttttaatttatagagcatttcggggggggtgggggaaacacacctaaacactttatctccaagttacaaaagtttgaggtgcagagggaaggccagattttttttttaatgaaattatatagattagatctcagtatttaaactgttcctcaattttgtgaggctgtgttggaaataacccgcctctagtgctgttggtatgcaaggcagcggtgcttaatcaatatttcctgtgctcaccagaggcaaaatgtaccaatatcctgacaccattctctctccatttacttctggtggttaccctgactcttgactcttagaagtgcccgagatggggctaacctttattaaacagatcgcatattatgatcttgctgcagccacagtgcagctccacattaactctacagaccaaaccatttncccccngcnccccccncncnccccccccatnccnccncnccncccccaccgccatgncngttnanaatncccgtaccccccnnngaaccccnccccganaccntcttaaataacccccccccccnnnnnnnttntntttnnctgaaatacattatattgtacgtttgagataattctagtacaaagtataataaaactagatgtataataaaccctttaaatcattggtaagtgtacaagtggtggaactgaagcatttactggacaaagtaatgttactctaatggttacttgctcgtgcgttgccacactgtgttataatttgcttcatttccttgctatttgatacatagtgtgcatttctctgtcactgtaactattgtaatgacaaattttcatcttactgcacaatcaaaatgacattgataggaatgaactccagaggctgggcctgaacagggaggtggtcgctcaggcctggtgctcagtcgtacgacctgtacctctcaacttttgccctatctgttaaatatatgctatgtcattaaatgcttttaaatctagcacggtgactagttgttgttcttcctctgctgcgtgtgcatgcccagtagggaaactgcaaagggagaaatgacaaacaagaaacattttacaaccagtctgggctcacttttgcattttttatgcatgtctggtgcacaagctttgaaaactacagcaaacagtaataaatgtgactgttttgtagttatacattcaggctttatcttttatttatgaaaaagttaccagagcacttgtgaaacctgaactctgagataggggttggcaaatttgttctgtaaagggacagagatagtaaatattttaggctttgtaggccgtaactgtctctgttgctcaattctgctgttgcgtaatacaaaggcagccattgacggtatgtgaatgcctgggcatggctgtgttccagtaaaactatttaaggacataaatttgaatttcatataactttgacatgccatacaatattttgattttcttaatgatttcaaaatgtaaagtctattttatacagatcagacc

SEQ ID NO: 357093 - DNA, 7878 bp, Homo sapiens
gtgagctgaagcagggcagggcatcaactcacccaggaagtgcaaggggtttggggattttcctttcctagccaagggaaggcatgacagactgtacctggaaaaacaggacactcttgcccaaatactgcactttttgcacagtcttagcaactggcagaccaggagattctctcctgtgcctgattcattgggtcccacacccatagggccttgcttactgccagtgcagcagtctgagattaacaccccatccccgggagaactctaagaaggagctgatgtggaggagcagctgagacagttcaagatgacgaccacagtagccacagactatgacaacattgagatccagcagcagtacagtgatgtcaacaaccgctgggatgtcgacgactgggacaatgagaacagctctgcgcggctttttgagcggtcccgcatcaaggctctggcagatgagcgtgaagccgtgcagaagaagaccttcaccaagtgggtcaattcccaccttgcccgtgtgtcctgccggatcacagacctgtacactgaccttcgagatggacggatgctcatcaagctgctggaggtcctctctggagagaggctgcctaaacccaccaagggacgaatgcgcatccactgcttagagaatgtggacaaggcccttcagttcctgaaggagcagagagtccatcttgagaacatggggtcccatgacatcgtggatggaaaccaccggctgacccttggcctcatctggaccatcatcctgcgcttccagatccaggatatcagtgtggaaactgaagacaacaaagagaagaaatctgccaaggatgcattgctgttgtggtgccagatgaagacagctgggtaccccaatgtcaacattcacaatttcaccactagctggagggacggcatggccttcaatgcactgatacacaaacaccggcctgacctgatagattttgacaaactaaagaaatctaacgcacactacaacctgcagaatgcatttaatctggcagaacagcacctcggcctcactaaactgttggaccccgaagacatcagcgtggaccatcctgatgagaagtccataatcacttatgtggtgacttattaccactacttctctaagatgaaggccttagctgttgaaggaaaacgaattggaaaggtgcttgacaatgctattgaaacagaaaaaatgattgaaaagtatgaatcacttgcctctgaccttctggaatggattgaacaaaccatcatcattctgaacaatcgcaaatttgccaattcactggtcggggttcaacagcagcttcaggcattcaacacttaccgcactgtggagaaaccacccaaatttactgagaaggggaacttggaagtgctgctcttcaccattcagagcaagatgagggccaacaaccagaaggtctacatgccccgggaggggaagctcatctctgacatcaacaaggcctgggaaagactggaaaaagcggaacacgaaagagaactggctttgcggaatgagctcataagacaggagaaactggaacagctcgcccgcagatttgatcgcaaggcagctatgagggagacttggctgagcgaaaaccagcgtctggtgtctcaggacaactttgggtttgaccttcctgcagttgaggccgccacaaaaaagcacgaggccattgagacagacattgccgcatacgaggagcgtgtgcaggctgtggtagccgtggccagggagctcgaggccgagaattaccacgacatcaagcgcatcacagcgaggaaggacaatgtcatccggctctgggaatacctactggaactgctcagggcccggagacagcggctcgagatgaacctggggctgcagaagatattccaggaaatgctctacattatggactggatggatgaaatgaaggtgctagtattgtctcaagactatggcaaacacttacttggtgtggaagacctgttacagaagcacaccctggttgaagcagacattggcatccaggcagagcgggtgagaggtgtcaatgcctccgcccagaagttcgcaacagacggggaaggttacaagccctgtgacccccaggtgatccgagaccgcgtggcccacatggagttctgttatcaagagctttgccagctggcggctgagcgcagggcccgtctggaagagtcccgccgcctctggaagttcttctgggagatggcagaagaggaaggctggatacgggagaaggagaagatcctgtcctcggacgattacgggaaagacctgaccagcgtcatgcgcctgctcagcaagcaccgggcgttcgaggacgagatgagcggccgcagtggccactttgagcaggccatcaaggaaggcgaagacatgatcgcggaggagcacttcgggtcggagaagatccgtgagaggatcatttacatccgggagcagtgggccaacctagagcagctctcggccattcggaagaagcgcctggaggaggcctccctgctgcaccagttccaggcagatgctgatgacattgatgcctggatgctggacatcctcaagattgtctccagcagcgacgtgggccacgatgagtattccacacagtctctggtcaagaaacacaaggacgtggcggaagagatcgccaattacaggcccacccttgacacgctgcacgaacaagccagcgccctcccccaggagcatgccgagtctccagacgtgaggggcaggctgtcgggcatcgaggagcggtataaggaggtggcagagctgacgcggctgcggaagcaggcactccaggacactctggccctgtacaagatgttcagcgaggctgatgcctgtgagctctggatcgacgagaaggagcagtggctcaacaacatgcagatcccagagaagctggaggatctggaggtcatccagcacagatttgagagcctagaaccagaaatgaacaaccaggcttcccgggttgcagtggtgaaccagattgcacgccagctgatgcacagcggccacccaagtgagaaggaaatcaaagcccagcaggacaaactcaacacaaggtggagccagttcagagaactggttgacaggaagaaggatgccctcctgtctgccctgagcatccagaactaccacctcgagtgcaatgaaaccaaatcctggattcgggaaaagaccaaggtcatcgagtccacccaggacctgggcaatgacctggctggcgtcatggccctgcagcgcaagctgaccggcatggagcgggacttggtggccattgaggcaaagctgagtgacctgcagaaggaggcggagaagctggagtccgagcaccccgaccaggcccaggccatcctgtctcggctggccgagatcagcgacgtgtgggaggagatgaagaccaccctgaaaaaccgagaggcctccctgggagaggccagcaagctgcagcagttcctacgggacttggacgacttccagtcctggctctctaggacccagacagcgatcgcctcggaggacatgccaaacaccctgaccgaggctgagaagctgctcacgcagcacgagaacatcaagaacgagatcgacaactacgaggaggactaccagaagatgagggacatgggcgagatggtcacccaggggcagaccgatgcccagtacatgtttctgcggcagcggctgcaggccctggacactggatggaacgagctccacaagatgtgggagaacagacaaaatctcctatcccagtcacatgcctaccagcagttcctcagagacacgaagcaagccgaagcctttcttaacaaccaggagtatgttctggctcacactgaaatgcctaccaccttggaaggagctgaagcagcaattaaaaagcaagaggacttcatgaccaccatggacgccaatgaggagaagatcaatgctgtggtggagactggccggaggctggtgagcgatgggaacatcaactcagatcgcatccaggagaaggtggactctattgatgacagacataggaagaatcgtgagacagccagtgaacttttgatgaggttgaaggacaacagggatctacagaaattcctgcaagattgtcaagagctgtctctctggatcaatgagaagatgctcacagcccaggacatgtcttacgatgaagccagaaatctgcacagtaaatggttgaagcatcaagcatttatggcagaacttgcatccaacaaagaatggcttgacaaaatcgagaaggaaggaatgcagctcatttcagaaaagcctgagacggaagctgtggtgaaggagaaactcactggtttacataaaatgtgggaagtccttgaatccactacccagacaaaggcccagcggctctttgatgcaaacaaggccgaacttttcacccagagctgtgcagatctagacaaatggctgcacggcctggagagtcagattcagtctgatgactatggcaaagacctgaccagtgtcaatatcctgctgaaaaagcaacagatgctggagaatcagatggaagtgcggaagaaggagatcgaagagctccaaagccaagcccaggccctgagtcaggaagggaagagcaccgacgaggtagacagcaagcgcctcaccgtgcagaccaagttcatggagttgctggagcccttgaacgagaggaagcataacctgctggcctccaaagagatccatcagttcaacagggatgtggaggacgagatcttgtgggttggagagaggatgcctttggcaacttccacggatcatggccacaacctccagactgtgcagctgttaataaagaaaaatcagaccctccagaaagaaatccaggggcaccagcctcgcattgacgacatctttgagaggagccaaaacatcgtcactgacagcagcagcctcagcgctgaggccatcagacagaggcttgccgacctgaagcagctgtggggtctcctcattgaggagacagagaaacgccacaggcggctggaggaggcgcacagggcccagcagtactactttgacgctgctgaggccgaagcctggatgagcgagcaggagctgtacatgatgtcagaggagaaggccaaggatgagcagagtgctgtctccatgttgaagaagcaccagatcttagaacaagctgtggaggactatgcagagaccgtgcatcagctctccaagaccagccgggccctggtggccgacagccatcctgaaagtgagcgcattagcatgcggcagtccaaagtggataaactgtacgctggtctgaaagaccttgctgaagagagaagaggcaagctggatgagagacacaggttattccagctcaaccgggaggtggacgacctggagcagtggatcgctgagagggaggtggtcgcagggtcccatgaactgggacaggactatgagcatgtcacgatgttacaagaacgattccgggagtttgcccgagacaccgggaacattgggcaggagcgcgtggacacggtcaatcacctggcagatgagctcatcaactctggacattcagatgccgccaccatcgctgaatggaaggatggcctcaatgaagcctgggccgacctcctggagctcattgacacaagaacacagattcttgccgcttcctatgaactgcacaagttttaccacgatgccaaggagatctttgggcgtatacaggacaaacacaagaaactccctgaggagcttgggagagatcagaacacagtggagaccttacagagaatgcacactacatttgagcatgacatccaggctctgggcacacaggtgaggcagctgcaggaggatgcagcccgcctccaggcggcctatgcgggtgacaaggccgacgatatccagaagcgcgagaacgaggtcctggaagcctggaagtccctcctggacgcctgtgagagccgcagggtgcggctggtggacacaggggacaagttccgcttcttcagcatggtgcgcgacctcatgctctggatggaggatgtcatccggcagatcgaggcccaggagaagccaagggatgtatcatctgttgaactcttaatgaataatcatcaaggcatcaaagctgaaattgatgcacgtaatgacagtttcacaacctgcattgaacttgggaaatccctgttggcgagaaaacactatgcatctgaggagatcaaggaaaaattactgcagttgacggaaaagaggaaagaaatgatcgacaagtgggaagaccgatgggaatggttaagactgattctggaggtccatcagttctcaagagacgccagtgtggccgaggcctggctgcttggacaggagccgtacctatccagccgagagataggccagagcgtggacgaggtggagaagctcatcaagcgccacgaggcatttgaaaagtctgcagcaacctgggatgagaggttctctgccctggaaaggctgactacattggagttactggaagtgcgcagacagcaagaggaagaggagaggaagaggcggccgccttctcccgagccgagcacgaaggtttcagaggaagccgagtcccagcagcagtgggatacttcaaaaggagaacaagtttcccaaaacggtttgccagctgaacagggatctccacggatggcagaaacggtggacacaagcgaaatggtcaacggcgctacagaacaaaggacgagctctaaagagtccagccccatcccctccccgacctctgatcgtaaagccaagactgccctcccagcccagagtgccgccaccttaccagccagaacccaggagacaccttcggcccagatggaaggcttcctcaatcggaaacacgagtgggaggcccacaataagaaagcctcaagcaggtcctggcacaatgtttattgtgtcataaataaccaagaaatgggtttctacaaagatgcaaagactgctgcttctggaattccctaccacagcgaggtccctgtgagtttgaaagaagctgtctgcgaagtggcccttgattacaaaaagaagaaacacgtattcaagctaagactaaatgatggcaatgagtacctcttccaagccaaagacgatgaggaaatgaacacatggatccaggctatctcttccgccatctcctctgataaacacgaggtgtctgccagcacccagagcacgccagcatccagccgcgcgcagaccctccccaccagcgtcgtcaccatcaccagcgagtccagtcccggcaagcgggaaaaggacaaagagaaagacaaagagaagcggttcagcctttttggcaaaaagaaatgaactcctttccttcacctcctgcccttctcttaccttttcagtgaaattccagcatgcaagctcagaaccaacacattactctctgtgcctaatgttcctcaatgtggttgatttttttttttttttaatttatagagcatttcggggggggtgggggaaacacacctaaacactttatctccaagttacaaaagtttgaggtgcagagggaaggccagattttttttttaatgaaattatatagattagatctcagtatttaaactgttcctcaattttgtgaggctgtgttggaaataacccgcctctagtgctgttggtatgcaaggcagcggtgcttaatcaatatttcctgtgctcaccagaggcaaaatgtaccaatatcctgacactttgcatccagagacactttgcatccagagacactttgcatccagagacactttgcatccagagacactttgcatccagag

SEQ ID NO: 357094 - DNA, 8514 bp, Homo sapiens
gtgagctgaagcagggcagggcatcaactcacccaggaagtgcaaggggtttggggattttcctttcctagccaagggaaggcatgacagactgtacctggaaaaacaggacactcttgcccaaatactgcactttttgcacagtcttagcaactggcagaccaggagattctctcctgtgcctgattcattgggtcccacacccatagggccttgcttactgccagtgcagcagtctgagattaacaccccatccccgggagaactctaagaaggagctgatgtggaggagcagctgagacagttcaagatgacgaccacagtagccacagactatgacaacattgagatccagcagcagtacagtgatgtcaacaaccgctgggatgtcgacgactgggacaatgagaacagctctgcgcggctttttgagcggtcccgcatcaaggctctggcagatgagcgtgaagccgtgcagaagaagaccttcaccaagtgggtcaattcccaccttgcccgtgtgtcctgccggatcacagacctgtacactgaccttcgagatggacggatgctcatcaagctgctggaggtcctctctggagagaggctgcctaaacccaccaagggacgaatgcgcatccactgcttagagaatgtggacaaggcccttcagttcctgaaggagcagagagtccatcttgagaacatggggtcccatgacatcgtggatggaaaccaccggctgacccttggcctcatctggaccatcatcctgcgcttccagatccaggatatcagtgtggaaactgaagacaacaaagagaagaaatctgccaaggatgcattgctgttgtggtgccagatgaagacagctgggtaccccaatgtcaacattcacaatttcaccactagctggagggacggcatggccttcaatgcactgatacacaaacaccggcctgacctgatagattttgacaaactaaagaaatctaacgcacactacaacctgcagaatgcatttaatctggcagaacagcacctcggcctcactaaactgttggaccccgaagacatcagcgtggaccatcctgatgagaagtccataatcacttatgtggtgacttattaccactacttctctaagatgaaggccttagctgttgaaggaaaacgaattggaaaggtgcttgacaatgctattgaaacagaaaaaatgattgaaaagtatgaatcacttgcctctgaccttctggaatggattgaacaaaccatcatcattctgaacaatcgcaaatttgccaattcactggtcggggttcaacagcagcttcaggcattcaacacttaccgcactgtggagaaaccacccaaatttactgagaaggggaacttggaagtgctgctcttcaccattcagagcaagatgagggccaacaaccagaaggtctacatgccccgggaggggaagctcatctctgacatcaacaaggcctgggaaagactggaaaaagcggaacacgaaagagaactggctttgcggaatgagctcataagacaggagaaactggaacagctcgcccgcagatttgatcgcaaggcagctatgagggagacttggctgagcgaaaaccagcgtctggtgtctcaggacaactttgggtttgaccttcctgcagttgaggccgccacaaaaaagcacgaggccattgagacagacattgccgcatacgaggagcgtgtgcaggctgtggtagccgtggccagggagctcgaggccgagaattaccacgacatcaagcgcatcacagcgaggaaggacaatgtcatccggctctgggaatacctactggaactgctcagggcccggagacagcggctcgagatgaacctggggctgcagaagatattccaggaaatgctctacattatggactggatggatgaaatgaaggtgctagtattgtctcaagactatggcaaacacttacttggtgtggaagacctgttacagaagcacaccctggttgaagcagacattggcatccaggcagagcgggtgagaggtgtcaatgcctccgcccagaagttcgcaacagacggggaaggttacaagccctgtgacccccaggtgatccgagaccgcgtggcccacatggagttctgttatcaagagctttgccagctggcggctgagcgcagggcccgtctggaagagtcccgccgcctctggaagttcttctgggagatggcagaagaggaaggctggatacgggagaaggagaagatcctgtcctcggacgattacgggaaagacctgaccagcgtcatgcgcctgctcagcaagcaccgggcgttcgaggacgagatgagcggccgcagtggccactttgagcaggccatcaaggaaggcgaagacatgatcgcggaggagcacttcgggtcggagaagatccgtgagaggatcatttacatccgggagcagtgggccaacctagagcagctctcggccattcggaagaagcgcctggaggaggcctccctgctgcaccagttccaggcagatgctgatgacattgatgcctggatgctggacatcctcaagattgtctccagcagcgacgtgggccacgatgagtattccacacagtctctggtcaagaaacacaaggacgtggcggaagagatcgccaattacaggcccacccttgacacgctgcacgaacaagccagcgccctcccccaggagcatgccgagtctccagacgtgaggggcaggctgtcgggcatcgaggagcggtataaggaggtggcagagctgacgcggctgcggaagcaggcactccaggacactctggccctgtacaagatgttcagcgaggctgatgcctgtgagctctggatcgacgagaaggagcagtggctcaacaacatgcagatcccagagaagctggaggatctggaggtcatccagcacagatttgagagcctagaaccagaaatgaacaaccaggcttcccgggttgcagtggtgaaccagattgcacgccagctgatgcacagcggccacccaagtgagaaggaaatcaaagcccagcaggacaaactcaacacaaggtggagccagttcagagaactggttgacaggaagaaggatgccctcctgtctgccctgagcatccagaactaccacctcgagtgcaatgaaaccaaatcctggattcgggaaaagaccaaggtcatcgagtccacccaggacctgggcaatgacctggctggcgtcatggccctgcagcgcaagctgaccggcatggagcgggacttggtggccattgaggcaaagctgagtgacctgcagaaggaggcggagaagctggagtccgagcaccccgaccaggcccaggccatcctgtctcggctggccgagatcagcgacgtgtgggaggagatgaagaccaccctgaaaaaccgagaggcctccctgggagaggccagcaagctgcagcagttcctacgggacttggacgacttccagtcctggctctctaggacccagacagcgatcgcctcggaggacatgccaaacaccctgaccgaggctgagaagctgctcacgcagcacgagaacatcaagaacgagatcgacaactacgaggaggactaccagaagatgagggacatgggcgagatggtcacccaggggcagaccgatgcccagtacatgtttctgcggcagcggctgcaggccctggacactggatggaacgagctccacaagatgtgggagaacagacaaaatctcctatcccagtcacatgcctaccagcagttcctcagagacacgaagcaagccgaagcctttcttaacaaccaggagtatgttctggctcacactgaaatgcctaccaccttggaaggagctgaagcagcaattaaaaagcaagaggacttcatgaccaccatggacgccaatgaggagaagatcaatgctgtggtggagactggccggaggctggtgagcgatgggaacatcaactcagatcgcatccaggagaaggtggactctattgatgacagacataggaagaatcgtgagacagccagtgaacttttgatgaggttgaaggacaacagggatctacagaaattcctgcaagattgtcaagagctgtctctctggatcaatgagaagatgctcacagcccaggacatgtcttacgatgaagccagaaatctgcacagtaaatggttgaagcatcaagcatttatggcagaacttgcatccaacaaagaatggcttgacaaaatcgagaaggaaggaatgcagctcatttcagaaaagcctgagacggaagctgtggtgaaggagaaactcactggtttacataaaatgtgggaagtccttgaatccactacccagacaaaggcccagcggctctttgatgcaaacaaggccgaacttttcacccagagctgtgcagatctagacaaatggctgcacggcctggagagtcagattcagtctgatgactatggcaaagacctgaccagtgtcaatatcctgctgaaaaagcaacagatgctggagaatcagatggaagtgcggaagaaggagatcgaagagctccaaagccaagcccaggccctgagtcaggaagggaagagcaccgacgaggtagacagcaagcgcctcaccgtgcagaccaagttcatggagttgctggagcccttgaacgagaggaagcataacctgctggcctccaaagagatccatcagttcaacagggatgtggaggacgagatcttgtgggttggagagaggatgcctttggcaacttccacggatcatggccacaacctccagactgtgcagctgttaataaagaaaaatcagaccctccagaaagaaatccaggggcaccagcctcgcattgacgacatctttgagaggagccaaaacatcgtcactgacagcagcagcctcagcgctgaggccatcagacagaggcttgccgacctgaagcagctgtggggtctcctcattgaggagacagagaaacgccacaggcggctggaggaggcgcacagggcccagcagtactactttgacgctgctgaggccgaagcctggatgagcgagcaggagctgtacatgatgtcagaggagaaggccaaggatgagcagagtgctgtctccatgttgaagaagcaccagatcttagaacaagctgtggaggactatgcagagaccgtgcatcagctctccaagaccagccgggccctggtggccgacagccatcctgaaagtgagcgcattagcatgcggcagtccaaagtggataaactgtacgctggtctgaaagaccttgctgaagagagaagaggcaagctggatgagagacacaggttattccagctcaaccgggaggtggacgacctggagcagtggatcgctgagagggaggtggtcgcagggtcccatgaactgggacaggactatgagcatgtcacgatgttacaagaacgattccgggagtttgcccgagacaccgggaacattgggcaggagcgcgtggacacggtcaatcacctggcagatgagctcatcaactctggacattcagatgccgccaccatcgctgaatggaaggatggcctcaatgaagcctgggccgacctcctggagctcattgacacaagaacacagattcttgccgcttcctatgaactgcacaagttttaccacgatgccaaggagatctttgggcgtatacaggacaaacacaagaaactccctgaggagcttgggagagatcagaacacagtggagaccttacagagaatgcacactacatttgagcatgacatccaggctctgggcacacaggtgaggcagctgcaggaggatgcagcccgcctccaggcggcctatgcgggtgacaaggccgacgatatccagaagcgcgagaacgaggtcctggaagcctggaagtccctcctggacgcctgtgagagccgcagggtgcggctggtggacacaggggacaagttccgcttcttcagcatggtgcgcgacctcatgctctggatggaggatgtcatccggcagatcgaggcccaggagaagccaagggatgtatcatctgttgaactcttaatgaataatcatcaaggcatcaaagctgaaattgatgcacgtaatgacagtttcacaacctgcattgaacttgggaaatccctgttggcgagaaaacactatgcatctgaggagatcaagggaaaatatacttgggttgacggaaaagaggaaagaaatgatcgacaagtgggaagaccgatgggaatggttaagactgattctggaggtccatcagttctcaagagacgccagtgtggccgaggcctggctgcttggacaggagccgtacctatccagccgagagataggccagagcgtggacgaggtggagaagctcatcaagcgccacgaggcatttgaaaagtctgcagcaacctgggatgagaggttctctgccctggaaaggctgactacattggagttactggaagtgcgcagacagcaagaggaagaggagaggaagaggcggccgccttctcccgagccgagcacgaaggtttcagaggaagccgagtcccagcagcagtgggatacttcaaaaggagaacaagtttcccaaaacggtttgccagctgaacagggatctccacggatggcagaaacggtggacacaagcgaaatggtcaacggcgctacagaacaaaggacgagctctaaagagtccagccccatcccctccccgacctctgatcgtaaagccaagactgccctcccagcccagagtgccgccaccttaccagccagaacccaggagacaccttcggcccagatggaaggcttcctcaatcggaaacacgagtgggaggcccacaataagaaagcctcaagcaggtcctggcacaatgtttattgtgtcataaataaccaagaaatgggtttctacaaagatgcaaagactgctgcttctggaattccctaccacagcgaggtccctgtgagtttgaaagaagctgtctgcgaagtggcccttgattacaaaaagaagaaacacgtattcaagctaagactaaatgatggcaatgagtacctcttccaagccaaagacgatgaggaaatgaacacatggatccaggctatctcttccgccatctcctctgataaacacgaggtgtctgccagcacccagagcacgccagcatccagccgcgcgcagaccctccccaccagcgtcgtcaccatcaccagcgagtccagtcccggcaagcgggaaaaggacaaagagaaagacaaagagaagcggttcagcctttttggcaaaaagaaatgaactcctttccttcacctcctgcccttctcttaccttttcagtgaaattccagcatgcaagctcagaaccaacacattactctctgtgcctaatgttcctcaatgtggttgatttttttttttttttaatttatagagcatttcggggggggtgggggaaacacacctaaacactttatctccaagttacaaaagtttgaggtgcagagggaaggccagattttttttttaatgaaattatatagattagatctcagtatttaaactgttcctcaattttgtgaggctgtgttggaaataacccgcctctagtgctgttggtatgcaaggcagcggtgcttaatcaatatttcctgtgctcaccagaggcaaaatgtaccaatatcctgacaccattctctctccatttacttctggtggttaccctgactcttgactcttagaagtgcccgagatggggctaacctttattaaacagatcgcatattatgatcttgctgcagccacagtgcagctccacattaactctacagaccaaaccatttgtatctggcatcacttactaacacacgacatgcggcttttctgcatcaactgctatgacggttaagaatgtcagtatacaagaaggaatagaaaactgatactgttttaaataatctgtaatttcaattttttttttttttgctgaaatacattatattgtacgtttgagataattctagtacaaagtataataaaactagatgtataataaaccctttaaatcattggtaagtgtacaagtggtggaactgaagcatttactggacaaagtaatgttactctaatggttacttgctcgtgcgttgccacactgtgttataatttgcttcatttccttgctatttgatacatagtgtgcatttctctgtcactgtaactattgtaatgacaaattttcatcttactgcacaatcaaaatgacattgataggaatgaactccagaggctgggcctgaacagggaggtggtcgctcaggcctggtgctcagtcgtacgacctgtacctctcaacttttgccctatctgttaaatatatgctatgtcattaaatgcttttaaatcta

SEQ ID NO: 357095 - DNA, 8600 bp, Homo sapiens
gtgagctgaagcagggcagggcatcaactcacccaggaagtgcaaggggtttggggattttcctttcctagccaagggaaggcatgacagactgtacctggaaaaacaggacactcttgcccaaatactgcactttttgcacagtcttagcaactggcagaccaggagattctctcctgtgcctgattcattgggtcccacacccatagggccttgcttactgccagtgcagcagtctgagattaacaccccatccccgggagaactctaagaaggagctgatgtggaggagcagctgagacagttcaagatgacgaccacagtagccacagactatgacaacattgagatccagcagcagtacagtgatgtcaacaaccgctgggatgtcgacgactgggacaatgagaacagctctgcgcggctttttgagcggtcccgcatcaaggctctggcagatgagcgtgaagccgtgcagaagaagaccttcaccaagtgggtcaattcccaccttgcccgtgtgtcctgccggatcacagacctgtacactgaccttcgagatggacggatgctcatcaagctgctggaggtcctctctggagagaggctgcctaaacccaccaagggacgaatgcgcatccactgcttagagaatgtggacaaggcccttcagttcctgaaggagcagagagtccatcttgagaacatggggtcccatgacatcgtggatggaaaccaccggctgacccttggcctcatctggaccatcatcctgcgcttccagatccaggatatcagtgtggaaactgaagacaacaaagagaagaaatctgccaaggatgcattgctgttgtggtgccagatgaagacagctgggtaccccaatgtcaacattcacaatttcaccactagctggagggacggcatggccttcaatgcactgatacacaaacaccggcctgacctgatagattttgacaaactaaagaaatctaacgcacactacaacctgcagaatgcatttaatctggcagaacagcacctcggcctcactaaactgttggaccccgaagacatcagcgtggaccatcctgatgagaagtccataatcacttatgtggtgacttattaccactacttctctaagatgaaggccttagctgttgaaggaaaacgaattggaaaggtgcttgacaatgctattgaaacagaaaaaatgattgaaaagtatgaatcacttgcctctgaccttctggaatggattgaacaaaccatcatcattctgaacaatcgcaaatttgccaattcactggtcggggttcaacagcagcttcaggcattcaacacttaccgcactgtggagaaaccacccaaatttactgagaaggggaacttggaagtgctgctcttcaccattcagagcaagatgagggccaacaaccagaaggtctacatgccccgggaggggaagctcatctctgacatcaacaaggcctgggaaagactggaaaaagcggaacacgaaagagaactggctttgcggaatgagctcataagacaggagaaactggaacagctcgcccgcagatttgatcgcaaggcagctatgagggagacttggctgagcgaaaaccagcgtctggtgtctcaggacaactttgggtttgaccttcctgcagttgaggccgccacaaaaaagcacgaggccattgagacagacattgccgcatacgaggagcgtgtgcaggctgtggtagccgtggccagggagctcgaggccgagaattaccacgacatcaagcgcatcacagcgaggaaggacaatgtcatccggctctgggaatacctactggaactgctcagggcccggagacagcggctcgagatgaacctggggctgcagaagatattccaggaaatgctctacattatggactggatggatgaaatgaaggtgctagtattgtctcaagactatggcaaacacttacttggtgtggaagacctgttacagaagcacaccctggttgaagcagacattggcatccaggcagagcgggtgagaggtgtcaatgcctccgcccagaagttcgcaacagacggggaaggttacaagccctgtgacccccaggtgatccgagaccgcgtggcccacatggagttctgttatcaagagctttgccagctggcggctgagcgcagggcccgtctggaagagtcccgccgcctctggaagttcttctgggagatggcagaagaggaaggctggatacgggagaaggagaagatcctgtcctcggacgattacgggaaagacctgaccagcgtcatgcgcctgctcagcaagcaccgggcgttcgaggacgagatgagcggccgcagtggccactttgagcaggccatcaaggaaggcgaagacatgatcgcggaggagcacttcgggtcggagaagatccgtgagaggatcatttacatccgggagcagtgggccaacctagagcagctctcggccattcggaagaagcgcctggaggaggcctccctgctgcaccagttccaggcagatgctgatgacattgatgcctggatgctggacatcctcaagattgtctccagcagcgacgtgggccacgatgagtattccacacagtctctggtcaagaaacacaaggacgtggcggaagagatcgccaattacaggcccacccttgacacgctgcacgaacaagccagcgccctcccccaggagcatgccgagtctccagacgtgaggggcaggctgtcgggcatcgaggagcggtataaggaggtggcagagctgacgcggctgcggaagcaggcactccaggacactctggccctgtacaagatgttcagcgaggctgatgcctgtgagctctggatcgacgagaaggagcagtggctcaacaacatgcagatcccagagaagctggaggatctggaggtcatccagcacagatttgagagcctagaaccagaaatgaacaaccaggcttcccgggttgcagtggtgaaccagattgcacgccagctgatgcacagcggccacccaagtgagaaggaaatcaaagcccagcaggacaaactcaacacaaggtggagccagttcagagaactggttgacaggaagaaggatgccctcctgtctgccctgagcatccagaactaccacctcgagtgcaatgaaaccaaatcctggattcgggaaaagaccaaggtcatcgagtccacccaggacctgggcaatgacctggctggcgtcatggccctgcagcgcaagctgaccggcatggagcgggacttggtggccattgaggcaaagctgagtgacctgcagaaggaggcggagaagctggagtccgagcaccccgaccaggcccaggccatcctgtctcggctggccgagatcagcgacgtgtgggaggagatgaagaccaccctgaaaaaccgagaggcctccctgggagaggccagcaagctgcagcagttcctacgggacttggacgacttccagtcctggctctctaggacccagacagcgatcgcctcggaggacatgccaaacaccctgaccgaggctgagaagctgctcacgcagcacgagaacatcaagaacgagatcgacaactacgaggaggactaccagaagatgagggacatgggcgagatggtcacccaggggcagaccgatgcccagtacatgtttctgcggcagcggctgcaggccctggacactggatggaacgagctccacaagatgtgggagaacagacaaaatctcctatcccagtcacatgcctaccagcagttcctcagagacacgaagcaagccgaagcctttcttaacaaccaggagtatgttctggctcacactgaaatgcctaccaccttggaaggagctgaagcagcaattaaaaagcaagaggacttcatgaccaccatggacgccaatgaggagaagatcaatgctgtggtggagactggccggaggctggtgagcgatgggaacatcaactcagatcgcatccaggagaaggtggactctattgatgacagacataggaagaatcgtgagacagccagtgaacttttgatgaggttgaaggacaacagggatctacagaaattcctgcaagattgtcaagagctgtctctctggatcaatgagaagatgctcacagcccaggacatgtcttacgatgaagccagaaatctgcacagtaaatggttgaagcatcaagcatttatggcagaacttgcatccaacaaagaatggcttgacaaaatcgagaaggaaggaatgcagctcatttcagaaaagcctgagacggaagctgtggtgaaggagaaactcactggtttacataaaatgtgggaagtccttgaatccactacccagacaaaggcccagcggctctttgatgcaaacaaggccgaacttttcacccagagctgtgcagatctagacaaatggctgcacggcctggagagtcagattcagtctgatgactatggcaaagacctgaccagtgtcaatatcctgctgaaaaagcaacagatgctggagaatcagatggaagtgcggaagaaggagatcgaagagctccaaagccaagcccaggccctgagtcaggaagggaagagcaccgacgaggtagacagcaagcgcctcaccgtgcagaccaagttcatggagttgctggagcccttgaacgagaggaagcataacctgctggcctccaaagagatccatcagttcaacagggatgtggaggacgagatcttgtgggttggagagaggatgcctttggcaacttccacggatcatggccacaacctccagactgtgcagctgttaataaagaaaaatcagaccctccagaaagaaatccaggggcaccagcctcgcattgacgacatctttgagaggagccaaaacatcgtcactgacagcagcagcctcagcgctgaggccatcagacagaggcttgccgacctgaagcagctgtggggtctcctcattgaggagacagagaaacgccacaggcggctggaggaggcgcacagggcccagcagtactactttgacgctgctgaggccgaagcctggatgagcgagcaggagctgtacatgatgtcagaggagaaggccaaggatgagcagagtgctgtctccatgttgaagaagcaccagatcttagaacaagctgtggaggactatgcagagaccgtgcatcagctctccaagaccagccgggccctggtggccgacagccatcctgaaagtgagcgcattagcatgcggcagtccaaagtggataaactgtacgctggtctgaaagaccttgctgaagagagaagaggcaagctggatgagagacacaggttattccagctcaaccgggaggtggacgacctggagcagtggatcgctgagagggaggtggtcgcagggtcccatgaactgggacaggactatgagcatgtcacgatgttacaagaacgattccgggagtttgcccgagacaccgggaacattgggcaggagcgcgtggacacggtcaatcacctggcagatgagctcatcaactctggacattcagatgccgccaccatcgctgaatggaaggatggcctcaatgaagcctgggccgacctcctggagctcattgacacaagaacacagattcttgccgcttcctatgaactgcacaagttttaccacgatgccaaggagatctttgggcgtatacaggacaaacacaagaaactccctgaggagcttgggagagatcagaacacagtggagaccttacagagaatgcacactacatttgagcatgacatccaggctctgggcacacaggtgaggcagctgcaggaggatgcagcccgcctccaggcggcctatgcgggtgacaaggccgacgatatccagaagcgcgagaacgaggtcctggaagcctggaagtccctcctggacgcctgtgagagccgcagggtgcggctggtggacacaggggacaagttccgcttcttcagcatggtgcgcgacctcatgctctggatggaggatgtcatccggcagatcgaggcccaggagaagccaagggatgtatcatctgttgaactcttaatgaataatcatcaaggcatcaaagctgaaattgatgcacgtaatgacagtttcacaacctgcattgaacttgggaaatccctgttggcgagaaaacactatgcatctgaggagatcaaggaaaaattactgcagttgacggaaaagaggaaagaaatgatcgacaagtgggaagaccgatgggaatggttaagactgattctggaggtccatcagttctcaagagacgccagtgtggccgaggcctggctgcttggacaggagccgtacctatccagccgagagataggccagagcgtggacgaggtggagaagctcatcaagcgccacgaggcatttgaaaagtctgcagcaacctgggatgagaggttctctgccctggaaaggctgactacattggagttactggaagtgcgcagacagcaagaggaagaggagaggaagaggcggccgccttctcccgagccgagcacgaaggtttcagaggaagccgagtcccagcagcagtgggatacttcaaaaggagaacaagtttcccaaaacggtttgccagctgaacagggatctccacggattttacagcgaaacccttacatgagtaattgaaatgaaattaaatgagattacagcataatgaagaagaaaactagaatctaacagatggcagaaacggtggacacaagcgaaatggtcaacggcgctacagaacaaaggacgagctctaaagagtccagccccatcccctccccgacctctgatcgtaaagccaagactgccctcccagcccagagtgccgccaccttaccagccagaacccaggagacaccttcggcccagatggaaggcttcctcaatcggaaacacgagtgggaggcccacaataagaaagcctcaagcaggtcctggcacaatgtttattgtgtcataaataaccaagaaatgggtttctacaaagatgcaaagactgctgcttctggaattccctaccacagcgaggtccctgtgagtttgaaagaagctgtctgcgaagtggcccttgattacaaaaagaagaaacacgtattcaagctaagactaaatgatggcaatgagtacctcttccaagccaaagacgatgaggaaatgaacacatggatccaggctatctcttccgccatctcctctgataaacacgaggtgtctgccagcacccagagcacgccagcatccagccgcgcgcagaccctccccaccagcgtcgtcaccatcaccagcgagtccagtcccggcaagcgggaaaaggacaaagagaaagacaaagagaagcggttcagcctttttggcaaaaagaaatgaactcctttccttcacctcctgcccttctcttaccttttcagtgaaattccagcatgcaagctcagaaccaacacattactctctgtgcctaatgttcctcaatgtggttgatttttttttttttttaatttatagagcatttcggggggggtgggggaaacacacctaaacactttatctccaagttacaaaagtttgaggtgcagagggaaggccagattttttttttaatgaaattatatagattagatctcagtatttaaactgttcctcaattttgtgaggctgtgttggaaataacccgcctctagtgctgttggtatgcaaggcagcggtgcttaatcaatatttcctgtgctcaccagaggcaaaatgtaccaatatcctgacaccattctctctccatttacttctggtggttaccctgactcttgactcttagaagtgcccgagatggggctaacctttattaaacagatcgcatattatgatcttgctgcagccacagtgcagctccacattaactctacagaccaaaccatttgtatctggcatcacttactaacacacgacatgcggcttttctgcatcaactgctatgacggttaagaatgtcagtatacaagaaggaatagaaaactgatactgttttaaataatctgtaatttcaattttttttttttttgctgaaatacattatattgtacgtttgagataattctagtacaaagtataataaaactagatgtataataaaccctttaaatcattggtaagtgtacaagtggtggaactgaagcatttactggacaaagtaatgttactctaatggttacttgctcgtgcgttgccacactgtgttataatttgcttcatttccttgctatttgatacatagtgtgcatttctctgtcactgtaactattgtaatgacaaattttcatcttactgcacaatcaaaatgacattgataggaatgaactccagaggctgggcctgaacagggaggtggtcgctcaggcctggtgctcagtcgtacgacctgtacctctcaacttttgccctatctgttaaatatatgctatgtcattaaatgcttttaaatcta

SEQ ID NO: 357096 - DNA, 8449 bp, Homo sapiens
gtgagctgaagcagggcagggcatcaactcacccaggaagtgcaaggggtttggggattttcctttcctagccaagggaaggcatgacagactgtacctggaaaaacaggacactcttgcccaaatactgcactttttgcacagtcttagcaactggcagaccaggagattctctcctgtgcctgattcattgggtcccacacccatagggccttgcttactgccagtgcagcagtctgagattaacaccccatccccgggagaactctaagaaggagctgatgtggaggagcagctgagacagttcaagatgacgaccacagtagccacagactatgacaacattgagatccagcagcagtacagtgatgtcaacaaccgctgggatgtcgacgactgggacaatgagaacagctctgcgcggctttttgagcggtcccgcatcaaggctctggcagatgagcgtgaagccgtgcagaagaagaccttcaccaagtgggtcaattcccaccttgcccgtgtgtcctgccggatcacagacctgtacactgaccttcgagatggacggatgctcatcaagctgctggaggtcctctctggagagaggctgcctaaacccaccaagggacgaatgcgcatccactgcttagagaatgtggacaaggcccttcagttcctgaaggagcagagagtccatcttgagaacatggggtcccatgacatcgtggatggaaaccaccggctgacccttggcctcatctggaccatcatcctgcgcttccagatccaggatatcagtgtggaaactgaagacaacaaagagaagaaatctgccaaggatgcattgctgttgtggtgccagatgaagacagctgggtaccccaatgtcaacattcacaatttcaccactagctggagggacggcatggccttcaatgcactgatacacaaacaccggcctgacctgatagattttgacaaactaaagaaatctaacgcacactacaacctgcagaatgcatttaatctggcagaacagcacctcggcctcactaaactgttggaccccgaagacatcagcgtggaccatcctgatgagaagtccataatcacttatgtggtgacttattaccactacttctctaagatgaaggccttagctgttgaaggaaaacgaattggaaaggtgcttgacaatgctattgaaacagaaaaaatgattgaaaagtatgaatcacttgcctctgaccttctggaatggattgaacaaaccatcatcattctgaacaatcgcaaatttgccaattcactggtcggggttcaacagcagcttcaggcattcaacacttaccgcactgtggagaaaccacccaaatttactgagaaggggaacttggaagtgctgctcttcaccattcagagcaagatgagggccaacaaccagaaggtctacatgccccgggaggggaagctcatctctgacatcaacaaggcctgggaaagactggaaaaagcggaacacgaaagagaactggctttgcggaatgagctcataagacaggagaaactggaacagctcgcccgcagatttgatcgcaaggcagctatgagggagacttggctgagcgaaaaccagcgtctggtgtctcaggacaactttgggtttgaccttcctgcagttgaggccgccacaaaaaagcacgaggccattgagacagacattgccgcatacgaggagcgtgtgcaggctgtggtagccgtggccagggagctcgaggccgagaattaccacgacatcaagcgcatcacagcgaggaaggacaatgtcatccggctctgggaatacctactggaactgctcagggcccggagacagcggctcgagatgaacctggggctgcagaagatattccaggaaatgctctacattatggactggatggatgaaatgaaggtgctagtattgtctcaagactatggcaaacacttacttggtgtggaagacctgttacagaagcacaccctggttgaagcagacattggcatccaggcagagcgggtgagaggtgtcaatgcctccgcccagaagttcgcaacagacggggaaggttacaagccctgtgacccccaggtgatccgagaccgcgtggcccacatggagttctgttatcaagagctttgccagctggcggctgagcgcagggcccgtctggaagagtcccgccgcctctggaagttcttctgggagatggcagaagaggaaggctggatacgggagaaggagaagatcctgtcctcggacgattacgggaaagacctgaccagcgtcatgcgcctgctcagcaagcaccgggcgttcgaggacgagatgagcggccgcagtggccactttgagcaggccatcaaggaaggcgaagacatgatcgcggaggagcacttcgggtcggagaagatccgtgagaggatcatttacatccgggagcagtgggccaacctagagcagctctcggccattcggaagaagcgcctggaggaggcctccctgctgcaccagttccaggcagatgctgatgacattgatgcctggatgctggacatcctcaagattgtctccagcagcgacgtgggccacgatgagtattccacacagtctctggtcaagaaacacaaggacgtggcggaagagatcgccaattacaggcccacccttgacacgctgcacgaacaagccagcgccctcccccaggagcatgccgagtctccagacgtgaggggcaggctgtcgggcatcgaggagcggtataaggaggtggcagagctgacgcggctgcggaagcaggcactccaggacactctggccctgtacaagatgttcagcgaggctgatgcctgtgagctctggatcgacgagaaggagcagtggctcaacaacatgcagatcccagagaagctggaggatctggaggtcatccagcacagatttgagagcctagaaccagaaatgaacaaccaggcttcccgggttgcagtggtgaaccagattgcacgccagctgatgcacagcggccacccaagtgagaaggaaatcaaagcccagcaggacaaactcaacacaaggtggagccagttcagagaactggttgacaggaagaaggatgccctcctgtctgccctgagcatccagaactaccacctcgagtgcaatgaaaccaaatcctggattcgggaaaagaccaaggtcatcgagtccacccaggacctgggcaatgacctggctggcgtcatggccctgcagcgcaagctgaccggcatggagcgggacttggtggccattgaggcaaagctgagtgacctgcagaaggaggcggagaagctggagtccgagcaccccgaccaggcccaggccatcctgtctcggctggccgagatcagcgacgtgtgggaggagatgaagaccaccctgaaaaaccgagaggcctccctgggagaggccagcaagctgcagcagttcctacgggacttggacgacttccagtcctggctctctaggacccagacagcgatcgcctcggaggacatgccaaacaccctgaccgaggctgagaagctgctcacgcagcacgagaacatcaagaacgagatcgacaactacgaggaggactaccagaagatgagggacatgggcgagatggtcacccaggggcagaccgatgcccagtacatgtttctgcggcagcggctgcaggccctggacactggatggaacgagctccacaagatgtgggagaacagacaaaatctcctatcccagtcacatgcctaccagcagttcctcagagacacgaagcaagccgaagcctttcttaacaaccaggagtatgttctggctcacactgaaatgcctaccaccttggaaggagctgaagcagcaattaaaaagcaagaggacttcatgaccaccatggacgccaatgaggagaagatcaatgctgtggtggagactggccggaggctggtgagcgatgggaacatcaactcagatcgcatccaggagaaggtggactctattgatgacagacataggaagaatcgtgagacagccagtgaacttttgatgaggttgaaggacaacagggatctacagaaattcctgcaagattgtcaagagctgtctctctggatcaatgagaagatgctcacagcccaggacatgtcttacgatgaagccagaaatctgcacagtaaatggttgaagcatcaagcatttatggcagaacttgcatccaacaaagaatggcttgacaaaatcgagaaggaaggaatgcagctcatttcagaaaagcctgagacggaagctgtggtgaaggagaaactcactggtttacataaaatgtgggaagtccttgaatccactacccagacaaaggcccagcggctctttgatgcaaacaaggccgaacttttcacccagagctgtgcagatctagacaaatggctgcacggcctggagagtcagattcagtctgatgactatggcaaagacctgaccagtgtcaatatcctgctgaaaaagcaacagatgctggagaatcagatggaagtgcggaagaaggagatcgaagagctccaaagccaagcccaggccctgagtcaggaagggaagagcaccgacgaggtagacagcaagcgcctcaccgtgcagaccaagttcatggagttgctggagcccttgaacgagaggaagcataacctgctggcctccaaagagatccatcagttcaacagggatgtggaggacgagatcttgtgggttggagagaggatgcctttggcaacttccacggatcatggccacaacctccagactgtgcagctgttaataaagaaaaatcagaccctccagaaagaaatccaggggcaccagcctcgcattgacgacatctttgagaggagccaaaacatcgtcactgacagcagcagcctcagcgctgaggccatcagacagaggcttgccgacctgaagcagctgtggggtctcctcattgaggagacagagaaacgccacaggcggctggaggaggcgcacagggcccagcagtactactttgacgctgctgaggccgaagcctggatgagcgagcaggagctgtacatgatgtcagaggagaaggccaaggatgagcagagtgctgtctccatgttgaagaagcaccagatcttagaacaagctgtggaggactatgcagagaccgtgcatcagctctccaagaccagccgggccctggtggccgacagccatcctgaaagtgagcgcattagcatgcggcagtccaaagtggataaactgtacgctggtctgaaagaccttgctgaagagagaagaggcaagctggatgagagacacaggttattccagctcaaccgggaggtggacgacctggagcagtggatcgctgagagggaggtggtcgcagggtcccatgaactgggacaggactatgagcatgtcacgatgttacaagaacgattccgggagtttgcccgagacaccgggaacattgggcaggagcgcgtggacacggtcaatcacctggcagatgagctcatcaactctggacattcagatgccgccaccatcgctgaatggaaggatggcctcaatgaagcctgggccgacctcctggagctcattgacacaagaacacagattcttgccgcttcctatgaactgcacaagttttaccacgatgccaaggagatctttgggcgtatacaggacaaacacaagaaactccctgaggagcttgggagagatcagaacacagtggagaccttacagagaatgcacactacatttgagcatgacatccaggctctgggcacacaggtgaggcagctgcaggaggatgcagcccgcctccaggcggcctatgcgggtgacaaggccgacgatatccagaagcgcgagaacgaggtcctggaagcctggaagtccctcctggacgcctgtgagagccgcagggtgcggctggtggacacaggggacaagttccgcttcttcagcatggtgcgcgacctcatgctctggatggaggatgtcatccggcagatcgaggcccaggagaagccaagggatgtatcatctgttgaactcttaatgaataatcatcaaggcatcaaagctgaaattgatgcacgtaatgacagtttcacaacctgcattgaacttgggaaatccctgttggcgagaaaacactatgcatctgaggagatcaaggaaaaattactgcagttgacggaaaagaggaaagaaatgatcgacaagtgggaagaccgatgggaatggttaagactgattctggaggtccatcagttctcaagagacgccagtgtggccgaggcctggctgcttggacaggagccgtacctatccagccgagagataggccagagcgtggacgaggtggagaagctcatcaagcgccacgaggcatttgaaaagtctgcagcaacctgggatgagaggttctctgccctggaaaggctgactacattggagttactggaagtgcgcagacagcaagaggaagaggagaggaagaggcggccgccttctcccgagccgagcacgaaggtttcagaggaagccgagtcccagcagcagtgggatacttcaaaaggagaacaagtttcccaaaacggtttgccagctgaacagggatctccacggatggcagaaacggtggacacaagcgaaatggtcaacggcgctacagaacaaaggacgagctctaaagagtccagccccatcccctccccgacctctgatcgtaaagccaagactgccctcccagcccagagtgccgccaccttaccagccagaacccaggagacaccttcggcccagatggaaggcttcctcaatcggaaacacgagtgggaggcccacaataagaaagcctcaagcaggtcctggcacaatgtttattgtgtcataaataaccaagaaatgggtttctacaaagatgcaaagactgctgcttctggaattccctaccacagcgaggtccctgtgagtttgaaagaagctgtctgcgaagtggcccttgattaaagacgatgaggaaatgaacacatggatccaggctatctcttccgccatctcctctgataaacacgaggtgtctgccagcacccagagcacgcccagcattcaggcgggcgcagacccttcccaccagcgtcgtcaccatcaccagcgagtccagtcccggcaagcgggaaaaggacaaagagaaagacaaagagaagcggttcagcctttttggcaaaaagaaatgaactcctttccttcacctcctgcccttctcttaccttttcagtgaaattccagcatgcaagctcagaaccaacacattactctctgtgcctaatgttcctcaatgtggttgatttttttttttttttaatttatagagcatttcggggggggtgggggaaacacacctaaacactttatctccaagttacaaaagtttgaggtgcagagggaaggccagattttttttttaatgaaattatatagattagatctcagtatttaaactgttcctcaattttgtgaggctgtgttggaaataacccgcctctagtgctgttggtatgcaaggcagcggtgcttaatcaatatttcctgtgctcaccagaggcaaaatgtaccaatatcctgacaccattctctctccatttacttctggtggttaccctgactcttgactcttagaagtgcccgagatggggctaacctttattaaacagatcgcatattatgatcttgctgcagccacagtgcagctccacattaactctacagaccaaaccatttgtatctggcatcacttactaacacacgacatgcggcttttctgcatcaactgctatgacggttaagaatgtcagtatacaagaaggaatagaaaactgatactgttttaaataatctgtaatttcaattttttttttttttgctgaaatacattatattgtacgtttgagataattctagtacaaagtataataaaactagatgtataataaaccctttaaatcattggtaagtgtacaagtggtggaactgaagcatttactggacaaagtaatgttactctaatggttacttgctcgtgcgttgccacactgtgttataatttgcttcatttccttgctatttgatacatagtgtgcatttctctgtcactgtaactattgtaatgacaaattttcatcttactgcacaatcaaaatgacattgataggaatgaactccagaggctgggcctgaacagggaggtggtcgctcaggcctggtgctcagtcgtacgacctgtacctctcaacttttgccctatctgttaaatatatgctatgtcattaaatgcttttaaatcta

SEQ ID NO: 357097 - DNA, 7526 bp, Homo sapiens
gtgagctgaagcagggcagggcatcaactcacccaggaagtgcaaggggtttggggattttcctttcctagccaagggaaggcatgacagactgtacctggaaaaacaggacactcttgcccaaatactgcactttttgcacagtcttagcaactggcagaccaggagattctctcctgtgcctgattcattgggtcccacacccatagggccttgcttactgccagtgcagcagtctgagattaacaccccatccccgggagaactctaagaaggagctgatgtggaggagcagctgagacagttcaagatgacgaccacagtagccacagactatgacaacattgagatccagcagcagtacagtgatgtcaacaaccgctgggatgtcgacgactgggacaatgagaacagctctgcgcggctttttgagcggtcccgcatcaaggctctggcagatgagcgtgaagccgtgcagaagaagaccttcaccaagtgggtcaattcccaccttgcccgtgtgtcctgccggatcacagacctgtacactgaccttcgagatggacggatgctcatcaagctgctggaggtcctctctggagagaggctgcctaaacccaccaagggacgaatgcgcatccactgcttagagaatgtggacaaggcccttcagttcctgaaggagcagagagtccatcttgagaacatggggtcccatgacatcgtggatggaaaccaccggctgacccttggcctcatctggaccatcatcctgcgcttccagatccaggatatcagtgtggaaactgaagacaacaaagagaagaaatctgccaaggatgcattgctgttgtggtgccagatgaagacagctgggtaccccaatgtcaacattcacaatttcaccactagctggagggacggcatggccttcaatgcactgatacacaaacaccggcctgacctgatagattttgacaaactaaagaaatctaacgcacactacaacctgcagaatgcatttaatctggcagaacagcacctcggcctcactaaactgttggaccccgaagacatcagcgtggaccatcctgatgagaagtccataatcacttatgtggtgacttattaccactacttctctaagatgaaggccttagctgttgaaggaaaacgaattggaaaggtgcttgacaatgctattgaaacagaaaaaatgattgaaaagtatgaatcacttgcctctgaccttctggaatggattgaacaaaccatcatcattctgaacaatcgcaaatttgccaattcactggtcggggttcaacagcagcttcaggcattcaacacttaccgcactgtggagaaaccacccaaatttactgagaaggggaacttggaagtgctgctcttcaccattcagagcaagatgagggccaacaaccagaaggtctacatgccccgggaggggaagctcatctctgacatcaacaaggcctgggaaagactggaaaaagcggaacacgaaagagaactggctttgcggaatgagctcataagacaggagaaactggaacagctcgcccgcagatttgatcgcaaggcagctatgagggagacttggctgagcgaaaaccagcgtctggtgtctcaggacaactttgggtttgaccttcctgcagttgaggccgccacaaaaaagcacgaggccattgagacagacattgccgcatacgaggagcgtgtgcaggctgtggtagccgtggccagggagctcgaggccgagaattaccacgacatcaagcgcatcacagcgaggaaggacaatgtcatccggctctgggaatacctactggaactgctcagggcccggagacagcggctcgagatgaacctggggctgcagaagatattccaggaaatgctctacattatggactggatggatgaaatgaaggtgctagtattgtctcaagactatggcaaacacttacttggtgtggaagacctgttacagaagcacaccctggttgaagcagacattggcatccaggcagagcgggtgagaggtgtcaatgcctccgcccagaagttcgcaacagacggggaaggttacaagccctgtgacccccaggtgatccgagaccgcgtggcccacatggagttctgttatcaagagctttgccagctggcggctgagcgcagggcccgtctggaagagtcccgccgcctctggaagttcttctgggagatggcagaagaggaaggctggatacgggagaaggagaagatcctgtcctcggacgattacgggaaagacctgaccagcgtcatgcgcctgctcagcaagcaccgggcgttcgaggacgagatgagcggccgcagtggccactttgagcaggccatcaaggaaggcgaagacatgatcgcggaggagcacttcgggtcggagaagatccgtgagaggatcatttacatccgggagcagtgggccaacctagagcagctctcggccattcggaagaagcgcctggaggaggcctccctgctgcaccagttccaggcagatgctgatgacattgatgcctggatgctggacatcctcaagattgtctccagcagcgacgtgggccacgatgagtattccacacagtctctggtcaagaaacacaaggacgtggcggaagagatcgccaattacaggcccacccttgacacgctgcacgaacaagccagcgccctcccccaggagcatgccgagtctccagacgtgaggggcaggctgtcgggcatcgaggagcggtataaggaggtggcagagctgacgcggctgcggaagcaggcactccaggacactctggccctgtacaagatgttcagcgaggctgatgcctgtgagctctggatcgacgagaaggagcagtggctcaacaacatgcagatcccagagaagctggaggatctggaggtcatccagcacagatttgagagcctagaaccagaaatgaacaaccaggcttcccgggttgcagtggtgaaccagattgcacgccagctgatgcacagcggccacccaagtgagaaggaaatcaaagcccagcaggacaaactcaacacaaggtggagccagttcagagaactggttgacaggaagaaggatgccctcctgtctgccctgagcatccagaactaccacctcgagtgcaatgaaaccaaatcctggattcgggaaaagaccaaggtcatcgagtccacccaggacctgggcaatgacctggctggcgtcatggccctgcagcgcaagctgaccggcatggagcgggacttggtggccattgaggcaaagctgagtgacctgcagaaggaggcggagaagctggagtccgagcaccccgaccaggcccaggccatcctgtctcggctggccgagatcagcgacgtgtgggaggagatgaagaccaccctgaaaaaccgagaggcctccctgggagaggccagcaagctgcagcagttcctacgggacttggacgacttccagtcctggctctctaggacccagacagcgatcgcctcggaggacatgccaaacaccctgaccgaggctgagaagctgctcacgcagcacgagaacatcaagaacgagatcgacaactacgaggaggactaccagaagatgagggacatgggcgagatggtcacccaggggcagaccgatgcccagtacatgtttctgcggcagcggctgcaggccctggacactggatggaacgagctccacaagatgtgggagaacagacaaaatctcctatcccagtcacatgcctaccagcagttcctcagagacacgaagcaagccgaagcctttcttaacaaccaggagtatgttctggctcacactgaaatgcctaccaccttggaaggagctgaagcagcaattaaaaagcaagaggacttcatgaccaccatggacgccaatgaggagaagatcaatgctgtggtggagactggccggaggctggtgagcgatgggaacatcaactcagatcgcatccaggagaaggtggactctattgatgacagacataggaagaatcgtgagacagccagtgaacttttgatgaggttgaaggacaacagggatctacagaaattcctgcaagattgtcaagagctgtctctctggatcaatgagaagatgctcacagcccaggacatgtcttacgatgaagccagaaatctgcacagtaaatggttgaagcatcaagcatttatggcagaacttgcatccaacaaagaatggcttgacaaaatcgagaaggaaggaatgcagctcatttcagaaaagcctgagacggaagctgtggtgaaggagaaactcactggtttacataaaatgtgggaagtccttgaatccactacccagacaaaggcccagcggctctttgatgcaaacaaggccgaacttttcacccagagctgtgcagatctagacaaatggctgcacggcctggagagtcagattcagtctgatgactatggcaaagacctgaccagtgtcaatatcctgctgaaaaagcaacagatgctggagaatcagatggaagtgcggaagaaggagatcgaagagctccaaagccaagcccaggccctgagtcaggaagggaagagcaccgacgaggtagacagcaagcgcctcaccgtgcagaccaagttcatggagttgctggagcccttgaacgagaggaagcataacctgctggcctccaaagagatccatcagttcaacagggatgtggaggacgagatcttgtgggttggagagaggatgcctttggcaacttccacggatcatggccacaacctccagactgtgcagctgttaataaagaaaaatcagaccctccagaaagaaatccaggggcaccagcctcgcattgacgacatctttgagaggagccaaaacatcgtcactgacagcagcagcctcagcgctgaggccatcagacagaggcttgccgacctgaagcagctgtggggtctcctcattgaggagacagagaaacgccacaggcggctggaggaggcgcacagggcccagcagtactactttgacgctgctgaggccgaagcctggatgagcgagcaggagctgtacatgatgtcagaggagaaggccaaggatgagcagagtgctgtctccatgttgaagaagcaccagatcttagaacaagctgtggaggactatgcagagaccgtgcatcagctctccaagaccagccgggccctggtggccgacagccatcctgaaagtgagcgcattagcatgcggcagtccaaagtggataaactgtacgctggtctgaaagaccttgctgaagagagaagaggcaagctggatgagagacacaggttattccagctcaaccgggaggtggacgacctggagcagtggatcgctgagagggaggtggtcgcagggtcccatgaactgggacaggactatgagcatgtcacgatgttacaagaacgattccgggagtttgcccgagacaccgggaacattgggcaggagcgcgtggacacggtcaatcacctggcagatgagctcatcaactctggacattcagatgccgccaccatcgctgaatggaaggatggcctcaatgaagcctgggccgacctcctggagctcattgacacaagaacacagattcttgccgcttcctatgaactgcacaagttttaccacgatgccaaggagatctttgggcgtatacaggacaaacacaagaaactccctgaggagcttgggagagatcagaacacagtggagaccttacagagaatgcacactacatttgagcatgacatccaggctctgggcacacaggtgaggcagctgcaggaggatgcagcccgcctccaggcggcctatgcgggtgacaaggccgacgatatccagaagcgcgagaacgaggtcctggaagcctggaagtccctcctggacgcctgtgagagccgcagggtgcggctggtggacacaggggacaagttccgcttcttcagcatggtgcgcgacctcatgctctggatggaggatgtcatccggcagatcgaggcccaggagaagccaagggatgtatcatctgttgaactcttaatgaataatcatcaaggcatcaaagctgaaattgatgcacgtaatgacagtttcacaacctgcattgaacttgggaaatccctgttggcgagaaaacactatgcatctgaggagatcaaggaaaaattactgcagttgacggaaaagaggaaagaaatgatcgacaagtgggaagaccgatgggaatggttaagactgattctggaggtccatcagttctcaagagacgccagtgtggccgaggcctggctgcttggacaggagccgtacctatccagccgagagataggccagagcgtggacgaggtggagaagctcatcaagcgccacgaggcatttgaaaagtctgcagcaacctgggatgagaggttctctgccctggaaaggctgactacattggagttactggaagtgcgcagacagcaagaggaagaggagaggaagaggcggccgccttctcccgagccgagcacgaaggtttcagaggaagccgagtcccagcagcagtgggatacttcaaaaggagaacaagtttcccaaaacggtttgccagctgaacagggatctccacggatggcagaaacggtggacacaagcgaaatggtcaacggcgctacagaacaaaggacgagctctaaagagtccagccccatcccctccccgacctctgatcgtaaagccaagactgccctcccagcccagagtgccgccaccttaccagccagaacccaggagacaccttcggcccagatggaaggcttcctcaatcggaaacacgagtgggaggcccacaataagaaagcctcaagcaggtcctggcacaatgtttattgtgtcataaataaccaagaaatgggtttctacaaagatgcaaagactgctgcttctggaattccctaccacagcgaggtccctgtgagtttgaaagaagctgtctgcgaagtggcccttgattacaaaaagaagaaacacgtattcaagctaagactaaatgatggcaatgagtacctcttccaagccaaagacgatgaggaaatgaacacatggatccaggctatctcttccgccatctcctctgataaacacgaggtgtctgccagcacccagagcacgccagcatccagccgcgcgcagaccctccccaccagcgtcgtcaccatcaccagcgagtccagtcccggcaagcgggaaaaggacaaagagaaagacaaagagaagcggttcagcctttttggcaaaaagaaatgaactcctttccttcacctcctgcccttctcttaccttttcagtgaaattccagcatgcaagctcagaaccaacacattactctctgtgcctaatgttcgcgggtcctctagagtaaccgcag

SEQ ID NO: 357098 - DNA, 9114 bp, Homo sapiens
gtgagctgaagcagggcagggcatcaactcacccaggaagtgcaaggggtttggggattttcctttcctagccaagggaaggcatgacagactgtacctggaaaaacaggacactcttgcccaaatactgcactttttgcacagtcttagcaactggcagaccaggagattctctcctgtgcctgattcattgggtcccacacccatagggccttgcttactgccagtgcagcagtctgagattaacaccccatccccgggagaactctaagaaggagctgatgtggaggagcagctgagacagttcaagatgacgaccacagtagccacagactatgacaacattgagatccagcagcagtacagtgatgtcaacaaccgctgggatgtcgacgactgggacaatgagaacagctctgcgcggctttttgagcggtcccgcatcaaggctctggcagatgagcgtgaagccgtgcagaagaagaccttcaccaagtgggtcaattcccaccttgcccgtgtgtcctgccggatcacagacctgtacactgaccttcgagatggacggatgctcatcaagctgctggaggtcctctctggagagaggctgcctaaacccaccaagggacgaatgcgcatccactgcttagagaatgtggacaaggcccttcagttcctgaaggagcagagagtccatcttgagaacatggggtcccatgacatcgtggatggaaaccaccggctgacccttggcctcatctggaccatcatcctgcgcttccagatccaggatatcagtgtggaaactgaagacaacaaagagaagaaatctgccaaggatgcattgctgttgtggtgccagatgaagacagctgggtaccccaatgtcaacattcacaatttcaccactagctggagggacggcatggccttcaatgcactgatacacaaacaccggcctgacctgatagattttgacaaactaaagaaatctaacgcacactacaacctgcagaatgcatttaatctggcagaacagcacctcggcctcactaaactgttggaccccgaagacatcagcgtggaccatcctgatgagaagtccataatcacttatgtggtgacttattaccactacttctctaagatgaaggccttagctgttgaaggaaaacgaattggaaaggtgcttgacaatgctattgaaacagaaaaaatgattgaaaagtatgaatcacttgcctctgaccttctggaatggattgaacaaaccatcatcattctgaacaatcgcaaatttgccaattcactggtcggggttcaacagcagcttcaggcattcaacacttaccgcactgtggagaaaccacccaaatttactgagaaggggaacttggaagtgctgctcttcaccattcagagcaagatgagggccaacaaccagaaggtctacatgccccgggaggggaagctcatctctgacatcaacaaggcctgggaaagactggaaaaagcggaacacgaaagagaactggctttgcggaatgagctcataagacaggagaaactggaacagctcgcccgcagatttgatcgcaaggcagctatgagggagacttggctgagcgaaaaccagcgtctggtgtctcaggacaactttgggtttgaccttcctgcagttgaggccgccacaaaaaagcacgaggccattgagacagacattgccgcatacgaggagcgtgtgcaggctgtggtagccgtggccagggagctcgaggccgagaattaccacgacatcaagcgcatcacagcgaggaaggacaatgtcatccggctctgggaatacctactggaactgctcagggcccggagacagcggctcgagatgaacctggggctgcagaagatattccaggaaatgctctacattatggactggatggatgaaatgaaggtgctagtattgtctcaagactatggcaaacacttacttggtgtggaagacctgttacagaagcacaccctggttgaagcagacattggcatccaggcagagcgggtgagaggtgtcaatgcctccgcccagaagttcgcaacagacggggaaggttacaagccctgtgacccccaggtgatccgagaccgcgtggcccacatggagttctgttatcaagagctttgccagctggcggctgagcgcagggcccgtctggaagagtcccgccgcctctggaagttcttctgggagatggcagaagaggaaggctggatacgggagaaggagaagatcctgtcctcggacgattacgggaaagacctgaccagcgtcatgcgcctgctcagcaagcaccgggcgttcgaggacgagatgagcggccgcagtggccactttgagcaggccatcaaggaaggcgaagacatgatcgcggaggagcacttcgggtcggagaagatccgtgagaggatcatttacatccgggagcagtgggccaacctagagcagctctcggccattcggaagaagcgcctggaggaggcctccctgctgcaccagttccaggcagatgctgatgacattgatgcctggatgctggacatcctcaagattgtctccagcagcgacgtgggccacgatgagtattccacacagtctctggtcaagaaacacaaggacgtggcggaagagatcgccaattacaggcccacccttgacacgctgcacgaacaagccagcgccctcccccaggagcatgccgagtctccagacgtgaggggcaggctgtcgggcatcgaggagcggtataaggaggtggcagagctgacgcggctgcggaagcaggcactccaggacactctggccctgtacaagatgttcagcgaggctgatgcctgtgagctctggatcgacgagaaggagcagtggctcaacaacatgcagatcccagagaagctggaggatctggaggtcatccagcacagatttgagagcctagaaccagaaatgaacaaccaggcttcccgggttgcagtggtgaaccagattgcacgccagctgatgcacagcggccacccaagtgagaaggaaatcaaagcccagcaggacaaactcaacacaaggtggagccagttcagagaactggttgacaggaagaaggatgccctcctgtctgccctgagcatccagaactaccacctcgagtgcaatgaaaccaaatcctggattcgggaaaagaccaaggtcatcgagtccacccaggacctgggcaatgacctggctggcgtcatggccctgcagcgcaagctgaccggcatggagcgggacttggtggccattgaggcaaagctgagtgacctgcagaaggaggcggagaagctggagtccgagcaccccgaccaggcccaggccatcctgtctcggctggccgagatcagcgacgtgtgggaggagatgaagaccaccctgaaaaaccgagaggcctccctgggagaggccagcaagctgcagcagttcctacgggacttggacgacttccagtcctggctctctaggacccagacagcgatcgcctcggaggacatgccaaacaccctgaccgaggctgagaagctgctcacgcagcacgagaacatcaagaacgagatcgacaactacgaggaggactaccagaagatgagggacatgggcgagatggtcacccaggggcagaccgatgcccagtacatgtttctgcggcagcggctgcaggccctggacactggatggaacgagctccacaagatgtgggagaacagacaaaatctcctatcccagtcacatgcctaccagcagttcctcagagacacgaagcaagccgaagcctttcttaacaaccaggagtatgttctggctcacactgaaatgcctaccaccttggaaggagctgaagcagcaattaaaaagcaagaggacttcatgaccaccatggacgccaatgaggagaagatcaatgctgtggtggagactggccggaggctggtgagcgatgggaacatcaactcagatcgcatccaggagaaggtggactctattgatgacagacataggaagaatcgtgagacagccagtgaacttttgatgaggttgaaggacaacagggatctacagaaattcctgcaagattgtcaagagctgtctctctggatcaatgagaagatgctcacagcccaggacatgtcttacgatgaagccagaaatctgcacagtaaatggttgaagcatcaagcatttatggcagaacttgcatccaacaaagaatggcttgacaaaatcgagaaggaaggaatgcagctcatttcagaaaagcctgagacggaagctgtggtgaaggagaaactcactggtttacataaaatgtgggaagtccttgaatccactacccagacaaaggcccagcggctctttgatgcaaacaaggccgaacttttcacccagagctgtgcagatctagacaaatggctgcacggcctggagagtcagattcagtctgatgactatggcaaagacctgaccagtgtcaatatcctgctgaaaaagcaacagatgctggagaatcagatggaagtgcggaagaaggagatcgaagagctccaaagccaagcccaggccctgagtcaggaagggaagagcaccgacgaggtagacagcaagcgcctcaccgtgcagaccaagttcatggagttgctggagcccttgaacgagaggaagcataacctgctggcctccaaagagatccatcagttcaacagggatgtggaggacgagatcttgtgggttggagagaggatgcctttggcaacttccacggatcatggccacaacctccagactgtgcagctgttaataaagaaaaatcagaccctccagaaagaaatccaggggcaccagcctcgcattgacgacatctttgagaggagccaaaacatcgtcactgacagcagcagcctcagcgctgaggccatcagacagaggcttgccgacctgaagcagctgtggggtctcctcattgaggagacagagaaacgccacaggcggctggaggaggcgcacagggcccagcagtactactttgacgctgctgaggccgaagcctggatgagcgagcaggagctgtacatgatgtcagaggagaaggccaaggatgagcagagtgctgtctccatgttgaagaagcaccagatcttagaacaagctgtggaggactatgcagagaccgtgcatcagctctccaagaccagccgggccctggtggccgacagccatcctgaaagtgagcgcattagcatgcggcagtccaaagtggataaactgtacgctggtctgaaagaccttgctgaagagagaagaggcaagctggatgagagacacaggttattccagctcaaccgggaggtggacgacctggagcagtggatcgctgagagggaggtggtcgcagggtcccatgaactgggacaggactatgagcatgtcacgatgttacaagaacgattccgggagtttgcccgagacaccgggaacattgggcaggagcgcgtggacacggtcaatcacctggcagatgagctcatcaactctggacattcagatgccgccaccatcgctgaatggaaggatggcctcaatgaagcctgggccgacctcctggagctcattgacacaagaacacagattcttgccgcttcctatgaactgcacaagttttaccacgatgccaaggagatctttgggcgtatacaggacaaacacaagaaactccctgaggagcttgggagagatcagaacacagtggagaccttacagagaatgcacactacatttgagcatgacatccaggctctgggcacacaggtgaggcagctgcaggaggatgcagcccgcctccaggcggcctatgcgggtgacaaggccgacgatatccagaagcgcgagaacgaggtcctggaagcctggaagtccctcctggacgcctgtgagagccgcagggtgcggctggtggacacaggggacaagttccgcttcttcagcatggtgcgcgacctcatgctctggatggaggatgtcatccggcagatcgaggcccaggagaagccaagggatgtatcatctgttgaactcttaatgaataatcatcaaggcatcaaagctgaaattgatgcacgtaatgacagtttcacaacctgcattgaacttgggaaatccctgttggcgagaaaacactatgcatctgaggagatcaaggaaaaattactgcagttgacggaaaagaggaaagaaatgatcgacaagtgggaagaccgatgggaatggttaagactgattctggaggtccatcagttctcaagagacgccagtgtggccgaggcctggctgcttggacaggagccgtacctatccagccgagagataggccagagcgtggacgaggtggagaagctcatcaagcgccacgaggcatttgaaaagtctgcagcaacctgggatgagaggttctctgccctggaaaggctgactacattggagttactggaagtgcgcagacagcaagaggaagaggagaggaagaggcggccgccttctcccgagccgagcacgaaggtttcagaggaagccgagtcccagcagcagtgggatacttcaaaaggagaacaagtttcccaaaacggtttgccagctgaacagggatctccacgggttagttaccgctctcaaacctaccaaaactacaaaaactttaatagcagacggacagccagtgaccagccatggtctggactgtgaagttcactaccatttgtcaagaatcaccctttccaaatcctctgggttttgactttttggcttccacttcacccaaaatgttaaaatttttacttaattcatagccttccttggtttcatatttgtttgcatttaattcatgtttgagtctcttaactgatggatgcccacttgccttaaagcagcatacttattttttgtttatttattgtgagctttttactttattaagattttacagcgaaacccttacatgagtaattgaaatgaaattaaatgagattacagcataatgaagaagaaaactagaatctaacaggtatgacacattcagttattctaacagggcacagtactgtgctatatgtagccgcctttacagatgttattaacctatagtagtttactattaactaggaagactggtgtatgaggagggagacattctgtaataagattaaaacctaaagtcagctgtgtaacattccatgaaagatgcattcatttattgaagatgacaaaaaagggagtcagatatattctggaagctattttaattttaggcacacaatctcatacattttgagacccttgggtcatttattactttttacaaactagttcctctctttttttctgccaagtcctgaattgaaaactgtaggcttccttgcacagatgttgcagccagcctcaggagtaaagtgcccgctgactgctgccgccacctctgtctcgctccctgtcagtgctgctggcacgtgggacgcggcaggtgacagccgttctcagcatgttttagaagcttgcctcacagacttccatgcctctccattcagccgatgacttcagggtgtcaaactgttttaatttttcaaacaaatggaacagaagccattgtggttcatcctgattacttgaacgttgcacttggtggaccgtgcctgggagcgctcgcatgccccctggcttcagaagtcatgtcagtgtctctgtagacaaactccactgtacatcttggattaatcttctgattcattgttcattttctcaagactttttgtggaattctctgataaaggaagcttttaggatggtatctatcaggccaccagcaggaattgaaaatgttttcacaaaaatccttttccttagaaataaaagctggtgacagagatggtttccttgtaccgataaaaacaaaaccaaatccatattatacatcaaaaccttgtgagacattcacttgctcttttgccatatttagatgtgttagtggaatcagaaacctgttttgatatgtgttctccatgagttaagtctgatttgtctttttatttcatgatgcatgtcttttttttcttttgtcaggataacgtcatatagcatcttgtttgtttttccttatctctatgtacatatctatctacttctgactgtagatgggtatatagatagatgccaagcttcttatgttctgggggtagtatgcatcattattgggtctctgccttaaaacacatcaaaattcattttagacaaaaaaacttctgccttgtctttggtcattagggagctctaatgtgtgtttgtggctccaagttacattttgtgtttcattgatctatatgtatatatgtgatgttttcatatatatatgtgtgtgtgtttaaattttgtatcatcaggactgacacccaatttgacactttttgtatctagaagaccctccaaaaaaggaaccacataagcacacaagaaaagagtgctatgatgttcttagcatttgctatcatgcctatttttatctagatttttaaatgtagcttgtcataacaaaattttaattacaattggcttgtatgagaagaaaaagtatttttattgttttgagtgatgacgcagagactcaatgaacttgaaaatagcattgcttcgtgcactttgaataccaatcaggtgttttctgtgctactagttgtcacgttgcattcatgttcacctcctgatttaagtatctcgggtgtgcccagccactaaagcactctggactaatcgctaaagagaagcaacgtggggggtggggttgcgagggatgtgttcacatgtacccatcatttgatcatagcactgtgattgcttttgatgtgtgtctctagtggtgtgttgtctgttggcatgcttaaagcacatgtccattaaaattcattttgttccttttattttccttgttttcttggttagtgattcatttgcataaacattaatgatctctgcatactggtttggggttttct

SEQ ID NO: 357099 - DNA, 7364 bp, Homo sapiens
gtgagctgaagcagggcagggcatcaactcacccaggaagtgcaaggggtttggggattttcctttcctagccaagggaaggcatgacagactgtacctggaaaaacaggacactcttgcccaaatactgcactttttgcacagtcttagcaactggcagaccaggagattctctcctgtgcctgattcattgggtcccacacccatagggccttgcttactgccagtgcagcagtctgagattaacaccccatccccgggagaactctaagaaggagctgatgtggaggagcagctgagacagttcaagatgacgaccacagtagccacagactatgacaacattgagatccagcagcagtacagtgatgtcaacaaccgctgggatgtcgacgactgggacaatgagaacagctctgcgcggctttttgagcggtcccgcatcaaggctctggcagatgagcgtgaagccgtgcagaagaagaccttcaccaagtgggtcaattcccaccttgcccgtgtgtcctgccggatcacagacctgtacactgaccttcgagatggacggatgctcatcaagctgctggaggtcctctctggagagaggctgcctaaacccaccaagggacgaatgcgcatccactgcttagagaatgtggacaaggcccttcagttcctgaaggagcagagagtccatcttgagaacatggggtcccatgacatcgtggatggaaaccaccggctgacccttggcctcatctggaccatcatcctgcgcttccagatccaggatatcagtgtggaaactgaagacaacaaagagaagaaatctgccaaggatgcattgctgttgtggtgccagatgaagacagctgggtaccccaatgtcaacattcacaatttcaccactagctggagggacggcatggccttcaatgcactgatacacaaacaccggcctgacctgatagattttgacaaactaaagaaatctaacgcacactacaacctgcagaatgcatttaatctggcagaacagcacctcggcctcactaaactgttggaccccgaagacatcagcgtggaccatcctgatgagaagtccataatcacttatgtggtgacttattaccactacttctctaagatgaaggccttagctgttgaaggaaaacgaattggaaaggtgcttgacaatgctattgaaacagaaaaaatgattgaaaagtatgaatcacttgcctctgaccttctggaatggattgaacaaaccatcatcattctgaacaatcgcaaatttgccaattcactggtcggggttcaacagcagcttcaggcattcaacacttaccgcactgtggagaaaccacccaaatttactgagaaggggaacttggaagtgctgctcttcaccattcagagcaagatgagggccaacaaccagaaggtctacatgccccgggaggggaagctcatctctgacatcaacaaggcctgggaaagactggaaaaagcggaacacgaaagagaactggctttgcggaatgagctcataagacaggagaaactggaacagctcgcccgcagatttgatcgcaaggcagctatgagggagacttggctgagcgaaaaccagcgtctggtgtctcaggacaactttgggtttgaccttcctgcagttgaggccgccacaaaaaagcacgaggccattgagacagacattgccgcatacgaggagcgtgtgcaggctgtggtagccgtggccagggagctcgaggccgagaattaccacgacatcaagcgcatcacagcgaggaaggacaatgtcatccggctctgggaatacctactggaactgctcagggcccggagacagcggctcgagatgaacctggggctgcagaagatattccaggaaatgctctacattatggactggatggatgaaatgaaggtgctagtattgtctcaagactatggcaaacacttacttggtgtggaagacctgttacagaagcacaccctggttgaagcagacattggcatccaggcagagcgggtgagaggtgtcaatgcctccgcccagaagttcgcaacagacggggaaggttacaagccctgtgacccccaggtgatccgagaccgcgtggcccacatggagttctgttatcaagagctttgccagctggcggctgagcgcagggcccgtctggaagagtcccgccgcctctggaagttcttctgggagatggcagaagaggaaggctggatacgggagaaggagaagatcctgtcctcggacgattacgggaaagacctgaccagcgtcatgcgcctgctcagcaagcaccgggcgttcgaggacgagatgagcggccgcagtggccactttgagcaggccatcaaggaaggcgaagacatgatcgcggaggagcacttcgggtcggagaagatccgtgagaggatcatttacatccgggagcagtgggccaacctagagcagctctcggccattcggaagaagcgcctggaggaggcctccctgctgcaccagttccaggcagatgctgatgacattgatgcctggatgctggacatcctcaagattgtctccagcagcgacgtgggccacgatgagtattccacacagtctctggtcaagaaacacaaggacgtggcggaagagatcgccaattacaggcccacccttgacacgctgcacgaacaagccagcgccctcccccaggagcatgccgagtctccagacgtgaggggcaggctgtcgggcatcgaggagcggtataaggaggtggcagagctgacgcggctgcggaagcaggcactccaggacactctggccctgtacaagatgttcagcgaggctgatgcctgtgagctctggatcgacgagaaggagcagtggctcaacaacatgcagatcccagagaagctggaggatctggaggtcatccagcacagatttgagagcctagaaccagaaatgaacaaccaggcttcccgggttgcagtggtgaaccagattgcacgccagctgatgcacagcggccacccaagtgagaaggaaatcaaagcccagcaggacaaactcaacacaaggtggagccagttcagagaactggttgacaggaagaaggatgccctcctgtctgccctgagcatccagaactaccacctcgagtgcaatgaaaccaaatcctggattcgggaaaagaccaaggtcatcgagtccacccaggacctgggcaatgacctggctggcgtcatggccctgcagcgcaagctgaccggcatggagcgggacttggtggccattgaggcaaagctgagtgacctgcagaaggaggcggagaagctggagtccgagcaccccgaccaggcccaggccatcctgtctcggctggccgagatcagcgacgtgtgggaggagatgaagaccaccctgaaaaaccgagaggcctccctgggagaggccagcaagctgcagcagttcctacgggacttggacgacttccagtcctggctctctaggacccagacagcgatcgcctcggaggacatgccaaacaccctgaccgaggctgagaagctgctcacgcagcacgagaacatcaagaacgagatcgacaactacgaggaggactaccagaagatgagggacatgggcgagatggtcacccaggggcagaccgatgcccagtacatgtttctgcggcagcggctgcaggccctggacactggatggaacgagctccacaagatgtgggagaacagacaaaatctcctatcccagtcacatgcctaccagcagttcctcagagacacgaagcaagccgaagcctttcttaacaaccaggagtatgttctggctcacactgaaatgcctaccaccttggaaggagctgaagcagcaattaaaaagcaagaggacttcatgaccaccatggacgccaatgaggagaagatcaatgctgtggtggagactggccggaggctggtgagcgatgggaacatcaactcagatcgcatccaggagaaggtggactctattgatgacagacataggaagaatcgtgagacagccagtgaacttttgatgaggttgaaggacaacagggatctacagaaattcctgcaagattgtcaagagctgtctctctggatcaatgagaagatgctcacagcccaggacatgtcttacgatgaagccagaaatctgcacagtaaatggttgaagcatcaagcatttatggcagaacttgcatccaacaaagaatggcttgacaaaatcgagaaggaaggaatgcagctcatttcagaaaagcctgagacggaagctgtggtgaaggagaaactcactggtttacataaaatgtgggaagtccttgaatccactacccagacaaaggcccagcggctctttgatgcaaacaaggccgaacttttcacccagagctgtgcagatctagacaaatggctgcacggcctggagagtcagattcagtctgatgactatggcaaagacctgaccagtgtcaatatcctgctgaaaaagcaacagatgctggagaatcagatggaagtgcggaagaaggagatcgaagagctccaaagccaagcccaggccctgagtcaggaagggaagagcaccgacgaggtagacagcaagcgcctcaccgtgcagaccaagttcatggagttgctggagcccttgaacgagaggaagcataacctgctggcctccaaagagatccatcagttcaacagggatgtggaggacgagatcttgtgggttggagagaggatgcctttggcaacttccacggatcatggccacaacctccagactgtgcagctgttaataaagaaaaatcagaccctccagaaagaaatccaggggcaccagcctcgcattgacgacatctttgagaggagccaaaacatcgtcactgacagcagcagcctcagcgctgaggccatcagacagaggcttgccgacctgaagcagctgtggggtctcctcattgaggagacagagaaacgccacaggcggctggaggaggcgcacagggcccagcagtactactttgacgctgctgaggccgaagcctggatgagcgagcaggagctgtacatgatgtcagaggagaaggccaaggatgagcagagtgctgtctccatgttgaagaagcaccagatcttagaacaagctgtggaggactatgcagagaccgtgcatcagctctccaagaccagccgggccctggtggccgacagccatcctgaaagtgagcgcattagcatgcggcagtccaaagtggataaactgtacgctggtctgaaagaccttgctgaagagagaagaggcaagctggatgagagacacaggttattccagctcaaccgggaggtggacgacctggagcagtggatcgctgagagggaggtggtcgcagggtcccatgaactgggacaggactatgagcatgtcacgatgttacaagaacgattccgggagtttgcccgagacaccgggaacattgggcaggagcgcgtggacacggtcaatcacctggcagatgagctcatcaactctggacattcagatgccgccaccatcgctgaatggaaggatggcctcaatgaagcctgggccgacctcctggagctcattgacacaagaacacagattcttgccgcttcctatgaactgcacaagttttaccacgatgccaaggagatctttgggcgtatacaggacaaacacaagaaactccctgaggagcttgggagagatcagaacacagtggagaccttacagagaatgcacactacatttgagcatgacatccaggctctgggcacacaggtgaggcagctgcaggaggatgcagcccgcctccaggcggcctatgcgggtgacaaggccgacgatatccagaagcgcgagaacgaggtcctggaagcctggaagtccctcctggacgcctgtgagagccgcagggtgcggctggtggacacaggggacaagttccgcttcttcagcatggtgcgcgacctcatgctctggatggaggatgtcatccggcagatcgaggcccaggagaagccaagggatgtatcatctgttgaactcttaatgaataatcatcaaggcatcaaagctgaaattgatgcacgtaatgacagtttcacaacctgcattgaacttgggaaatccctgttggcgagaaaacactatgcatctgaggagatcaaggaaaaattactgcagttgacggaaaagaggaaagaaatgatcgacaagtgggaagaccgatgggaatggttaagactgattctggaggtccatcagttctcaagagacgccagtgtggccgaggcctggctgcttggacaggagccgtacctatccagccgagagataggccagagcgtggacgaggtggagaagctcatcaagcgccacgaggcatttgaaaagtctgcagcaacctgggatgagaggttctctgccctggaaaggctgactacattggagttactggaagtgcgcagacagcaagaggaagaggagaggaagaggcggccgccttctcccgagccgagcacgaaggtttcagaggaagccgagtcccagcagcagtgggatacttcaaaaggagaacaagtttcccaaaacggtttgccagctgaacagggatctccacggatggcagaaacggtggacacaagcgaaatggtcaacggcgctacagaacaaaggacgagctctaaagagtccagccccatcccctccccgacctctgatcgtaaagccaagactgccctcccagcccagagtgccgccaccttaccagccagaacccaggagacaccttcggcccagatggaaggcttcctcaatcggaaacacgagtgggaggcccacaataagaaagcctcaagcaggtcctggcacaatgtttattgtgtcataaataaccaagaaatgggtttctacaaagatgcaaagactgctgcttctggaattccctaccacagcgaggtccctgtgagtttgaaagaagctgtctgcgaagtggcccttgattacaaaaagaagaaacacgtattcaagctaagactaaatgatggcaatgagtacctcttccaagccaaagacaaagagaagcggttcagcctttttggcaaaaagaaatgaactcctttccttcacctcctgcccttctcttaccttttcagtgaaattccagcatgcaagctcattgacacaagaacacagattcttgccgcttcctatgaactgcacaagttttaccacgatgccaaggagatctttgggc

SEQ ID NO: 357100 - DNA, 7338 bp, Homo sapiens
gtgagctgaagcagggcagggcatcaactcacccaggaagtgcaaggggtttggggattttcctttcctagccaagggaaggcatgacagactgtacctggaaaaacaggacactcttgcccaaatactgcactttttgcacagtcttagcaactggcagaccaggagattctctcctgtgcctgattcattgggtcccacacccatagggccttgcttactgccagtgcagcagtctgagattaacaccccatccccgggagaactctaagaaggagctgatgtggaggagcagctgagacagttcaagatgacgaccacagtagccacagactatgacaacattgagatccagcagcagtacagtgatgtcaacaaccgctgggatgtcgacgactgggacaatgagaacagctctgcgcggctttttgagcggtcccgcatcaaggctctggcagatgagcgtgaagccgtgcagaagaagaccttcaccaagtgggtcaattcccaccttgcccgtgtgtcctgccggatcacagacctgtacactgaccttcgagatggacggatgctcatcaagctgctggaggtcctctctggagagaggctgcctaaacccaccaagggacgaatgcgcatccactgcttagagaatgtggacaaggcccttcagttcctgaaggagcagagagtccatcttgagaacatggggtcccatgacatcgtggatggaaaccaccggctgacccttggcctcatctggaccatcatcctgcgcttccagatccaggatatcagtgtggaaactgaagacaacaaagagaagaaatctgccaaggatgcattgctgttgtggtgccagatgaagacagctgggtaccccaatgtcaacattcacaatttcaccactagctggagggacggcatggccttcaatgcactgatacacaaacaccggcctgacctgatagattttgacaaactaaagaaatctaacgcacactacaacctgcagaatgcatttaatctggcagaacagcacctcggcctcactaaactgttggaccccgaagacatcagcgtggaccatcctgatgagaagtccataatcacttatgtggtgacttattaccactacttctctaagatgaaggccttagctgttgaaggaaaacgaattggaaaggtgcttgacaatgctattgaaacagaaaaaatgattgaaaagtatgaatcacttgcctctgaccttctggaatggattgaacaaaccatcatcattctgaacaatcgcaaatttgccaattcactggtcggggttcaacagcagcttcaggcattcaacacttaccgcactgtggagaaaccacccaaatttactgagaaggggaacttggaagtgctgctcttcaccattcagagcaagatgagggccaacaaccagaaggtctacatgccccgggaggggaagctcatctctgacatcaacaaggcctgggaaagactggaaaaagcggaacacgaaagagaactggctttgcggaatgagctcataagacaggagaaactggaacagctcgcccgcagatttgatcgcaaggcagctatgagggagacttggctgagcgaaaaccagcgtctggtgtctcaggacaactttgggtttgaccttcctgcagttgaggccgccacaaaaaagcacgaggccattgagacagacattgccgcatacgaggagcgtgtgcaggctgtggtagccgtggccagggagctcgaggccgagaattaccacgacatcaagcgcatcacagcgaggaaggacaatgtcatccggctctgggaatacctactggaactgctcagggcccggagacagcggctcgagatgaacctggggctgcagaagatattccaggaaatgctctacattatggactggatggatgaaatgaaggtgctagtattgtctcaagactatggcaaacacttacttggtgtggaagacctgttacagaagcacaccctggttgaagcagacattggcatccaggcagagcgggtgagaggtgtcaatgcctccgcccagaagttcgcaacagacggggaaggttacaagccctgtgacccccaggtgatccgagaccgcgtggcccacatggagttctgttatcaagagctttgccagctggcggctgagcgcagggcccgtctggaagagtcccgccgcctctggaagttcttctgggagatggcagaagaggaaggctggatacgggagaaggagaagatcctgtcctcggacgattacgggaaagacctgaccagcgtcatgcgcctgctcagcaagcaccgggcgttcgaggacgagatgagcggccgcagtggccactttgagcaggccatcaaggaaggcgaagacatgatcgcggaggagcacttcgggtcggagaagatccgtgagaggatcatttacatccgggagcagtgggccaacctagagcagctctcggccattcggaagaagcgcctggaggaggcctccctgctgcaccagttccaggcagatgctgatgacattgatgcctggatgctggacatcctcaagattgtctccagcagcgacgtgggccacgatgagtattccacacagtctctggtcaagaaacacaaggacgtggcggaagagatcgccaattacaggcccacccttgacacgctgcacgaacaagccagcgccctcccccaggagcatgccgagtctccagacgtgaggggcaggctgtcgggcatcgaggagcggtataaggaggtggcagagctgacgcggctgcggaagcaggcactccaggacactctggccctgtacaagatgttcagcgaggctgatgcctgtgagctctggatcgacgagaaggagcagtggctcaacaacatgcagatcccagagaagctggaggatctggaggtcatccagcacagatttgagagcctagaaccagaaatgaacaaccaggcttcccgggttgcagtggtgaaccagattgcacgccagctgatgcacagcggccacccaagtgagaaggaaatcaaagcccagcaggacaaactcaacacaaggtggagccagttcagagaactggttgacaggaagaaggatgccctcctgtctgccctgagcatccagaactaccacctcgagtgcaatgaaaccaaatcctggattcgggaaaagaccaaggtcatcgagtccacccaggacctgggcaatgacctggctggcgtcatggccctgcagcgcaagctgaccggcatggagcgggacttggtggccattgaggcaaagctgagtgacctgcagaaggaggcggagaagctggagtccgagcaccccgaccaggcccaggccatcctgtctcggctggccgagatcagcgacgtgtgggaggagatgaagaccaccctgaaaaaccgagaggcctccctgggagaggccagcaagctgcagcagttcctacgggacttggacgacttccagtcctggctctctaggacccagacagcgatcgcctcggaggacatgccaaacaccctgaccgaggctgagaagctgctcacgcagcacgagaacatcaagaacgagatcgacaactacgaggaggactaccagaagatgagggacatgggcgagatggtcacccaggggcagaccgatgcccagtacatgtttctgcggcagcggctgcaggccctggacactggatggaacgagctccacaagatgtgggagaacagacaaaatctcctatcccagtcacatgcctaccagcagttcctcagagacacgaagcaagccgaagcctttcttaacaaccaggagtatgttctggctcacactgaaatgcctaccaccttggaaggagctgaagcagcaattaaaaagcaagaggacttcatgaccaccatggacgccaatgaggagaagatcaatgctgtggtggagactggccggaggctggtgagcgatgggaacatcaactcagatcgcatccaggagaaggtggactctattgatgacagacataggaagaatcgtgagacagccagtgaacttttgatgaggttgaaggacaacagggatctacagaaattcctgcaagattgtcaagagctgtctctctggatcaatgagaagatgctcacagcccaggacatgtcttacgatgaagccagaaatctgcacagtaaatggttgaagcatcaagcatttatggcagaacttgcatccaacaaagaatggcttgacaaaatcgagaaggaaggaatgcagctcatttcagaaaagcctgagacggaagctgtggtgaaggagaaactcactggtttacataaaatgtgggaagtccttgaatccactacccagacaaaggcccagcggctctttgatgcaaacaaggccgaacttttcacccagagctgtgcagatctagacaaatggctgcacggcctggagagtcagattcagtctgatgactatggcaaagacctgaccagtgtcaatatcctgctgaaaaagcaacagatgctggagaatcagatggaagtgcggaagaaggagatcgaagagctccaaagccaagcccaggccctgagtcaggaagggaagagcaccgacgaggtagacagcaagcgcctcaccgtgcagaccaagttcatggagttgctggagcccttgaacgagaggaagcataacctgctggcctccaaagagatccatcagttcaacagggatgtggaggacgagatcttgtgggttggagagaggatgcctttggcaacttccacggatcatggccacaacctccagactgtgcagctgttaataaagaaaaatcagaccctccagaaagaaatccaggggcaccagcctcgcattgacgacatctttgagaggagccaaaacatcgtcactgacagcagcagcctcagcgctgaggccatcagacagaggcttgccgacctgaagcagctgtggggtctcctcattgaggagacagagaaacgccacaggcggctggaggaggcgcacagggcccagcagtactactttgacgctgctgaggccgaagcctggatgagcgagcaggagctgtacatgatgtcagaggagaaggccaaggatgagcagagtgctgtctccatgttgaagaagcaccagatcttagaacaagctgtggaggactatgcagagaccgtgcatcagctctccaagaccagccgggccctggtggccgacagccatcctgaaagtgagcgcattagcatgcggcagtccaaagtggataaactgtacgctggtctgaaagaccttgctgaagagagaagaggcaagctggatgagagacacaggttattccagctcaaccgggaggtggacgacctggagcagtggatcgctgagagggaggtggtcgcagggtcccatgaactgggacaggactatgagcatgtcacgatgttacaagaacgattccgggagtttgcccgagacaccgggaacattgggcaggagcgcgtggacacggtcaatcacctggcagatgagctcatcaactctggacattcagatgccgccaccatcgctgaatggaaggatggcctcaatgaagcctgggccgacctcctggagctcattgacacaagaacacagattcttgccgcttcctatgaactgcacaagttttaccacgatgccaaggagatctttgggcgtatacaggacaaacacaagaaactccctgaggagcttgggagagatcagaacacagtggagaccttacagagaatgcacactacatttgagcatgacatccaggctctgggcacacaggtgaggcagctgcaggaggatgcagcccgcctccaggcggcctatgcgggtgacaaggccgacgatatccagaagcgcgagaacgaggtcctggaagcctggaagtccctcctggacgcctgtgagagccgcagggtgcggctggtggacacaggggacaagttccgcttcttcagcatggtgcgcgacctcatgctctggatggaggatgtcatccggcagatcgaggcccaggagaagccaagggatgtatcatctgttgaactcttaatgaataatcatcaaggcatcaaagctgaaattgatgcacgtaatgacagtttcacaacctgcattgaacttgggaaatccctgttggcgagaaaacactatgcatctgaggagatcaaggaaaaattactgcagttgacggaaaagaggaaagaaatgatcgacaagtgggaagaccgatgggaatggttaagactgattctggaggtccatcagttctcaagagacgccagtgtggccgaggcctggctgcttggacaggagccgtacctatccagccgagagataggccagagcgtggacgaggtggagaagctcatcaagcgccacgaggcatttgaaaagtctgcagcaacctgggatgagaggttctctgccctggaaaggctgactacattggagttactggaagtgcgcagacagcaagaggaagaggagaggaagaggcggccgccttctcccgagccgagcacgaaggtttcagaggaagccgagtcccagcagcagtgggatacttcaaaaggagaacaagtttcccaaaacggtttgccagctgaacagggatctccacggatggcagaaacggtggacacaagcgaaatggtcaacggcgctacagaacaaaggacgagctctaaagagtccagccccatcccctccccgacctctgatcgtaaagccaagactgccctcccagcccagagtgccgccaccttaccagccagaacccaggagacaccttcggcccagatggaaggcttcctcaatcggaaacacgagtgggaggcccacaataagaaagcctcaagcaggtcctggcacaatgtttattgtgtcataaataaccaagaaatgggtttctacaaagatgcaaagactgctgcttctggaattccctaccacagcgaggtccctgtgagtttgaaagaagctgtctgcgaagtggcccttgattacaaaaagaagaaacacgtattcaagctaagagactaaatgatggcaatgagtacctcttccaagccaaaagacgatgaggaaatgaacacatggatccaggctatctcttccgccatctcctctgataaacacgaggtgtctgccagcacccagagcacgcccagcattcaggcgggcgcagacccttcccaccagcgccgtacacacgaacgggatcctcagag

SEQ ID NO: 357101 - DNA, 7319 bp, Homo sapiens
gtgagctgaagcagggcagggcatcaactcacccaggaagtgcaaggggtttggggattttcctttcctagccaagggaaggcatgacagactgtacctggaaaaacaggacactcttgcccaaatactgcactttttgcacagtcttagcaactggcagaccaggagattctctcctgtgcctgattcattgggtcccacacccatagggccttgcttactgccagtgcagcagtctgagattaacaccccatccccgggagaactctaagaaggagctgatgtggaggagcagctgagacagttcaagatgacgaccacagtagccacagactatgacaacattgagatccagcagcagtacagtgatgtcaacaaccgctgggatgtcgacgactgggacaatgagaacagctctgcgcggctttttgagcggtcccgcatcaaggctctggcagatgagcgtgaagccgtgcagaagaagaccttcaccaagtgggtcaattcccaccttgcccgtgtgtcctgccggatcacagacctgtacactgaccttcgagatggacggatgctcatcaagctgctggaggtcctctctggagagaggctgcctaaacccaccaagggacgaatgcgcatccactgcttagagaatgtggacaaggcccttcagttcctgaaggagcagagagtccatcttgagaacatggggtcccatgacatcgtggatggaaaccaccggctgacccttggcctcatctggaccatcatcctgcgcttccagatccaggatatcagtgtggaaactgaagacaacaaagagaagaaatctgccaaggatgcattgctgttgtggtgccagatgaagacagctgggtaccccaatgtcaacattcacaatttcaccactagctggagggacggcatggccttcaatgcactgatacacaaacaccggcctgacctgatagattttgacaaactaaagaaatctaacgcacactacaacctgcagaatgcatttaatctggcagaacagcacctcggcctcactaaactgttggaccccgaagacatcagcgtggaccatcctgatgagaagtccataatcacttatgtggtgacttattaccactacttctctaagatgaaggccttagctgttgaaggaaaacgaattggaaaggtgcttgacaatgctattgaaacagaaaaaatgattgaaaagtatgaatcacttgcctctgaccttctggaatggattgaacaaaccatcatcattctgaacaatcgcaaatttgccaattcactggtcggggttcaacagcagcttcaggcattcaacacttaccgcactgtggagaaaccacccaaatttactgagaaggggaacttggaagtgctgctcttcaccattcagagcaagatgagggccaacaaccagaaggtctacatgccccgggaggggaagctcatctctgacatcaacaaggcctgggaaagactggaaaaagcggaacacgaaagagaactggctttgcggaatgagctcataagacaggagaaactggaacagctcgcccgcagatttgatcgcaaggcagctatgagggagacttggctgagcgaaaaccagcgtctggtgtctcaggacaactttgggtttgaccttcctgcagttgaggccgccacaaaaaagcacgaggccattgagacagacattgccgcatacgaggagcgtgtgcaggctgtggtagccgtggccagggagctcgaggccgagaattaccacgacatcaagcgcatcacagcgaggaaggacaatgtcatccggctctgggaatacctactggaactgctcagggcccggagacagcggctcgagatgaacctggggctgcagaagatattccaggaaatgctctacattatggactggatggatgaaatgaaggtgctagtattgtctcaagactatggcaaacacttacttggtgtggaagacctgttacagaagcacaccctggttgaagcagacattggcatccaggcagagcgggtgagaggtgtcaatgcctccgcccagaagttcgcaacagacggggaaggttacaagccctgtgacccccaggtgatccgagaccgcgtggcccacatggagttctgttatcaagagctttgccagctggcggctgagcgcagggcccgtctggaagagtcccgccgcctctggaagttcttctgggagatggcagaagaggaaggctggatacgggagaaggagaagatcctgtcctcggacgattacgggaaagacctgaccagcgtcatgcgcctgctcagcaagcaccgggcgttcgaggacgagatgagcggccgcagtggccactttgagcaggccatcaaggaaggcgaagacatgatcgcggaggagcacttcgggtcggagaagatccgtgagaggatcatttacatccgggagcagtgggccaacctagagcagctctcggccattcggaagaagcgcctggaggaggcctccctgctgcaccagttccaggcagatgctgatgacattgatgcctggatgctggacatcctcaagattgtctccagcagcgacgtgggccacgatgagtattccacacagtctctggtcaagaaacacaaggacgtggcggaagagatcgccaattacaggcccacccttgacacgctgcacgaacaagccagcgccctcccccaggagcatgccgagtctccagacgtgaggggcaggctgtcgggcatcgaggagcggtataaggaggtggcagagctgacgcggctgcggaagcaggcactccaggacactctggccctgtacaagatgttcagcgaggctgatgcctgtgagctctggatcgacgagaaggagcagtggctcaacaacatgcagatcccagagaagctggaggatctggaggtcatccagcacagatttgagagcctagaaccagaaatgaacaaccaggcttcccgggttgcagtggtgaaccagattgcacgccagctgatgcacagcggccacccaagtgagaaggaaatcaaagcccagcaggacaaactcaacacaaggtggagccagttcagagaactggttgacaggaagaaggatgccctcctgtctgccctgagcatccagaactaccacctcgagtgcaatgaaaccaaatcctggattcgggaaaagaccaaggtcatcgagtccacccaggacctgggcaatgacctggctggcgtcatggccctgcagcgcaagctgaccggcatggagcgggacttggtggccattgaggcaaagctgagtgacctgcagaaggaggcggagaagctggagtccgagcaccccgaccaggcccaggccatcctgtctcggctggccgagatcagcgacgtgtgggaggagatgaagaccaccctgaaaaaccgagaggcctccctgggagaggccagcaagctgcagcagttcctacgggacttggacgacttccagtcctggctctctaggacccagacagcgatcgcctcggaggacatgccaaacaccctgaccgaggctgagaagctgctcacgcagcacgagaacatcaagaacgagatcgacaactacgaggaggactaccagaagatgagggacatgggcgagatggtcacccaggggcagaccgatgcccagtacatgtttctgcggcagcggctgcaggccctggacactggatggaacgagctccacaagatgtgggagaacagacaaaatctcctatcccagtcacatgcctaccagcagttcctcagagacacgaagcaagccgaagcctttcttaacaaccaggagtatgttctggctcacactgaaatgcctaccaccttggaaggagctgaagcagcaattaaaaagcaagaggacttcatgaccaccatggacgccaatgaggagaagatcaatgctgtggtggagactggccggaggctggtgagcgatgggaacatcaactcagatcgcatccaggagaaggtggactctattgatgacagacataggaagaatcgtgagacagccagtgaacttttgatgaggttgaaggacaacagggatctacagaaattcctgcaagattgtcaagagctgtctctctggatcaatgagaagatgctcacagcccaggacatgtcttacgatgaagccagaaatctgcacagtaaatggttgaagcatcaagcatttatggcagaacttgcatccaacaaagaatggcttgacaaaatcgagaaggaaggaatgcagctcatttcagaaaagcctgagacggaagctgtggtgaaggagaaactcactggtttacataaaatgtgggaagtccttgaatccactacccagacaaaggcccagcggctctttgatgcaaacaaggccgaacttttcacccagagctgtgcagatctagacaaatggctgcacggcctggagagtcagattcagtctgatgactatggcaaagacctgaccagtgtcaatatcctgctgaaaaagcaacagatgctggagaatcagatggaagtgcggaagaaggagatcgaagagctccaaagccaagcccaggccctgagtcaggaagggaagagcaccgacgaggtagacagcaagcgcctcaccgtgcagaccaagttcatggagttgctggagcccttgaacgagaggaagcataacctgctggcctccaaagagatccatcagttcaacagggatgtggaggacgagatcttgtgggttggagagaggatgcctttggcaacttccacggatcatggccacaacctccagactgtgcagctgttaataaagaaaaatcagaccctccagaaagaaatccaggggcaccagcctcgcattgacgacatctttgagaggagccaaaacatcgtcactgacagcagcagcctcagcgctgaggccatcagacagaggcttgccgacctgaagcagctgtggggtctcctcattgaggagacagagaaacgccacaggcggctggaggaggcgcacagggcccagcagtactactttgacgctgctgaggccgaagcctggatgagcgagcaggagctgtacatgatgtcagaggagaaggccaaggatgagcagagtgctgtctccatgttgaagaagcaccagatcttagaacaagctgtggaggactatgcagagaccgtgcatcagctctccaagaccagccgggccctggtggccgacagccatcctgaaagtgagcgcattagcatgcggcagtccaaagtggataaactgtacgctggtctgaaagaccttgctgaagagagaagaggcaagctggatgagagacacaggttattccagctcaaccgggaggtggacgacctggagcagtggatcgctgagagggaggtggtcgcagggtcccatgaactgggacaggactatgagcatgtcacgatgttacaagaacgattccgggagtttgcccgagacaccgggaacattgggcaggagcgcgtggacacggtcaatcacctggcagatgagctcatcaactctggacattcagatgccgccaccatcgctgaatggaaggatggcctcaatgaagcctgggccgacctcctggagctcattgacacaagaacacagattcttgccgcttcctatgaactgcacaagttttaccacgatgccaaggagatctttgggcgtatacaggacaaacacaagaaactccctgaggagcttgggagagatcagaacacagtggagaccttacagagaatgcacactacatttgagcatgacatccaggctctgggcacacaggtgaggcagctgcaggaggatgcagcccgcctccaggcggcctatgcgggtgacaaggccgacgatatccagaagcgcgagaacgaggtcctggaagcctggaagtccctcctggacgcctgtgagagccgcagggtgcggctggtggacacaggggacaagttccgcttcttcagcatggtgcgcgacctcatgctctggatggaggatgtcatccggcagatcgaggcccaggagaagccaagggatgtatcatctgttgaactcttaatgaataatcatcaaggcatcaaagctgaaattgatgcacgtaatgacagtttcacaacctgcattgaacttgggaaatccctgttggcgagaaaacactatgcatctgaggagatcaaggaaaaattactgcagttgacggaaaagaggaaagaaatgatcgacaagtgggaagaccgatgggaatggttaagactgattctggaggtccatcagttctcaagagacgccagtgtggccgaggcctggctgcttggacaggagccgtacctatccagccgagagataggccagagcgtggacgaggtggagaagctcatcaagcgccacgaggcatttgaaaagtctgcagcaacctgggatgagaggttctctgccctggaaaggctgactacattggagttactggaagtgcgcagacagcaagaggaagaggagaggaagaggcggccgccttctcccgagccgagcacgaaggtttcagaggaagccgagtcccagcagcagtgggatacttcaaaaggagaacaagtttcccaaaacggtttgccagctgaacagggatctccacggatggcagaaacggtggacacaagcgaaatggtcaacggcgctacagaacaaaggacgagctctaaagagtccagccccatcccctccccgacctctgatcgtaaagccaagactgccctcccagcccagagtgccgccaccttaccagccagaacccaggagacaccttcggcccagatggaaggcttcctcaatcggaaacacgagtgggaggcccacaataagaaagcctcaagcaggtcctggcacaatgtttattgtgtcataaataaccaagaaatgggtttctacaaagatgcaaagactgctgcttctggaattccctaccacagcgaggtccctgtgagtttgaaagaagctgtctgcgaagtggcccttgattacaaaaagaagaaacacgtattcaagctaagagactaaatgatggcaatgagtacctcttccaagccaaaagacgatgaggaaatgaacacatggatccaggctatctcttccgccatctcctctgataaacacgaggtgtctgccagcacccagagcacgcagcatccaccgcgccaaccctccaccaactcactttccacctagg

SEQ ID NO: 357102 - DNA, 7204 bp, Homo sapiens
gtgagctgaagcagggcagggcatcaactcacccaggaagtgcaaggggtttggggattttcctttcctagccaagggaaggcatgacagactgtacctggaaaaacaggacactcttgcccaaatactgcactttttgcacagtcttagcaactggcagaccaggagattctctcctgtgcctgattcattgggtcccacacccatagggccttgcttactgccagtgcagcagtctgagattaacaccccatccccgggagaactctaagaaggagctgatgtggaggagcagctgagacagttcaagatgacgaccacagtagccacagactatgacaacattgagatccagcagcagtacagtgatgtcaacaaccgctgggatgtcgacgactgggacaatgagaacagctctgcgcggctttttgagcggtcccgcatcaaggctctggcagatgagcgtgaagccgtgcagaagaagaccttcaccaagtgggtcaattcccaccttgcccgtgtgtcctgccggatcacagacctgtacactgaccttcgagatggacggatgctcatcaagctgctggaggtcctctctggagagaggctgcctaaacccaccaagggacgaatgcgcatccactgcttagagaatgtggacaaggcccttcagttcctgaaggagcagagagtccatcttgagaacatggggtcccatgacatcgtggatggaaaccaccggctgacccttggcctcatctggaccatcatcctgcgcttccagatccaggatatcagtgtggaaactgaagacaacaaagagaagaaatctgccaaggatgcattgctgttgtggtgccagatgaagacagctgggtaccccaatgtcaacattcacaatttcaccactagctggagggacggcatggccttcaatgcactgatacacaaacaccggcctgacctgatagattttgacaaactaaagaaatctaacgcacactacaacctgcagaatgcatttaatctggcagaacagcacctcggcctcactaaactgttggaccccgaagacatcagcgtggaccatcctgatgagaagtccataatcacttatgtggtgacttattaccactacttctctaagatgaaggccttagctgttgaaggaaaacgaattggaaaggtgcttgacaatgctattgaaacagaaaaaatgattgaaaagtatgaatcacttgcctctgaccttctggaatggattgaacaaaccatcatcattctgaacaatcgcaaatttgccaattcactggtcggggttcaacagcagcttcaggcattcaacacttaccgcactgtggagaaaccacccaaatttactgagaaggggaacttggaagtgctgctcttcaccattcagagcaagatgagggccaacaaccagaaggtctacatgccccgggaggggaagctcatctctgacatcaacaaggcctgggaaagactggaaaaagcggaacacgaaagagaactggctttgcggaatgagctcataagacaggagaaactggaacagctcgcccgcagatttgatcgcaaggcagctatgagggagacttggctgagcgaaaaccagcgtctggtgtctcaggacaactttgggtttgaccttcctgcagttgaggccgccacaaaaaagcacgaggccattgagacagacattgccgcatacgaggagcgtgtgcaggctgtggtagccgtggccagggagctcgaggccgagaattaccacgacatcaagcgcatcacagcgaggaaggacaatgtcatccggctctgggaatacctactggaactgctcagggcccggagacagcggctcgagatgaacctggggctgcagaagatattccaggaaatgctctacattatggactggatggatgaaatgaaggtgctagtattgtctcaagactatggcaaacacttacttggtgtggaagacctgttacagaagcacaccctggttgaagcagacattggcatccaggcagagcgggtgagaggtgtcaatgcctccgcccagaagttcgcaacagacggggaaggttacaagccctgtgacccccaggtgatccgagaccgcgtggcccacatggagttctgttatcaagagctttgccagctggcggctgagcgcagggcccgtctggaagagtcccgccgcctctggaagttcttctgggagatggcagaagaggaaggctggatacgggagaaggagaagatcctgtcctcggacgattacgggaaagacctgaccagcgtcatgcgcctgctcagcaagcaccgggcgttcgaggacgagatgagcggccgcagtggccactttgagcaggccatcaaggaaggcgaagacatgatcgcggaggagcacttcgggtcggagaagatccgtgagaggatcatttacatccgggagcagtgggccaacctagagcagctctcggccattcggaagaagcgcctggaggaggcctccctgctgcaccagttccaggcagatgctgatgacattgatgcctggatgctggacatcctcaagattgtctccagcagcgacgtgggccacgatgagtattccacacagtctctggtcaagaaacacaaggacgtggcggaagagatcgccaattacaggcccacccttgacacgctgcacgaacaagccagcgccctcccccaggagcatgccgagtctccagacgtgaggggcaggctgtcgggcatcgaggagcggtataaggaggtggcagagctgacgcggctgcggaagcaggcactccaggacactctggccctgtacaagatgttcagcgaggctgatgcctgtgagctctggatcgacgagaaggagcagtggctcaacaacatgcagatcccagagaagctggaggatctggaggtcatccagcacagatttgagagcctagaaccagaaatgaacaaccaggcttcccgggttgcagtggtgaaccagattgcacgccagctgatgcacagcggccacccaagtgagaaggaaatcaaagcccagcaggacaaactcaacacaaggtggagccagttcagagaactggttgacaggaagaaggatgccctcctgtctgccctgagcatccagaactaccacctcgagtgcaatgaaaccaaatcctggattcgggaaaagaccaaggtcatcgagtccacccaggacctgggcaatgacctggctggcgtcatggccctgcagcgcaagctgaccggcatggagcgggacttggtggccattgaggcaaagctgagtgacctgcagaaggaggcggagaagctggagtccgagcaccccgaccaggcccaggccatcctgtctcggctggccgagatcagcgacgtgtgggaggagatgaagaccaccctgaaaaaccgagaggcctccctgggagaggccagcaagctgcagcagttcctacgggacttggacgacttccagtcctggctctctaggacccagacagcgatcgcctcggaggacatgccaaacaccctgaccgaggctgagaagctgctcacgcagcacgagaacatcaagaacgagatcgacaactacgaggaggactaccagaagatgagggacatgggcgagatggtcacccaggggcagaccgatgcccagtacatgtttctgcggcagcggctgcaggccctggacactggatggaacgagctccacaagatgtgggagaacagacaaaatctcctatcccagtcacatgcctaccagcagttcctcagagacacgaagcaagccgaagcctttcttaacaaccaggagtatgttctggctcacactgaaatgcctaccaccttggaaggagctgaagcagcaattaaaaagcaagaggacttcatgaccaccatggacgccaatgaggagaagatcaatgctgtggtggagactggccggaggctggtgagcgatgggaacatcaactcagatcgcatccaggagaaggtggactctattgatgacagacataggaagaatcgtgagacagccagtgaacttttgatgaggttgaaggacaacagggatctacagaaattcctgcaagattgtcaagagctgtctctctggatcaatgagaagatgctcacagcccaggacatgtcttacgatgaagccagaaatctgcacagtaaatggttgaagcatcaagcatttatggcagaacttgcatccaacaaagaatggcttgacaaaatcgagaaggaaggaatgcagctcatttcagaaaagcctgagacggaagctgtggtgaaggagaaactcactggtttacataaaatgtgggaagtccttgaatccactacccagacaaaggcccagcggctctttgatgcaaacaaggccgaacttttcacccagagctgtgcagatctagacaaatggctgcacggcctggagagtcagattcagtctgatgactatggcaaagacctgaccagtgtcaatatcctgctgaaaaagcaacagatgctggagaatcagatggaagtgcggaagaaggagatcgaagagctccaaagccaagcccaggccctgagtcaggaagggaagagcaccgacgaggtagacagcaagcgcctcaccgtgcagaccaagttcatggagttgctggagcccttgaacgagaggaagcataacctgctggcctccaaagagatccatcagttcaacagggatgtggaggacgagatcttgtgggttggagagaggatgcctttggcaacttccacggatcatggccacaacctccagactgtgcagctgttaataaagaaaaatcagaccctccagaaagaaatccaggggcaccagcctcgcattgacgacatctttgagaggagccaaaacatcgtcactgacagcagcagcctcagcgctgaggccatcagacagaggcttgccgacctgaagcagctgtggggtctcctcattgaggagacagagaaacgccacaggcggctggaggaggcgcacagggcccagcagtactactttgacgctgctgaggccgaagcctggatgagcgagcaggagctgtacatgatgtcagaggagaaggccaaggatgagcagagtgctgtctccatgttgaagaagcaccagatcttagaacaagctgtggaggactatgcagagaccgtgcatcagctctccaagaccagccgggccctggtggccgacagccatcctgaaagtgagcgcattagcatgcggcagtccaaagtggataaactgtacgctggtctgaaagaccttgctgaagagagaagaggcaagctggatgagagacacaggttattccagctcaaccgggaggtggacgacctggagcagtggatcgctgagagggaggtggtcgcagggtcccatgaactgggacaggactatgagcatgtcacgatgttacaagaacgattccgggagtttgcccgagacaccgggaacattgggcaggagcgcgtggacacggtcaatcacctggcagatgagctcatcaactctggacattcagatgccgccaccatcgctgaatggaaggatggcctcaatgaagcctgggccgacctcctggagctcattgacacaagaacacagattcttgccgcttcctatgaactgcacaagttttaccacgatgccaaggagatctttgggcgtatacaggacaaacacaagaaactccctgaggagcttgggagagatcagaacacagtggagaccttacagagaatgcacactacatttgagcatgacatccaggctctgggcacacaggtgaggcagctgcaggaggatgcagcccgcctccaggcggcctatgcgggtgacaaggccgacgatatccagaagcgcgagaacgaggtcctggaagcctggaagtccctcctggacgcctgtgagagccgcagggtgcggctggtggacacaggggacaagttccgcttcttcagcatggtgcgcgacctcatgctctggatggaggatgtcatccggcagatcgaggcccaggagaagccaagggatgtatcatctgttgaactcttaatgaataatcatcaaggcatcaaagctgaaattgatgcacgtaatgacagtttcacaacctgcattgaacttgggaaatccctgttggcgagaaaacactatgcatctgaggagatcaaggaaaaattactgcagttgacggaaaagaggaaagaaatgatcgacaagtgggaagaccgatgggaatggttaagactgattctggaggtccatcagttctcaagagacgccagtgtggccgaggcctggctgcttggacaggagccgtacctatccagccgagagataggccagagcgtggacgaggtggagaagctcatcaagcgccacgaggcatttgaaaagtctgcagcaacctgggatgagaggttctctgccctggaaaggctgactacattggagttactggaagtgcgcagacagcaagaggaagaggagaggaagaggcggccgccttctcccgagccgagcacgaaggtttcagaggaagccgagtcccagcagcagtgggatacttcaaaaggagaacaagtttcccaaaacggtttgccagctgaacagggatctccacggatggcagaaacggtggacacaagcgaaatggtcaacggcgctacagaacaaaggacgagctctaaagagtccagccccatcccctccccgacctctgatcgtaaagccaagactgccctcccagcccagagtgccgccaccttaccagccagaacccaggagacaccttcggcccagatggaaggcttcctcaatcggaaacacgagtgggaggcccacaataagaaagcctcaagcaggtcctggcacaatgtttattgtgtcataaataaccaagaaatgggtttctacaaagatgcaaagactgctgcttctggaattccctaccacagcgaggtccctgtgagtttgaaagaagctgtctgcgaagtggcccttgattacaaaaagaagaaacacgtattcaagctaagagactaaatgatggcaatgagtacctcttccaagccaatcaggccacgtcgcgtccagcta

SEQ ID NO: 357103 - DNA, 7160 bp, Homo sapiens
gtgagctgaagcagggcagggcatcaactcacccaggaagtgcaaggggtttggggattttcctttcctagccaagggaaggcatgacagactgtacctggaaaaacaggacactcttgcccaaatactgcactttttgcacagtcttagcaactggcagaccaggagattctctcctgtgcctgattcattgggtcccacacccatagggccttgcttactgccagtgcagcagtctgagattaacaccccatccccgggagaactctaagaaggagctgatgtggaggagcagctgagacagttcaagatgacgaccacagtagccacagactatgacaacattgagatccagcagcagtacagtgatgtcaacaaccgctgggatgtcgacgactgggacaatgagaacagctctgcgcggctttttgagcggtcccgcatcaaggctctggcagatgagcgtgaagccgtgcagaagaagaccttcaccaagtgggtcaattcccaccttgcccgtgtgtcctgccggatcacagacctgtacactgaccttcgagatggacggatgctcatcaagctgctggaggtcctctctggagagaggctgcctaaacccaccaagggacgaatgcgcatccactgcttagagaatgtggacaaggcccttcagttcctgaaggagcagagagtccatcttgagaacatggggtcccatgacatcgtggatggaaaccaccggctgacccttggcctcatctggaccatcatcctgcgcttccagatccaggatatcagtgtggaaactgaagacaacaaagagaagaaatctgccaaggatgcattgctgttgtggtgccagatgaagacagctgggtaccccaatgtcaacattcacaatttcaccactagctggagggacggcatggccttcaatgcactgatacacaaacaccggcctgacctgatagattttgacaaactaaagaaatctaacgcacactacaacctgcagaatgcatttaatctggcagaacagcacctcggcctcactaaactgttggaccccgaagacatcagcgtggaccatcctgatgagaagtccataatcacttatgtggtgacttattaccactacttctctaagatgaaggccttagctgttgaaggaaaacgaattggaaaggtgcttgacaatgctattgaaacagaaaaaatgattgaaaagtatgaatcacttgcctctgaccttctggaatggattgaacaaaccatcatcattctgaacaatcgcaaatttgccaattcactggtcggggttcaacagcagcttcaggcattcaacacttaccgcactgtggagaaaccacccaaatttactgagaaggggaacttggaagtgctgctcttcaccattcagagcaagatgagggccaacaaccagaaggtctacatgccccgggaggggaagctcatctctgacatcaacaaggcctgggaaagactggaaaaagcggaacacgaaagagaactggctttgcggaatgagctcataagacaggagaaactggaacagctcgcccgcagatttgatcgcaaggcagctatgagggagacttggctgagcgaaaaccagcgtctggtgtctcaggacaactttgggtttgaccttcctgcagttgaggccgccacaaaaaagcacgaggccattgagacagacattgccgcatacgaggagcgtgtgcaggctgtggtagccgtggccagggagctcgaggccgagaattaccacgacatcaagcgcatcacagcgaggaaggacaatgtcatccggctctgggaatacctactggaactgctcagggcccggagacagcggctcgagatgaacctggggctgcagaagatattccaggaaatgctctacattatggactggatggatgaaatgaaggtgctagtattgtctcaagactatggcaaacacttacttggtgtggaagacctgttacagaagcacaccctggttgaagcagacattggcatccaggcagagcgggtgagaggtgtcaatgcctccgcccagaagttcgcaacagacggggaaggttacaagccctgtgacccccaggtgatccgagaccgcgtggcccacatggagttctgttatcaagagctttgccagctggcggctgagcgcagggcccgtctggaagagtcccgccgcctctggaagttcttctgggagatggcagaagaggaaggctggatacgggagaaggagaagatcctgtcctcggacgattacgggaaagacctgaccagcgtcatgcgcctgctcagcaagcaccgggcgttcgaggacgagatgagcggccgcagtggccactttgagcaggccatcaaggaaggcgaagacatgatcgcggaggagcacttcgggtcggagaagatccgtgagaggatcatttacatccgggagcagtgggccaacctagagcagctctcggccattcggaagaagcgcctggaggaggcctccctgctgcaccagttccaggcagatgctgatgacattgatgcctggatgctggacatcctcaagattgtctccagcagcgacgtgggccacgatgagtattccacacagtctctggtcaagaaacacaaggacgtggcggaagagatcgccaattacaggcccacccttgacacgctgcacgaacaagccagcgccctcccccaggagcatgccgagtctccagacgtgaggggcaggctgtcgggcatcgaggagcggtataaggaggtggcagagctgacgcggctgcggaagcaggcactccaggacactctggccctgtacaagatgttcagcgaggctgatgcctgtgagctctggatcgacgagaaggagcagtggctcaacaacatgcagatcccagagaagctggaggatctggaggtcatccagcacagatttgagagcctagaaccagaaatgaacaaccaggcttcccgggttgcagtggtgaaccagattgcacgccagctgatgcacagcggccacccaagtgagaaggaaatcaaagcccagcaggacaaactcaacacaaggtggagccagttcagagaactggttgacaggaagaaggatgccctcctgtctgccctgagcatccagaactaccacctcgagtgcaatgaaaccaaatcctggattcgggaaaagaccaaggtcatcgagtccacccaggacctgggcaatgacctggctggcgtcatggccctgcagcgcaagctgaccggcatggagcgggacttggtggccattgaggcaaagctgagtgacctgcagaaggaggcggagaagctggagtccgagcaccccgaccaggcccaggccatcctgtctcggctggccgagatcagcgacgtgtgggaggagatgaagaccaccctgaaaaaccgagaggcctccctgggagaggccagcaagctgcagcagttcctacgggacttggacgacttccagtcctggctctctaggacccagacagcgatcgcctcggaggacatgccaaacaccctgaccgaggctgagaagctgctcacgcagcacgagaacatcaagaacgagatcgacaactacgaggaggactaccagaagatgagggacatgggcgagatggtcacccaggggcagaccgatgcccagtacatgtttctgcggcagcggctgcaggccctggacactggatggaacgagctccacaagatgtgggagaacagacaaaatctcctatcccagtcacatgcctaccagcagttcctcagagacacgaagcaagccgaagcctttcttaacaaccaggagtatgttctggctcacactgaaatgcctaccaccttggaaggagctgaagcagcaattaaaaagcaagaggacttcatgaccaccatggacgccaatgaggagaagatcaatgctgtggtggagactggccggaggctggtgagcgatgggaacatcaactcagatcgcatccaggagaaggtggactctattgatgacagacataggaagaatcgtgagacagccagtgaacttttgatgaggttgaaggacaacagggatctacagaaattcctgcaagattgtcaagagctgtctctctggatcaatgagaagatgctcacagcccaggacatgtcttacgatgaagccagaaatctgcacagtaaatggttgaagcatcaagcatttatggcagaacttgcatccaacaaagaatggcttgacaaaatcgagaaggaaggaatgcagctcatttcagaaaagcctgagacggaagctgtggtgaaggagaaactcactggtttacataaaatgtgggaagtccttgaatccactacccagacaaaggcccagcggctctttgatgcaaacaaggccgaacttttcacccagagctgtgcagatctagacaaatggctgcacggcctggagagtcagattcagtctgatgactatggcaaagacctgaccagtgtcaatatcctgctgaaaaagcaacagatgctggagaatcagatggaagtgcggaagaaggagatcgaagagctccaaagccaagcccaggccctgagtcaggaagggaagagcaccgacgaggtagacagcaagcgcctcaccgtgcagaccaagttcatggagttgctggagcccttgaacgagaggaagcataacctgctggcctccaaagagatccatcagttcaacagggatgtggaggacgagatcttgtgggttggagagaggatgcctttggcaacttccacggatcatggccacaacctccagactgtgcagctgttaataaagaaaaatcagaccctccagaaagaaatccaggggcaccagcctcgcattgacgacatctttgagaggagccaaaacatcgtcactgacagcagcagcctcagcgctgaggccatcagacagaggcttgccgacctgaagcagctgtggggtctcctcattgaggagacagagaaacgccacaggcggctggaggaggcgcacagggcccagcagtactactttgacgctgctgaggccgaagcctggatgagcgagcaggagctgtacatgatgtcagaggagaaggccaaggatgagcagagtgctgtctccatgttgaagaagcaccagatcttagaacaagctgtggaggactatgcagagaccgtgcatcagctctccaagaccagccgggccctggtggccgacagccatcctgaaagtgagcgcattagcatgcggcagtccaaagtggataaactgtacgctggtctgaaagaccttgctgaagagagaagaggcaagctggatgagagacacaggttattccagctcaaccgggaggtggacgacctggagcagtggatcgctgagagggaggtggtcgcagggtcccatgaactgggacaggactatgagcatgtcacgatgttacaagaacgattccgggagtttgcccgagacaccgggaacattgggcaggagcgcgtggacacggtcaatcacctggcagatgagctcatcaactctggacattcagatgccgccaccatcgctgaatggaaggatggcctcaatgaagcctgggccgacctcctggagctcattgacacaagaacacagattcttgccgcttcctatgaactgcacaagttttaccacgatgccaaggagatctttgggcgtatacaggacaaacacaagaaactccctgaggagcttgggagagatcagaacacagtggagaccttacagagaatgcacactacatttgagcatgacatccaggctctgggcacacaggtgaggcagctgcaggaggatgcagcccgcctccaggcggcctatgcgggtgacaaggccgacgatatccagaagcgcgagaacgaggtcctggaagcctggaagtccctcctggacgcctgtgagagccgcagggtgcggctggtggacacaggggacaagttccgcttcttcagcatggtgcgcgacctcatgctctggatggaggatgtcatccggcagatcgaggcccaggagaagccaagggatgtatcatctgttgaactcttaatgaataatcatcaaggcatcaaagctgaaattgatgcacgtaatgacagtttcacaacctgcattgaacttgggaaatccctgttggcgagaaaacactatgcatctgaggagatcaaggaaaaattactgcagttgacggaaaagaggaaagaaatgatcgacaagtgggaagaccgatgggaatggttaagactgattctggaggtccatcagttctcaagagacgccagtgtggccgaggcctggctgcttggacaggagccgtacctatccagccgagagataggccagagcgtggacgaggtggagaagctcatcaagcgccacgaggcatttgaaaagtctgcagcaacctgggatgagaggttctctgccctggaaaggctgactacattggagttactggaagtgcgcagacagcaagaggaagaggagaggaagaggcggccgccttctcccgagccgagcacgaaggtttcagaggaagccgagtcccagcagcagtgggatacttcaaaaggagaacaagtttcccaaaacggtttgccagctgaacagggatctccacggatggcagaaacggtggacacaagcgaaatggtcaacggcgctacagaacaaaggacgagctctaaagagtccagccccatcccctccccgacctctgatcgtaaagccaagactgccctcccagcccagagtgccgccaccttaccagccagaacccaggagacaccttcggcccagatggaaggcttcctcaatcggaaacacgagtgggaggcccacaataagaaagcctcaagcaggtaacagcagcagaggctgccacagtaagatgggaagtcagcctgtgaagggataaggcgggccactcttgaattggaagagaagtatgtgctcatgtagttttattcctttggtagcttcctggacattgcattcttcttgggctgacgctggaaagcaggagtagaatgctggttattcactgagagaa

SEQ ID NO: 357104 - DNA, 7199 bp, Homo sapiens
gtgagctgaagcagggcagggcatcaactcacccaggaagtgcaaggggtttggggattttcctttcctagccaagggaaggcatgacagactgtacctggaaaaacaggacactcttgcccaaatactgcactttttgcacagtcttagcaactggcagaccaggagattctctcctgtgcctgattcattgggtcccacacccatagggccttgcttactgccagtgcagcagtctgagattaacaccccatccccgggagaactctaagaaggagctgatgtggaggagcagctgagacagttcaagatgacgaccacagtagccacagactatgacaacattgagatccagcagcagtacagtgatgtcaacaaccgctgggatgtcgacgactgggacaatgagaacagctctgcgcggctttttgagcggtcccgcatcaaggctctggcagatgagcgtgaagccgtgcagaagaagaccttcaccaagtgggtcaattcccaccttgcccgtgtgtcctgccggatcacagacctgtacactgaccttcgagatggacggatgctcatcaagctgctggaggtcctctctggagagaggctgcctaaacccaccaagggacgaatgcgcatccactgcttagagaatgtggacaaggcccttcagttcctgaaggagcagagagtccatcttgagaacatggggtcccatgacatcgtggatggaaaccaccggctgacccttggcctcatctggaccatcatcctgcgcttccagatccaggatatcagtgtggaaactgaagacaacaaagagaagaaatctgccaaggatgcattgctgttgtggtgccagatgaagacagctgggtaccccaatgtcaacattcacaatttcaccactagctggagggacggcatggccttcaatgcactgatacacaaacaccggcctgacctgatagattttgacaaactaaagaaatctaacgcacactacaacctgcagaatgcatttaatctggcagaacagcacctcggcctcactaaactgttggaccccgaagacatcagcgtggaccatcctgatgagaagtccataatcacttatgtggtgacttattaccactacttctctaagatgaaggccttagctgttgaaggaaaacgaattggaaaggtgcttgacaatgctattgaaacagaaaaaatgattgaaaagtatgaatcacttgcctctgaccttctggaatggattgaacaaaccatcatcattctgaacaatcgcaaatttgccaattcactggtcggggttcaacagcagcttcaggcattcaacacttaccgcactgtggagaaaccacccaaatttactgagaaggggaacttggaagtgctgctcttcaccattcagagcaagatgagggccaacaaccagaaggtctacatgccccgggaggggaagctcatctctgacatcaacaaggcctgggaaagactggaaaaagcggaacacgaaagagaactggctttgcggaatgagctcataagacaggagaaactggaacagctcgcccgcagatttgatcgcaaggcagctatgagggagacttggctgagcgaaaaccagcgtctggtgtctcaggacaactttgggtttgaccttcctgcagttgaggccgccacaaaaaagcacgaggccattgagacagacattgccgcatacgaggagcgtgtgcaggctgtggtagccgtggccagggagctcgaggccgagaattaccacgacatcaagcgcatcacagcgaggaaggacaatgtcatccggctctgggaatacctactggaactgctcagggcccggagacagcggctcgagatgaacctggggctgcagaagatattccaggaaatgctctacattatggactggatggatgaaatgaaggtgctagtattgtctcaagactatggcaaacacttacttggtgtggaagacctgttacagaagcacaccctggttgaagcagacattggcatccaggcagagcgggtgagaggtgtcaatgcctccgcccagaagttcgcaacagacggggaaggttacaagccctgtgacccccaggtgatccgagaccgcgtggcccacatggagttctgttatcaagagctttgccagctggcggctgagcgcagggcccgtctggaagagtcccgccgcctctggaagttcttctgggagatggcagaagaggaaggctggatacgggagaaggagaagatcctgtcctcggacgattacgggaaagacctgaccagcgtcatgcgcctgctcagcaagcaccgggcgttcgaggacgagatgagcggccgcagtggccactttgagcaggccatcaaggaaggcgaagacatgatcgcggaggagcacttcgggtcggagaagatccgtgagaggatcatttacatccgggagcagtgggccaacctagagcagctctcggccattcggaagaagcgcctggaggaggcctccctgctgcaccagttccaggcagatgctgatgacattgatgcctggatgctggacatcctcaagattgtctccagcagcgacgtgggccacgatgagtattccacacagtctctggtcaagaaacacaaggacgtggcggaagagatcgccaattacaggcccacccttgacacgctgcacgaacaagccagcgccctcccccaggagcatgccgagtctccagacgtgaggggcaggctgtcgggcatcgaggagcggtataaggaggtggcagagctgacgcggctgcggaagcaggcactccaggacactctggccctgtacaagatgttcagcgaggctgatgcctgtgagctctggatcgacgagaaggagcagtggctcaacaacatgcagatcccagagaagctggaggatctggaggtcatccagcacagatttgagagcctagaaccagaaatgaacaaccaggcttcccgggttgcagtggtgaaccagattgcacgccagctgatgcacagcggccacccaagtgagaaggaaatcaaagcccagcaggacaaactcaacacaaggtggagccagttcagagaactggttgacaggaagaaggatgccctcctgtctgccctgagcatccagaactaccacctcgagtgcaatgaaaccaaatcctggattcgggaaaagaccaaggtcatcgagtccacccaggacctgggcaatgacctggctggcgtcatggccctgcagcgcaagctgaccggcatggagcgggacttggtggccattgaggcaaagctgagtgacctgcagaaggaggcggagaagctggagtccgagcaccccgaccaggcccaggccatcctgtctcggctggccgagatcagcgacgtgtgggaggagatgaagaccaccctgaaaaaccgagaggcctccctgggagaggccagcaagctgcagcagttcctacgggacttggacgacttccagtcctggctctctaggacccagacagcgatcgcctcggaggacatgccaaacaccctgaccgaggctgagaagctgctcacgcagcacgagaacatcaagaacgagatcgacaactacgaggaggactaccagaagatgagggacatgggcgagatggtcacccaggggcagaccgatgcccagtacatgtttctgcggcagcggctgcaggccctggacactggatggaacgagctccacaagatgtgggagaacagacaaaatctcctatcccagtcacatgcctaccagcagttcctcagagacacgaagcaagccgaagcctttcttaacaaccaggagtatgttctggctcacactgaaatgcctaccaccttggaaggagctgaagcagcaattaaaaagcaagaggacttcatgaccaccatggacgccaatgaggagaagatcaatgctgtggtggagactggccggaggctggtgagcgatgggaacatcaactcagatcgcatccaggagaaggtggactctattgatgacagacataggaagaatcgtgagacagccagtgaacttttgatgaggttgaaggacaacagggatctacagaaattcctgcaagattgtcaagagctgtctctctggatcaatgagaagatgctcacagcccaggacatgtcttacgatgaagccagaaatctgcacagtaaatggttgaagcatcaagcatttatggcagaacttgcatccaacaaagaatggcttgacaaaatcgagaaggaaggaatgcagctcatttcagaaaagcctgagacggaagctgtggtgaaggagaaactcactggtttacataaaatgtgggaagtccttgaatccactacccagacaaaggcccagcggctctttgatgcaaacaaggccgaacttttcacccagagctgtgcagatctagacaaatggctgcacggcctggagagtcagattcagtctgatgactatggcaaagacctgaccagtgtcaatatcctgctgaaaaagcaacagatgctggagaatcagatggaagtgcggaagaaggagatcgaagagctccaaagccaagcccaggccctgagtcaggaagggaagagcaccgacgaggtagacagcaagcgcctcaccgtgcagaccaagttcatggagttgctggagcccttgaacgagaggaagcataacctgctggcctccaaagagatccatcagttcaacagggatgtggaggacgagatcttgtgggttggagagaggatgcctttggcaacttccacggatcatggccacaacctccagactgtgcagctgttaataaagaaaaatcagaccctccagaaagaaatccaggggcaccagcctcgcattgacgacatctttgagaggagccaaaacatcgtcactgacagcagcagcctcagcgctgaggccatcagacagaggcttgccgacctgaagcagctgtggggtctcctcattgaggagacagagaaacgccacaggcggctggaggaggcgcacagggcccagcagtactactttgacgctgctgaggccgaagcctggatgagcgagcaggagctgtacatgatgtcagaggagaaggccaaggatgagcagagtgctgtctccatgttgaagaagcaccagatcttagaacaagctgtggaggactatgcagagaccgtgcatcagctctccaagaccagccgggccctggtggccgacagccatcctgaaagtgagcgcattagcatgcggcagtccaaagtggataaactgtacgctggtctgaaagaccttgctgaagagagaagaggcaagctggatgagagacacaggttattccagctcaaccgggaggtggacgacctggagcagtggatcgctgagagggaggtggtcgcagggtcccatgaactgggacaggactatgagcatgtcacgatgttacaagaacgattccgggagtttgcccgagacaccgggaacattgggcaggagcgcgtggacacggtcaatcacctggcagatgagctcatcaactctggacattcagatgccgccaccatcgctgaatggaaggatggcctcaatgaagcctgggccgacctcctggagctcattgacacaagaacacagattcttgccgcttcctatgaactgcacaagttttaccacgatgccaaggagatctttgggcgtatacaggacaaacacaagaaactccctgaggagcttgggagagatcagaacacagtggagaccttacagagaatgcacactacatttgagcatgacatccaggctctgggcacacaggtgaggcagctgcaggaggatgcagcccgcctccaggcggcctatgcgggtgacaaggccgacgatatccagaagcgcgagaacgaggtcctggaagcctggaagtccctcctggacgcctgtgagagccgcagggtgcggctggtggacacaggggacaagttccgcttcttcagcatggtgcgcgacctcatgctctggatggaggatgtcatccggcagatcgaggcccaggagaagccaagggatgtatcatctgttgaactcttaatgaataatcatcaaggcatcaaagctgaaattgatgcacgtaatgacagtttcacaacctgcattgaacttgggaaatccctgttggcgagaaaacactatgcatctgaggagatcaaggaaaaattactgcagttgacggaaaagaggaaagaaatgatcgacaagtgggaagaccgatgggaatggttaagactgattctggaggtccatcagttctcaagagacgccagtgtggccgaggcctggctgcttggacaggagccgtacctatccagccgagagataggccagagcgtggacgaggtggagaagctcatcaagcgccacgaggcatttgaaaagtctgcagcaacctgggatgagaggttctctgccctggaaaggctgactacattggagttactggaagtgcgcagacagcaagaggaagaggagaggaagaggcggccgccttctcccgagccgagcacgaaggtttcagaggaagccgagtcccagcagcagtgggatacttcaaaaggagaacaagtttcccaaaacggtttgccagctgaacagggatctccacggatggcagaaacggtggacacaagcgaaatggtcaacggcgctacagaacaaaggacgagctctaaagagtccagccccatcccctccccgacctctgatcgtaaagccaagactgccctcccagcccagagtgccgccaccttaccagccagaacccaggagacaccttcggcccagatggaaggcttcctcaatcggaaacacgagtgggaggcccacaataagaaagcctcaagcaggaatggtttcaagaagcaggaactggccagttcaatttattttttattatgctagcataattttaaaagtctatatacatgtgcttttgtgcctcagaccctttttggaatgaggtatggtataaatataaaaagtattttgttaaccagttaccaagaatgaaaactgattttgcacgtcggacaagatgatcacatacagtggcagccttgaaaagacctgtttcaga

SEQ ID NO: 357105 - DNA, 5800 bp, Homo sapiens
gtgagctgaagcagggcagggcatcaactcacccaggaagtgcaaggggtttggggattttcctttcctagccaagggaaggcatgacagactgtacctggaaaaacaggacactcttgcccaaatactgcactttttgcacagtcttagcaactggcagaccaggagattctctcctgtgcctgattcattgggtcccacacccatagggccttgcttactgccagtgcagcagtctgagattaacaccccatccccgggagaactctaagaaggagctgatgtggaggagcagctgagacagttcaagatgacgaccacagtagccacagactatgacaacattgagatccagcagcagtacagtgatgtcaacaaccgctgggatgtcgacgactgggacaatgagaacagctctgcgcggctttttgagcggtcccgcatcaaggctctggcagatgagcgtgaagccgtgcagaagaagaccttcaccaagtgggtcaattcccaccttgcccgtgtgtcctgccggatcacagacctgtacactgaccttcgagatggacggatgctcatcaagctgctggaggtcctctctggagagaggctgcctaaacccaccaagggacgaatgcgcatccactgcttagagaatgtggacaaggcccttcagttcctgaaggagcagagagtccatcttgagaacatggggtcccatgacatcgtggatggaaaccaccggctgacccttggcctcatctggaccatcatcctgcgcttccagatccaggatatcagtgtggaaactgaagacaacaaagagaagaaatctgccaaggatgcattgctgttgtggtgccagatgaagacagctgggtaccccaatgtcaacattcacaatttcaccactagctggagggacggcatggccttcaatgcactgatacacaaacaccggcctgacctgatagattttgacaaactaaagaaatctaacgcacactacaacctgcagaatgcatttaatctggcagaacagcacctcggcctcactaaactgttggaccccgaagacatcagcgtggaccatcctgatgagaagtccataatcacttatgtggtgacttattaccactacttctctaagatgaaggccttagctgttgaaggaaaacgaattggaaaggtgcttgacaatgctattgaaacagaaaaaatgattgaaaagtatgaatcacttgcctctgaccttctggaatggattgaacaaaccatcatcattctgaacaatcgcaaatttgccaattcactggtcggggttcaacagcagcttcaggcattcaacacttaccgcactgtggagaaaccacccaaatttactgagaaggggaacttggaagtgctgctcttcaccattcagagcaagatgagggccaacaaccagaaggtctacatgccccgggaggggaagctcatctctgacatcaacaaggcctgggaaagactggaaaaagcggaacacgaaagagaactggctttgcggaatgagctcataagacaggagaaactggaacagctcgcccgcagatttgatcgcaaggcagctatgagggagacttggctgagcgaaaaccagcgtctggtgtctcaggacaactttgggtttgaccttcctgcagttgaggccgccacaaaaaagcacgaggccattgagacagacattgccgcatacgaggagcgtgtgcaggctgtggtagccgtggccagggagctcgaggccgagaattaccacgacatcaagcgcatcacagcgaggaaggacaatgtcatccggctctgggaatacctactggaactgctcagggcccggagacagcggctcgagatgaacctggggctgcagaagatattccaggaaatgctctacattatggactggatggatgaaatgaaggtgctagtattgtctcaagactatggcaaacacttacttggtgtggaagacctgttacagaagcacaccctggttgaagcagacattggcatccaggcagagcgggtgagaggtgtcaatgcctccgcccagaagttcgcaacagacggggaaggttacaagccctgtgacccccaggtgatccgagaccgcgtggcccacatggagttctgttatcaagagctttgccagctggcggctgagcgcagggcccgtctggaagagtcccgccgcctctggaagttcttctgggagatggcagaagaggaaggctggatacgggagaaggagaagatcctgtcctcggacgattacgggaaagacctgaccagcgtcatgcgcctgctcagcaagcaccgggcgttcgaggacgagatgagcggccgcagtggccactttgagcaggccatcaaggaaggcgaagacatgatcgcggaggagcacttcgggtcggagaagatccgtgagaggatcatttacatccgggagcagtgggccaacctagagcagctctcggccattcggaagaagcgcctggaggaggcctccctgctgcaccagttccaggcagatgctgatgacattgatgcctggatgctggacatcctcaagattgtctccagcagcgacgtgggccacgatgagtattccacacagtctctggtcaagaaacacaaggacgtggcggaagagatcgccaattacaggcccacccttgacacgctgcacgaacaagccagcgccctcccccaggagcatgccgagtctccagacgtgaggggcaggctgtcgggcatcgaggagcggtataaggaggtggcagagctgacgcggctgcggaagcaggcactccaggacactctggccctgtacaagatgttcagcgaggctgatgcctgtgagctctggatcgacgagaaggagcagtggctcaacaacatgcagatcccagagaagctggaggatctggaggtcatccagcacagatttgagagcctagaaccagaaatgaacaaccaggcttcccgggttgcagtggtgaaccagattgcacgccagctgatgcacagcggccacccaagtgagaaggaaatcaaagcccagcaggacaaactcaacacaaggtggagccagttcagagaactggttgacaggaagaaggatgccctcctgtctgccctgagcatccagaactaccacctcgagtgcaatgaaaccaaatcctggattcgggaaaagaccaaggtcatcgagtccacccaggacctgggcaatgacctggctggcgtcatggccctgcagcgcaagctgaccggcatggagcgggacttggtggccattgaggcaaagctgagtgacctgcagaaggaggcggagaagctggagtccgagcaccccgaccaggcccaggccatcctgtctcggctggccgagatcagcgacgtgtgggaggagatgaagaccaccctgaaaaaccgagaggcctccctgggagaggccagcaagctgcagcagttcctacgggacttggacgacttccagtcctggctctctaggacccagacagcgatcgcctcggaggacatgccaaacaccctgaccgaggctgagaagctgctcacgcagcacgagaacatcaagaacgagatcgacaactacgaggaggactaccagaagatgagggacatgggcgagatggtcacccaggggcagaccgatgcccagtacatgtttctgcggcagcggctgcaggccctggacactggatggaacgagctccacaagatgtgggagaacagacaaaatctcctatcccagtcacatgcctaccagcagttcctcagagacacgaagcaagccgaagcctttcttaacaaccaggagtatgttctggctcacactgaaatgcctaccaccttggaaggagctgaagcagcaattaaaaagcaagaggacttcatgaccaccatggacgccaatgaggagaagatcaatgctgtggtggagactggccggaggctggtgagcgatgggaacatcaactcagatcgcatccaggagaaggtggactctattgatgacagacataggaagaatcgtgagacagccagtgaacttttgatgaggttgaaggacaacagggatctacagaaattcctgcaagattgtcaagagctgtctctctggatcaatgagaagatgctcacagcccaggacatgtcttacgatgaagccagaaatctgcacagtaaatggttgaagcatcaagcatttatggcagaacttgcatccaacaaagaatggcttgacaaaatcgagaaggaaggaatgcagctcatttcagaaaagcctgagacggaagctgtggtgaaggagaaactcactggtttacataaaatgtgggaagtccttgaatccactacccagacaaaggcccagcggctctttgatgcaaacaaggccgaacttttcacccagagctgtgcagatctagacaaatggctgcacggcctggagagtcagattcagtctgatgactatggcaaagacctgaccagtgtcaatatcctgctgaaaaagcaacagatgctggagaatcagatggaagtgcggaagaaggagatcgaagagctccaaagccaagcccaggccctgagtcaggaagggaagagcaccgacgaggtagacagcaagcgcctcaccgtgcagaccaagttcatggagttgctggagcccttgaacgagaggaagcataacctgctggcctccaaagagatccatcagttcaacagggatgtggaggacgagatcttgtgggttggagagaggatgcctttggcaacttccacggatcatggccacaacctccagactgtgcagctgttaataaagaaaaatcagaccctccagaaagaaatccaggggcaccagcctcgcattgacgacatctttgagaggagccaaaacatcgtcactgacagcagcagcctcagcgctgaggccatcagacagaggcttgccgacctgaagcagctgtggggtctcctcattgaggagacagagaaacgccacaggcggctggaggaggcgcacagggcccagcagtactactttgacgctgctgaggccgaagcctggatgagcgagcaggagctgtacatgatgtcagaggagaaggccaaggatgagcagagtgctgtctccatgttgaagaagcaccagatcttagaacaagctgtggaggactatgcagagaccgtgcatcagctctccaagaccagccgggccctggtggccgacagccatcctgaaagtgagcgcattagcatgcggcagtccaaagtggataaactgtacgctggtctgaaagaccttgctgaagagagaagaggcaagctggatgagagacacaggttattccagctcaaccgggaggtggacgacctggagcagtggatcgctgagagggaggtggtcgcagggtcccatgaactgggacaggactatgagcatgtcacgatgttacaagaacgattccgggagtttgcccgagacaccgggaacattgggcaggagcgcgtggacacggtcaatcacctggcagatgagctcatcaactctggacattcagatgccgccaccatcgctgaatggaaggatggcctcaatgaagcctgggccgacctcctggagctcattgacacaagaacacagattcttgccgcttcctatgaactgcacaagttttaccacgatgccaaggagatctttgacgatctacagggtgtcagacgagtctacagtgca

SEQ ID NO: 357106 - DNA, 5258 bp, Homo sapiens
gtgagctgaagcagggcagggcatcaactcacccaggaagtgcaaggggtttggggattttcctttcctagccaagggaaggcatgacagactgtacctggaaaaacaggacactcttgcccaaatactgcactttttgcacagtcttagcaactggcagaccaggagattctctcctgtgcctgattcattgggtcccacacccatagggccttgcttactgccagtgcagcagtctgagattaacaccccatccccgggagaactctaagaaggagctgatgtggaggagcagctgagacagttcaagatgacgaccacagtagccacagactatgacaacattgagatccagcagcagtacagtgatgtcaacaaccgctgggatgtcgacgactgggacaatgagaacagctctgcgcggctttttgagcggtcccgcatcaaggctctggcagatgagcgtgaagccgtgcagaagaagaccttcaccaagtgggtcaattcccaccttgcccgtgtgtcctgccggatcacagacctgtacactgaccttcgagatggacggatgctcatcaagctgctggaggtcctctctggagagaggctgcctaaacccaccaagggacgaatgcgcatccactgcttagagaatgtggacaaggcccttcagttcctgaaggagcagagagtccatcttgagaacatggggtcccatgacatcgtggatggaaaccaccggctgacccttggcctcatctggaccatcatcctgcgcttccagatccaggatatcagtgtggaaactgaagacaacaaagagaagaaatctgccaaggatgcattgctgttgtggtgccagatgaagacagctgggtaccccaatgtcaacattcacaatttcaccactagctggagggacggcatggccttcaatgcactgatacacaaacaccggcctgacctgatagattttgacaaactaaagaaatctaacgcacactacaacctgcagaatgcatttaatctggcagaacagcacctcggcctcactaaactgttggaccccgaagacatcagcgtggaccatcctgatgagaagtccataatcacttatgtggtgacttattaccactacttctctaagatgaaggccttagctgttgaaggaaaacgaattggaaaggtgcttgacaatgctattgaaacagaaaaaatgattgaaaagtatgaatcacttgcctctgaccttctggaatggattgaacaaaccatcatcattctgaacaatcgcaaatttgccaattcactggtcggggttcaacagcagcttcaggcattcaacacttaccgcactgtggagaaaccacccaaatttactgagaaggggaacttggaagtgctgctcttcaccattcagagcaagatgagggccaacaaccagaaggtctacatgccccgggaggggaagctcatctctgacatcaacaaggcctgggaaagactggaaaaagcggaacacgaaagagaactggctttgcggaatgagctcataagacaggagaaactggaacagctcgcccgcagatttgatcgcaaggcagctatgagggagacttggctgagcgaaaaccagcgtctggtgtctcaggacaactttgggtttgaccttcctgcagttgaggccgccacaaaaaagcacgaggccattgagacagacattgccgcatacgaggagcgtgtgcaggctgtggtagccgtggccagggagctcgaggccgagaattaccacgacatcaagcgcatcacagcgaggaaggacaatgtcatccggctctgggaatacctactggaactgctcagggcccggagacagcggctcgagatgaacctggggctgcagaagatattccaggaaatgctctacattatggactggatggatgaaatgaaggtgctagtattgtctcaagactatggcaaacacttacttggtgtggaagacctgttacagaagcacaccctggttgaagcagacattggcatccaggcagagcgggtgagaggtgtcaatgcctccgcccagaagttcgcaacagacggggaaggttacaagccctgtgacccccaggtgatccgagaccgcgtggcccacatggagttctgttatcaagagctttgccagctggcggctgagcgcagggcccgtctggaagagtcccgccgcctctggaagttcttctgggagatggcagaagaggaaggctggatacgggagaaggagaagatcctgtcctcggacgattacgggaaagacctgaccagcgtcatgcgcctgctcagcaagcaccgggcgttcgaggacgagatgagcggccgcagtggccactttgagcaggccatcaaggaaggcgaagacatgatcgcggaggagcacttcgggtcggagaagatccgtgagaggatcatttacatccgggagcagtgggccaacctagagcagctctcggccattcggaagaagcgcctggaggaggcctccctgctgcaccagttccaggcagatgctgatgacattgatgcctggatgctggacatcctcaagattgtctccagcagcgacgtgggccacgatgagtattccacacagtctctggtcaagaaacacaaggacgtggcggaagagatcgccaattacaggcccacccttgacacgctgcacgaacaagccagcgccctcccccaggagcatgccgagtctccagacgtgaggggcaggctgtcgggcatcgaggagcggtataaggaggtggcagagctgacgcggctgcggaagcaggcactccaggacactctggccctgtacaagatgttcagcgaggctgatgcctgtgagctctggatcgacgagaaggagcagtggctcaacaacatgcagatcccagagaagctggaggatctggaggtcatccagcacagatttgagagcctagaaccagaaatgaacaaccaggcttcccgggttgcagtggtgaaccagattgcacgccagctgatgcacagcggccacccaagtgagaaggaaatcaaagcccagcaggacaaactcaacacaaggtggagccagttcagagaactggttgacaggaagaaggatgccctcctgtctgccctgagcatccagaactaccacctcgagtgcaatgaaaccaaatcctggattcgggaaaagaccaaggtcatcgagtccacccaggacctgggcaatgacctggctggcgtcatggccctgcagcgcaagctgaccggcatggagcgggacttggtggccattgaggcaaagctgagtgacctgcagaaggaggcggagaagctggagtccgagcaccccgaccaggcccaggccatcctgtctcggctggccgagatcagcgacgtgtgggaggagatgaagaccaccctgaaaaaccgagaggcctccctgggagaggccagcaagctgcagcagttcctacgggacttggacgacttccagtcctggctctctaggacccagacagcgatcgcctcggaggacatgccaaacaccctgaccgaggctgagaagctgctcacgcagcacgagaacatcaagaacgagatcgacaactacgaggaggactaccagaagatgagggacatgggcgagatggtcacccaggggcagaccgatgcccagtacatgtttctgcggcagcggctgcaggccctggacactggatggaacgagctccacaagatgtgggagaacagacaaaatctcctatcccagtcacatgcctaccagcagttcctcagagacacgaagcaagccgaagcctttcttaacaaccaggagtatgttctggctcacactgaaatgcctaccaccttggaaggagctgaagcagcaattaaaaagcaagaggacttcatgaccaccatggacgccaatgaggagaagatcaatgctgtggtggagactggccggaggctggtgagcgatgggaacatcaactcagatcgcatccaggagaaggtggactctattgatgacagacataggaagaatcgtgagacagccagtgaacttttgatgaggttgaaggacaacagggatctacagaaattcctgcaagattgtcaagagctgtctctctggatcaatgagaagatgctcacagcccaggacatgtcttacgatgaagccagaaatctgcacagtaaatggttgaagcatcaagcatttatggcagaacttgcatccaacaaagaatggcttgacaaaatcgagaaggaaggaatgcagctcatttcagaaaagcctgagacggaagctgtggtgaaggagaaactcactggtttacataaaatgtgggaagtccttgaatccactacccagacaaaggcccagcggctctttgatgcaaacaaggccgaacttttcacccagagctgtgcagatctagacaaatggctgcacggcctggagagtcagattcagtctgatgactatggcaaagacctgaccagtgtcaatatcctgctgaaaaagcaacagatgctggagaatcagatggaagtgcggaagaaggagatcgaagagctccaaagccaagcccaggccctgagtcaggaagggaagagcaccgacgaggtagacagcaagcgcctcaccgtgcagaccaagttcatggagttgctggagcccttgaacgagaggaagcataacctgctggcctccaaagagatccatcagttcaacagggatgtggaggacgagatcttgtgggttggagagaggatgcctttggcaacttccacggatcatggccacaacctccagactgtgcagctgttaataaagaaaaatcagaccctccagaaagaaatccaggggcaccagcctcgcattgacgacatctttgagaggagccaaaacatcgtcactgacagcagcagcctcagcgctgaggccatcagacagaggcttgccgacctgaagcagctgtggggtctcctcattgaggagacagagaaacgccacaggcggctggaggaggcgcacagggcccagcagtactactttgacgctgctgaggccgaagcctggatgagcgagcaggagctgtacatgatgtcagaggagaaggccaaggatgagcagagtgctgtctccatggcttgaaaagcctgagacagctgtcttgtgagggactgagatgcaggatttcataaac

SEQ ID NO: 357107 - DNA, 4141 bp, Homo sapiens
gtgagctgaagcagggcagggcatcaactcacccaggaagtgcaaggggtttggggattttcctttcctagccaagggaaggcatgacagactgtacctggaaaaacaggacactcttgcccaaatactgcactttttgcacagtcttagcaactggcagaccaggagattctctcctgtgcctgattcattgggtcccacacccatagggccttgcttactgccagtgcagcagtctgagattaacaccccatccccgggagaactctaagaaggagctgatgtggaggagcagctgagacagttcaagatgacgaccacagtagccacagactatgacaacattgagatccagcagcagtacagtgatgtcaacaaccgctgggatgtcgacgactgggacaatgagaacagctctgcgcggctttttgagcggtcccgcatcaaggctctggcagatgagcgtgaagccgtgcagaagaagaccttcaccaagtgggtcaattcccaccttgcccgtgtgtcctgccggatcacagacctgtacactgaccttcgagatggacggatgctcatcaagctgctggaggtcctctctggagagaggctgcctaaacccaccaagggacgaatgcgcatccactgcttagagaatgtggacaaggcccttcagttcctgaaggagcagagagtccatcttgagaacatggggtcccatgacatcgtggatggaaaccaccggctgacccttggcctcatctggaccatcatcctgcgcttccagatccaggatatcagtgtggaaactgaagacaacaaagagaagaaatctgccaaggatgcattgctgttgtggtgccagatgaagacagctgggtaccccaatgtcaacattcacaatttcaccactagctggagggacggcatggccttcaatgcactgatacacaaacaccggcctgacctgatagattttgacaaactaaagaaatctaacgcacactacaacctgcagaatgcatttaatctggcagaacagcacctcggcctcactaaactgttggaccccgaagacatcagcgtggaccatcctgatgagaagtccataatcacttatgtggtgacttattaccactacttctctaagatgaaggccttagctgttgaaggaaaacgaattggaaaggtgcttgacaatgctattgaaacagaaaaaatgattgaaaagtatgaatcacttgcctctgaccttctggaatggattgaacaaaccatcatcattctgaacaatcgcaaatttgccaattcactggtcggggttcaacagcagcttcaggcattcaacacttaccgcactgtggagaaaccacccaaatttactgagaaggggaacttggaagtgctgctcttcaccattcagagcaagatgagggccaacaaccagaaggtctacatgccccgggaggggaagctcatctctgacatcaacaaggcctgggaaagactggaaaaagcggaacacgaaagagaactggctttgcggaatgagctcataagacaggagaaactggaacagctcgcccgcagatttgatcgcaaggcagctatgagggagacttggctgagcgaaaaccagcgtctggtgtctcaggacaactttgggtttgaccttcctgcagttgaggccgccacaaaaaagcacgaggccattgagacagacattgccgcatacgaggagcgtgtgcaggctgtggtagccgtggccagggagctcgaggccgagaattaccacgacatcaagcgcatcacagcgaggaaggacaatgtcatccggctctgggaatacctactggaactgctcagggcccggagacagcggctcgagatgaacctggggctgcagaagatattccaggaaatgctctacattatggactggatggatgaaatgaaggtgctagtattgtctcaagactatggcaaacacttacttggtgtggaagacctgttacagaagcacaccctggttgaagcagacattggcatccaggcagagcgggtgagaggtgtcaatgcctccgcccagaagttcgcaacagacggggaaggttacaagccctgtgacccccaggtgatccgagaccgcgtggcccacatggagttctgttatcaagagctttgccagctggcggctgagcgcagggcccgtctggaagagtcccgccgcctctggaagttcttctgggagatggcagaagaggaaggctggatacgggagaaggagaagatcctgtcctcggacgattacgggaaagacctgaccagcgtcatgcgcctgctcagcaagcaccgggcgttcgaggacgagatgagcggccgcagtggccactttgagcaggccatcaaggaaggcgaagacatgatcgcggaggagcacttcgggtcggagaagatccgtgagaggatcatttacatccgggagcagtgggccaacctagagcagctctcggccattcggaagaagcgcctggaggaggcctccctgctgcaccagttccaggcagatgctgatgacattgatgcctggatgctggacatcctcaagattgtctccagcagcgacgtgggccacgatgagtattccacacagtctctggtcaagaaacacaaggacgtggcggaagagatcgccaattacaggcccacccttgacacgctgcacgaacaagccagcgccctcccccaggagcatgccgagtctccagacgtgaggggcaggctgtcgggcatcgaggagcggtataaggaggtggcagagctgacgcggctgcggaagcaggcactccaggacactctggccctgtacaagatgttcagcgaggctgatgcctgtgagctctggatcgacgagaaggagcagtggctcaacaacatgcagatcccagagaagctggaggatctggaggtcatccagcacagatttgagagcctagaaccagaaatgaacaaccaggcttcccgggttgcagtggtgaaccagattgcacgccagctgatgcacagcggccacccaagtgagaaggaaatcaaagcccagcaggacaaactcaacacaaggtggagccagttcagagaactggttgacaggaagaaggatgccctcctgtctgccctgagcatccagaactaccacctcgagtgcaatgaaaccaaatcctggattcgggaaaagaccaaggtcatcgagtccacccaggacctgggcaatgacctggctggcgtcatggccctgcagcgcaagctgaccggcatggagcgggacttggtggccattgaggcaaagctgagtgacctgcagaaggaggcggagaagctggagtccgagcaccccgaccaggcccaggccatcctgtctcggctggccgagatcagcgacgtgtgggaggagatgaagaccaccctgaaaaaccgagaggcctccctgggagaggccagcaagctgcagcagttcctacgggacttggacgacttccagtcctggctctctaggacccagacagcgatcgcctcggaggacatgccaaacaccctgaccgaggctgagaagctgctcacgcagcacgagaacatcaagaacgagatcgacaactacgaggaggactaccagaagatgagggacatgggcgagatggtcacccaggggcagaccgatgcccagtacatgtttctgcggcagcggctgcaggccctggacactggatggaacgagctccacaagatgtgggagaacagacaaaatctcctatcccagtcacatgcctaccagcagttcctcagagacacgaagcaagccgaagcctttcttaacaaccaggagtatgttctggctcacactgaaatgcctaccaccttggaaggagctgaagcagcaattaaaaagcaagaggacttcatgaccaccatggacgccaatgaggagaagatcaatgctgtggtggagactggccggaggctggtgagcgatgggaacatcaactcagatcgcatccaggagaaggtggactctattgatgacagacataggaagaatcgtgagacagccagtagtgggtcagccagtagggggtcagccagtagtggg

SEQ ID NO: 357108 - DNA, 3385 bp, Homo sapiens
  misc_feature (3352)..(3352): n is a, c, g, or t
  misc_feature (3362)..(3363): n is a, c, g, or t
gtgagctgaagcagggcagggcatcaactcacccaggaagtgcaaggggtttggggattttcctttcctagccaagggaaggcatgacagactgtacctggaaaaacaggacactcttgcccaaatactgcactttttgcacagtcttagcaactggcagaccaggagattctctcctgtgcctgattcattgggtcccacacccatagggccttgcttactgccagtgcagcagtctgagattaacaccccatccccgggagaactctaagaaggagctgatgtggaggagcagctgagacagttcaagatgacgaccacagtagccacagactatgacaacattgagatccagcagcagtacagtgatgtcaacaaccgctgggatgtcgacgactgggacaatgagaacagctctgcgcggctttttgagcggtcccgcatcaaggctctggcagatgagcgtgaagccgtgcagaagaagaccttcaccaagtgggtcaattcccaccttgcccgtgtgtcctgccggatcacagacctgtacactgaccttcgagatggacggatgctcatcaagctgctggaggtcctctctggagagaggctgcctaaacccaccaagggacgaatgcgcatccactgcttagagaatgtggacaaggcccttcagttcctgaaggagcagagagtccatcttgagaacatggggtcccatgacatcgtggatggaaaccaccggctgacccttggcctcatctggaccatcatcctgcgcttccagatccaggatatcagtgtggaaactgaagacaacaaagagaagaaatctgccaaggatgcattgctgttgtggtgccagatgaagacagctgggtaccccaatgtcaacattcacaatttcaccactagctggagggacggcatggccttcaatgcactgatacacaaacaccggcctgacctgatagattttgacaaactaaagaaatctaacgcacactacaacctgcagaatgcatttaatctggcagaacagcacctcggcctcactaaactgttggaccccgaagacatcagcgtggaccatcctgatgagaagtccataatcacttatgtggtgacttattaccactacttctctaagatgaaggccttagctgttgaaggaaaacgaattggaaaggtgcttgacaatgctattgaaacagaaaaaatgattgaaaagtatgaatcacttgcctctgaccttctggaatggattgaacaaaccatcatcattctgaacaatcgcaaatttgccaattcactggtcggggttcaacagcagcttcaggcattcaacacttaccgcactgtggagaaaccacccaaatttactgagaaggggaacttggaagtgctgctcttcaccattcagagcaagatgagggccaacaaccagaaggtctacatgccccgggaggggaagctcatctctgacatcaacaaggcctgggaaagactggaaaaagcggaacacgaaagagaactggctttgcggaatgagctcataagacaggagaaactggaacagctcgcccgcagatttgatcgcaaggcagctatgagggagacttggctgagcgaaaaccagcgtctggtgtctcaggacaactttgggtttgaccttcctgcagttgaggccgccacaaaaaagcacgaggccattgagacagacattgccgcatacgaggagcgtgtgcaggctgtggtagccgtggccagggagctcgaggccgagaattaccacgacatcaagcgcatcacagcgaggaaggacaatgtcatccggctctgggaatacctactggaactgctcagggcccggagacagcggctcgagatgaacctggggctgcagaagatattccaggaaatgctctacattatggactggatggatgaaatgaaggtgctagtattgtctcaagactatggcaaacacttacttggtgtggaagacctgttacagaagcacaccctggttgaagcagacattggcatccaggcagagcgggtgagaggtgtcaatgcctccgcccagaagttcgcaacagacggggaaggttacaagccctgtgacccccaggtgatccgagaccgcgtggcccacatggagttctgttatcaagagctttgccagctggcggctgagcgcagggcccgtctggaagagtcccgccgcctctggaagttcttctgggagatggcagaagaggaaggctggatacgggagaaggagaagatcctgtcctcggacgattacgggaaagacctgaccagcgtcatgcgcctgctcagcaagcaccgggcgttcgaggacgagatgagcggccgcagtggccactttgagcaggccatcaaggaaggcgaagacatgatcgcggaggagcacttcgggtcggagaagatccgtgagaggatcatttacatccgggagcagtgggccaacctagagcagctctcggccattcggaagaagcgcctggaggaggcctccctgctgcaccagttccaggcagatgctgatgacattgatgcctggatgctggacatcctcaagattgtctccagcagcgacgtgggccacgatgagtattccacacagtctctggtcaagaaacacaaggacgtggcggaagagatcgccaattacaggcccacccttgacacgctgcacgaacaagccagcgccctcccccaggagcatgccgagtctccagacgtgaggggcaggctgtcgggcatcgaggagcggtataaggaggtggcagagctgacgcggctgcggaagcaggcactccaggacactctggccctgtacaagatgttcagcgaggctgatgcctgtgagctctggatcgacgagaaggagcagtggctcaacaacatgcagatcccagagaagctggaggatctggaggtcatccagcacagatttgagagcctagaaccagaaatgaacaaccaggcttcccgggttgcagtggtgaaccagattgcacgccagctgatgcacagcggccacccaagtgagaaggaaatcaaagcccagcaggacaaactcaacacaaggtggagccagttcagagaactggttgacaggaagaaggatgccctcctgtctgccctgagcatccagaactaccacctcgagtgcaatgaaaccaaatcctggattcgggaaaagaccaaggtcatcgagtccacccaggacctgggcaatgacctggctggcgtcatggccctgcagcgcaagctgaccggcatggagcgggacttggtggccattgaggcaaagctgagcaancaatgggagnnggatcctctagatcaccaccac

SEQ ID NO: 357109 - DNA, 2917 bp, Homo sapiens
gtgagctgaagcagggcagggcatcaactcacccaggaagtgcaaggggtttggggattttcctttcctagccaagggaaggcatgacagactgtacctggaaaaacaggacactcttgcccaaatactgcactttttgcacagtcttagcaactggcagaccaggagattctctcctgtgcctgattcattgggtcccacacccatagggccttgcttactgccagtgcagcagtctgagattaacaccccatccccgggagaactctaagaaggagctgatgtggaggagcagctgagacagttcaagatgacgaccacagtagccacagactatgacaacattgagatccagcagcagtacagtgatgtcaacaaccgctgggatgtcgacgactgggacaatgagaacagctctgcgcggctttttgagcggtcccgcatcaaggctctggcagatgagcgtgaagccgtgcagaagaagaccttcaccaagtgggtcaattcccaccttgcccgtgtgtcctgccggatcacagacctgtacactgaccttcgagatggacggatgctcatcaagctgctggaggtcctctctggagagaggctgcctaaacccaccaagggacgaatgcgcatccactgcttagagaatgtggacaaggcccttcagttcctgaaggagcagagagtccatcttgagaacatggggtcccatgacatcgtggatggaaaccaccggctgacccttggcctcatctggaccatcatcctgcgcttccagatccaggatatcagtgtggaaactgaagacaacaaagagaagaaatctgccaaggatgcattgctgttgtggtgccagatgaagacagctgggtaccccaatgtcaacattcacaatttcaccactagctggagggacggcatggccttcaatgcactgatacacaaacaccggcctgacctgatagattttgacaaactaaagaaatctaacgcacactacaacctgcagaatgcatttaatctggcagaacagcacctcggcctcactaaactgttggaccccgaagacatcagcgtggaccatcctgatgagaagtccataatcacttatgtggtgacttattaccactacttctctaagatgaaggccttagctgttgaaggaaaacgaattggaaaggtgcttgacaatgctattgaaacagaaaaaatgattgaaaagtatgaatcacttgcctctgaccttctggaatggattgaacaaaccatcatcattctgaacaatcgcaaatttgccaattcactggtcggggttcaacagcagcttcaggcattcaacacttaccgcactgtggagaaaccacccaaatttactgagaaggggaacttggaagtgctgctcttcaccattcagagcaagatgagggccaacaaccagaaggtctacatgccccgggaggggaagctcatctctgacatcaacaaggcctgggaaagactggaaaaagcggaacacgaaagagaactggctttgcggaatgagctcataagacaggagaaactggaacagctcgcccgcagatttgatcgcaaggcagctatgagggagacttggctgagcgaaaaccagcgtctggtgtctcaggacaactttgggtttgaccttcctgcagttgaggccgccacaaaaaagcacgaggccattgagacagacattgccgcatacgaggagcgtgtgcaggctgtggtagccgtggccagggagctcgaggccgagaattaccacgacatcaagcgcatcacagcgaggaaggacaatgtcatccggctctgggaatacctactggaactgctcagggcccggagacagcggctcgagatgaacctggggctgcagaagatattccaggaaatgctctacattatggactggatggatgaaatgaaggtgctagtattgtctcaagactatggcaaacacttacttggtgtggaagacctgttacagaagcacaccctggttgaagcagacattggcatccaggcagagcgggtgagaggtgtcaatgcctccgcccagaagttcgcaacagacggggaaggttacaagccctgtgacccccaggtgatccgagaccgcgtggcccacatggagttctgttatcaagagctttgccagctggcggctgagcgcagggcccgtctggaagagtcccgccgcctctggaagttcttctgggagatggcagaagaggaaggctggatacgggagaaggagaagatcctgtcctcggacgattacgggaaagacctgaccagcgtcatgcgcctgctcagcaagcaccgggcgttcgaggacgagatgagcggccgcagtggccactttgagcaggccatcaaggaaggcgaagacatgatcgcggaggagcacttcgggtcggagaagatccgtgagaggatcatttacatccgggagcagtgggccaacctagagcagctctcggccattcggaagaagcgcctggaggaggcctccctgctgcaccagttccaggcagatgctgatgacattgatgcctggatgctggacatcctcaagattgtctccagcagcgacgtgggccacgatgagtattccacacagtctctggtcaagaaacacaaggacgtggcggaagagatcgccaattacaagattgtctccagcagcgacgtgggccacgatgagctattccacacagtctctggtcaagaaacacagggacgtggcggaagagatcgccaattcacaagattgtctccagccagcgacgtgggccacgattgagtattccacacaggctcgggctcaagaaacacaaggacgtggcggcagagatcgcccatgccatgattgtctcctgcagcgaag

SEQ ID NO: 357110 - DNA, 292 bp, Homo sapiens
aggagtatgttctggctcacactgaaatgcctaccaccttggaaggagctgaagcagcaattaaaaagcaagaggacttcatgaccaccatggacgccaatgaggagaagatcaatgctgtggtggagactggccggaggctggtgagcgatgggaacatcaactcagatcgcatccaggagaaggtggactctattgatgacaggtacagttttctgaggttcttaagggagccttgcaccttggggctctcaaacttctgaatcattggccagaagcccttgggagttta

SEQ ID NO: 357111 - DNA, 724 bp, Homo sapiens
acccggaagcgctcgtgaccaccatttccgacccgggcaagatggcagcggcgctgcgcgtgcgttgttgagtgttcgggacgccggcctgcaggcgccatggtcttcctcaccgcgcagctctggctgcggaatcgcgtcaccgaccgctactttcggatccaggaggtgctgaagcacgccaggcacttccggggaaggaaaaatcgctgctacaggttggcggtcagaaccgtgattcgagcctttgtgaaatgcaccaaagcccgatacctgaagaaaaagaacatgaggaccctctggattaatcgaattacagctgctagccaggaacatggactgaagtatccagcgctcattgggaatttagttaagtgccaggtggagctcaacaggaaagtcctagcggatctggccatctacgagccaaagactttcaaatctttggctgccttggccagtaggaggcgacacgaaggatttgctgctgccttgggggatgggaaggaacctgaaggcattttttccagagtggtgcagtaccactgaggactgttgctgtattgattaggaaaagagacagagtaatttgcagtttgtttgatttatacttttgtttatctacaacccaataacagacatgagggatggccctgtctctctgggacagagcctcacagatgatgtccatgttttgtgtgaatgaaactcaaacactcttcag

SEQ ID NO: 357112 - DNA, 2295 bp, Homo sapiens
acccggaagcgctcgtgaccaccatttccgacccgggcaagatggcagcggcgctgcgcgtgcgttgttgagtgttcgggacgccggcctgcaggcgccatggtcttcctcaccgcgcagctctggctgcggaatcgcgtcaccgaccgctactttcggatccaggaggtgctgaagcacgccaggcacttccggggaaggaaaaatcgctgctacaggttggcggtcagaaccgtgattcgagcctttgtgaaatgcaccaaagcccgatacctgaagaaaaagaacatgaggaccctctggattaatcgaattacagctgctagccaggaacatggactgaagtatccagcgctcattgggaatttagttaagtgccaggtggagctcaacaggaaagtcctagcggatctggccatctacgagccaaagactttcaaatctttggctgccttggccagtaggaggcgacacgaaggatttgctgctgccttgggggatgggaaggaacctgaaggcattttttccagagtggtgcagtaccactgaggactgttgctgtattgattaggaaaagagacagagtaatttgcagtttgtttgatttatacttttgtttatctacaacccaataacagacatgagggatggccctgtctctctgggacagagcctcacagatgatgtccatgttttgtgtgaatgaaactcaaacactcttcagtttttagagtcattttctggtatcgagcgaccacaccgaggagcacaccctgcttccaaggctgctgccttctgcacacagtgggggatccccacccaccctggctcccctcaagggctgcgtgcacagtgcccgctttccagttacctgacccaccctgagtccctattccattttgctcggggctgacctcagacatgccctgtggctcagctctgccactactcagaacaccagcctcagcttccctatgtcccccagattcagcagcccagcagggattgggggaaatgctcccacatcaggtgggtggtggcctggtccctgcagactggactggcttttcagccatctccaggaagcaacacctagcagacaactgtcccttaaccccaagggtgatgcacacttctcccctggtctttctgccccccgatgcccctacatttacacagcagtgcgcagacccttgccgcaacctgcttgtcttgctgaccctgctgtaggagcgcctaaactgagtgcccgtctcccctccaaaggcagctggcttgaatcctgtgggaacgtgcccttcaccctttgccagcagttgctggggagtctttccggcccctttctcagactcaccacctacctccaacctgcgcagaacaatcagcgtcctgaccacttgctagagatggcttcaggccgaccactccatcctcactgcaggccttcattccttctggcttccatcactgcatggccccctaagaggtccccctcctggcccttgtcactgtgcctcatgacagccactacgccctaagcctttggaggccagggacaaagtctcgttcactgtcctttccgctgcatgagtgcagtgtctggccaggtgcacggggcactcagtgcctgtcagcccttggtaaacagtcctggacaacagggtcaaggacagagccctgggcggccacattcggtgcgtgctcctgtgttgtggcaaagctgccttttctgcgtttcatgtcagtgaaggaagacagggatgtggcagagccctgcgggttgctcccatcactcactcggtttgtgccatagtcctcctgttcccaggcggtcccagggcctgcccctgatgggctggaggcaccaccaacctcccactcctctggcagtcacagctcagggaatgggcaagcagcaccaatgagaaaccagctgtgtggtggggtttccagagaagaggaaattccttctttcctggagagcgtgcagctgtaactcacagacgagacatccctgagctaccagcccgtggtcctgtactagtcctggcaaaggttccggtaactgcagcaacagatacctcctgcccctcctgcacagctgtggtcgatcgcaggacagccgcaggtgatgaaaaaccgtgaacccaggacgggcagggcgtgagaccgcctttcgagacgcgagcttccgcgatccggggtctctgtgcgaacgtgggcatcttggaagagtcccagccccgctcggggcgcacaggcaggcgctctcagcacggcacccgcgcctccgct

SEQ ID NO: 357113 - DNA, 2891 bp, Homo sapiens
tctcctgaagaatacaccacttagccaggtgtggtggctcgtgcctgtaatctcagctcttcgggaggctgaggcaggagattggcttgaatccagaaggcagaagttgcagtgggctgagatcacaccagtgtactccagcgtgggcgacagtgtgtgactgtgtctcaacaacaacaaaaagttttaataatgagtgatttctgatgacatagcaggtgaaataggaacttacagaaaggaaggggaatgttttggagcgaacggatggtttatgcaagtgtagcaaaatcttggtgattactgaatctggtcattatgctagtccctctgcttgtgtacattaagtttttcctaaaaggttgagggggtgggtattttgcagaaggcactctttggtgctttacaaagatcttcagggtaggcttaggaggtttgactttcccattttactcagggaactgtagttaagaaaggagacatacttggccgggcacggtggctcacgcctgtaatcccagcactttgtgagctgaatttaatgctcaaagagacggccccccttttctactccttaaactctggcattgttcactagcttctgaaatcctctgtggttcttgcaggcacttccaggttggcttaaagggttaccctaggccagcagtcagctcagtcagggtggtgaccaaggaccctgaacaaggtgtttggttccccgggccgacatcaggactggagtccagcctccctgcagattccacaggtgcttccctcacccgtgtccacatttatccttcagcatcctgcctggaagtcctctgctgtgccacccagataggattctcctaggccttccctccccccaggcgagtgtgcagctgggttcttcctgagccagcgccgcaaccacgcggagccggagtgtgtgtctcacactgacagcaggttctgattcattcttttttcagtgccaggtggagctcaacaggaaagtcctagcggatctggccatctacgagccaaagactttcaaatctttggctgccttggccagtaggaggcgacacgaaggatttgctgctgccttgggggatgggaaggaacctgaaggcattttttccagagtggtgcagtaccactgaggactgttgctgtattgattaggaaaagagacagagtaatttgcagtttgtttgatttatacttttgtttatctacaacccaataacagacatgagggatggccctgtctctctgggacagagcctcacagatgatgtccatgttttgtgtgaatgaaactcaaacactcttcagtttttagagtcattttctggtatcgagcgaccacaccgaggagcacaccctgcttccaaggctgctgccttctgcacacagtgggggatccccacccaccctggctcccctcaagggctgcgtgcacagtgcccgctttccagttacctgacccaccctgagtccctattccattttgctcggggctgacctcagacatgccctgtggctcagctctgccactactcagaacaccagcctcagcttccctatgtcccccagattcagcagcccagcagggattgggggaaatgctcccacatcaggtgggtggtggcctggtccctgcagactggactggcttttcagccatctccaggaagcaacacctagcagacaactgtcccttaaccccaagggtgatgcacacttctcccctggtctttctgccccccgatgcccctacatttacacagcagtgcgcagacccttgccgcaacctgcttgtcttgctgaccctgctgtaggagcgcctaaactgagtgcccgtctcccctccaaaggcagctggcttgaatcctgtgggaacgtgcccttcaccctttgccagcagttgctggggagtctttccggcccctttctcagactcaccacctacctccaacctgcgcagaacaatcagcgtcctgaccacttgctagagatggcttcaggccgaccactccatcctcactgcaggccttcattccttctggcttccatcactgcatggccccctaagaggtccccctcctggcccttgtcactgtgcctcatgacagccactacgccctaagcctttggaggccagggacaaagtctcgttcactgtcctttccgctgcatgagtgcagtgtctggccaggtgcacggggcactcagtgcctgtcagcccttggtaaacagtcctggacaacagggtcaaggacagagccctgggcggccacattcggtgcgtgctcctgtgttgtggcaaagctgccttttctgcgtttcatgtcagtgaaggaagacagggatgtggcagagccctgcgggttgctcccatcactcactcggtttgtgccatagtcctcctgttcccaggcggtcccagggcctgcccctgatgggctggaggcaccaccaacctcccactcctctggcagtcacagctcagggaatgggcaagcagcaccaatgagaaaccagctgtgtggtggggtttccagagaagaggaaattccttctttcctggagagcgtgcagctgtaactcacagacgagacatccctgagctaccagcccgtggtcctgtactagtcctggcaaaggttccggtaactgcagcaacagatacctcctgcccctcctgcacagctgtggtcgatcgcaggacagccgcaggtgatgaaaaaccgtgaacccaggacgggcagggcgtgagaccgcctttcgagacgcgagcttccgcgatccggggtctctgtgcgaacgtgggcatcttggaagagtcccagccccgctcggggcgcacaggcaggcgctctcagcacggcacccgcgcctccgct

SEQ ID NO: 357114 - DNA, 2750 bp, Homo sapiens
  misc_feature (15)..(15): n is a, c, g, or t
  misc_feature (22)..(22): n is a, c, g, or t
aacttaggctaggtncgaggcngggtggtgggcaagatggcagcggcgctgcgcgtgcgttgttgagtgttcgggacgccggcctgcaggcgccatggtcttcctcaccgcgcagctctggctgcggaatcgcgtcaccgaccgctactttcggatccaggaggtgctgaagcacgccaggcacttccggggaaggaaaaatcgctgctacaggttggcggtcagaaccgtgattcgagcctttgtgaaatgcaccaaagcccgatacctgaagaaaaagaacatgaggaccacggagtctcgcgctgtcacccaggctggagtgcaatggcgcgatctaggcttaatgcaacctcgtctcccgggttcaagcgattttcccgccccagtctcccgagtaactgtgactgcaggtgtgcgccaccaagctattttttgtatttttagtagagaccgggttccgccatgttggtcaggctggtctcgaactccagatctgaaatgatctgcctgccttgccctcccaaagtgctgggattacaggcgtgagacaccgtgcccagctgggtttttgctgtttttaattttgaaacagggtcttgatttcgcttaggccagagtgatggcaccatcatagctcactgattttgctatttacttttagaaaaatattctttagatcaattagaggctttgctgggacataacatccagaagtcatttttaagtatcttcatgttttcttatttcagctctggattaatcgaattacagctgctagccaggaacatggactgaagtatccagcgctcattgggaatttagttaagtgccaggtggagctcaacaggaaagtcctagcggatctggccatctacgagccaaagactttcaaatctttggctgccttggccagtaggaggcgacacgaaggatttgctgctgccttgggggatgggaaggaacctgaaggcattttttccagagtggtgcagtaccactgaggactgttgctgtattgattaggaaaagagacagagtaatttgcagtttgtttgatttatacttttgtttatctacaacccaataacagacatgagggatggccctgtctctctgggacagagcctcacagatgatgtccatgttttgtgtgaatgaaactcaaacactcttcagtttttagagtcattttctggtatcgagcgaccacaccgaggagcacaccctgcttccaaggctgctgccttctgcacacagtgggggatccccacccaccctggctcccctcaagggctgcgtgcacagtgcccgctttccagttacctgacccaccctgagtccctattccattttgctcggggctgacctcagacatgccctgtggctcagctctgccactactcagaacaccagcctcagcttccctatgtcccccagattcagcagcccagcagggattgggggaaatgctcccacatcaggtgggtggtggcctggtccctgcagactggactggcttttcagccatctccaggaagcaacacctagcagacaactgtcccttaaccccaagggtgatgcacacttctcccctggtctttctgccccccgatgcccctacatttacacagcagtgcgcagacccttgccgcaacctgcttgtcttgctgaccctgctgtaggagcgcctaaactgagtgcccgtctcccctccaaaggcagctggcttgaatcctgtgggaacgtgcccttcaccctttgccagcagttgctggggagtctttccggcccctttctcagactcaccacctacctccaacctgcgcagaacaatcagcgtcctgaccacttgctagagatggcttcaggccgaccactccatcctcactgcaggccttcattccttctggcttccatcactgcatggccccctaagaggtccccctcctggcccttgtcactgtgcctcatgacagccactacgccctaagcctttggaggccagggacaaagtctcgttcactgtcctttccgctgcatgagtgcagtgtctggccaggtgcacggggcactcagtgcctgtcagcccttggtaaacagtcctggacaacagggtcaaggacagagccctgggcggccacattcggtgcgtgctcctgtgttgtggcaaagctgccttttctgcgtttcatgtcagtgaaggaagacagggatgtggcagagccctgcgggttgctcccatcactcactcggtttgtgccatagtcctcctgttcccaggcggtcccagggcctgcccctgatgggctggaggcaccaccaacctcccactcctctggcagtcacagctcagggaatgggcaagcagcaccaatgagaaaccagctgtgtggtggggtttccagagaagaggaaattccttctttcctggagagcgtgcagctgtaactcacagacgagacatccctgagctaccagcccgtggtcctgtactagtcctggcaaaggttccggtaactgcagcaacagatacctcctgcccctcctgcacagctgtggtcgatcgcaggacagccgcaggtgatgaaaaaccgtgaacccaggacgggcagggcgtgagaccgcctttcgagacgcgagcttccgcgatccggggtctctgtgcgaacgtgggcatcttggaagagtcccagccccgctcggggcgcacaggcaggcgctctcagcacggcacccgcgcctccgct

SEQ ID NO: 357115 - DNA, 2457 bp, Homo sapiens
tacaaatacaaaaatcaggccgggcacggtgtctcatgcctgtaatcccgcactttgggaggctgaggcgggcgagacaccgtgccctgccttggtagctgaatttaatgctcaaagagacggccccccttttctactccttaaactctggcattgttcactagcttctgaaatcctctgtggttcttgcaggcacttccaggttggcttaaagggttaccctaggccagcagtcagctcagtcagggtggtgaccaaggaccctgaacaaggtgtttggttccccgggccgacatcaggactggagtccagcctccctgcagattccacaggtgcttccctcacccgtgtccacatttatccttcagcatcctgcctggaagtcctctgctgtgccacccagataggattctcctaggccttccctccccccaggcgagtgtgcagctgggttcttcctgagccagcgccgcaaccacgcggagccggagtgtgtgtctcacactgacagcaggttctgattcattcttttttcagtgccaggtggagctcaacaggaaagtcctagcggatctggccatctacgagccaaagactttcaaatctttggctgccttggccagtaggaggcgacacgaaggatttgctgctgccttgggggatgggaaggaacctgaaggcattttttccagagtggtgcagtaccactgaggactgttgctgtattgattaggaaaagagacagagtaatttgcagtttgtttgatttatacttttgtttatctacaacccaataacagacatgagggatggccctgtctctctgggacagagcctcacagatgatgtccatgttttgtgtgaatgaaactcaaacactcttcagtttttagagtcattttctggtatcgagcgaccacaccgaggagcacaccctgcttccaaggctgctgccttctgcacacagtgggggatccccacccaccctggctcccctcaagggctgcgtgcacagtgcccgctttccagttacctgacccaccctgagtccctattccattttgctcggggctgacctcagacatgccctgtggctcagctctgccactactcagaacaccagcctcagcttccctatgtcccccagattcagcagcccagcagggattgggggaaatgctcccacatcaggtgggtggtggcctggtccctgcagactggactggcttttcagccatctccaggaagcaacacctagcagacaactgtcccttaaccccaagggtgatgcacacttctcccctggtctttctgccccccgatgcccctacatttacacagcagtgcgcagacccttgccgcaacctgcttgtcttgctgaccctgctgtaggagcgcctaaactgagtgcccgtctcccctccaaaggcagctggcttgaatcctgtgggaacgtgcccttcaccctttgccagcagttgctggggagtctttccggcccctttctcagactcaccacctacctccaacctgcgcagaacaatcagcgtcctgaccacttgctagagatggcttcaggccgaccactccatcctcactgcaggccttcattccttctggcttccatcactgcatggccccctaagaggtccccctcctggcccttgtcactgtgcctcatgacagccactacgccctaagcctttggaggccagggacaaagtctcgttcactgtcctttccgctgcatgagtgcagtgtctggccaggtgcacggggcactcagtgcctgtcagcccttggtaaacagtcctggacaacagggtcaaggacagagccctgggcggccacattcggtgcgtgctcctgtgttgtggcaaagctgccttttctgcgtttcatgtcagtgaaggaagacagggatgtggcagagccctgcgggttgctcccatcactcactcggtttgtgccatagtcctcctgttcccaggcggtcccagggcctgcccctgatgggctggaggcaccaccaacctcccactcctctggcagtcacagctcagggaatgggcaagcagcaccaatgagaaaccagctgtgtggtggggtttccagagaagaggaaattccttctttcctggagagcgtgcagctgtaactcacagacgagacatccctgagctaccagcccgtggtcctgtactagtcctggcaaaggttccggtaactgcagcaacagatacctcctgcccctcctgcacagctgtggtcgatcgcaggacagccgcaggtgatgaaaaaccgtgaacccaggacgggcagggcgtgagaccgcctttcgagacgcgagcttccgcgatccggggtctctgtgcgaacgtgggcatcttggaagagtcccagccccgctcggggcgcacaggcaggcgctctcagcacggcacccgcgcctccgct

SEQ ID NO: 357116 - DNA, 1742 bp, Homo sapiens
  misc_feature (15)..(15): n is a, c, g, or t
  misc_feature (22)..(22): n is a, c, g, or t
aacttaggctaggtncgaggcngggtggtgggcaagatggcagcggcgctgcgcgtgcgttgttgagtgttcgggacgccggcctgcaggcgccatggtcttcctcaccgcgcagctctggctgcggaatcgcgtcaccgaccgctactttcggatccaggaggtgctgaagcacgccaggcacttccggggaaggaaaaatcgctgctacaggttggcggtcagaaccgtgattcgagcctttgtgaaatgcaccaaagcccgatacctgaagaaaaagaacatgaggacccgtaagcgtggacccgggacacccgccggccagcgcactcgcggcccctgcgtttctgcgccgcgacccagctagtgtgcagccgcccggccaccctcagccccttcctttcataccttgcttcgaaactccgacaaattatgtcgccccgcaggcaaactgtgggacatccgttctcccgccccgccgccacccccactgtcaccccctgctccagcccctcgcccgggccactgcagagccgccttgacactctccctgcgtcgccagccaccgccctagtcgctgctgctctcatccctccggtggcttcccttccctttggcagctgaagtcaacccagccccttgccaaccctccagggctactatctgctgccgtggtgctcctcgaagagaccacgcctgctgccaagctctgcccacccggaaccccccgcatttctgggaggctggcgcctccactctgtccacgtgccgcctcattactgcgcctcaccactcccgtctcagcctcatgaacctagcatctaacgtaccccggtttttttttcttaccccgagacggagtctcgcgctgtcacccaggctggagtgcaatggcgcgatctaggcttaatgcaacctcgtctcccgggttcaagcgattttcccgccccagtctcccgagtaactgtgactgcaggtgtgcgccaccaagctattttttgtatttttagtagagaccgggttccgccatgttggtcaggctggtctcgaactccagatctgaaatgatctgcctgccttgccctcccaaagtgctgggattacaggcgtgagacaccgtgcccagctgggtttttgctgtttttaattttgaaacagggtcttgatttcgcttaggccagagtgatggcaccatcatagctcactgattttgctatttacttttagaaaaatattctttagatcaattagaggctttgctgggacataacatccagaagtcatttttaagtatcttcatgttttcttatttcagctctggattaatcgaattacagctgctagccaggaacatggactgaagtatccagcgctcattgggaatttagttaagtgccaggtggagctcaacaggaaagtcctagcggatctggccatctacgagccaaagactttcaaatctttggctgccttggccagtaggaggcgacacgaaggatttgctgctgccttgggggatgggaaggaacctgaaggcattttttccagagtggtgcagtaccactgaggactgttgctgtattgattaggaaaagagacagagtaatttgcagtttgtttgatttatacttttgtttatctacaacccaataacagacatgagggatggccctgtctctctgggacagagcctcacagatgatgtccatgttttgtgtgaatgaaactcaaacactcttcag

SEQ ID NO: 357117 - DNA, 753 bp, Homo sapiens
  misc_feature (621)..(621): n is a, c, g, or t
  misc_feature (623)..(623): n is a, c, g, or t
  misc_feature (633)..(633): n is a, c, g, or t
  misc_feature (635)..(635): n is a, c, g, or t
  misc_feature (641)..(641): n is a, c, g, or t
acccggaagcgctcgtgaccaccatttccgacccgggcaagatggcagcggcgctgcgcgtgcgttgttgagtgttcgggacgccggcctgcaggcgccatggtcttcctcaccgcgcagctctggctgcggaatcgcgtcaccgaccgctactttcggatccaggaggtgctgaagcacgccaggcacttccggggaaggaaaaatcgctgctacaggttggcggtcagaaccgtgattcgagcctttgtgaaatgcaccaaagcccgatacctgaagaaaaagaacatgaggaccctctggattaatcgaattacagctgctagccaggaacatggactgaagtatccagcgctcattgggaatttagttaagtgccaggtggagctcaacaggaaagtcctagcggatctggccatctacgagccaaagactttcaaatctttggctgccttggccagtaggaggcgacacgaaggatttgctgctgccttgggggatgggaaggaacctgaaggcattttttccagagtggtgcagtaccactgaggactgttgctgtattgattaggaaaagagacagagtaatttgcaaaaaaaaaaaaaaaaaaaattgggggntnaatgcggggngnggaaanaggaggttggaagggccttggtccatagtgtttctgaccaagttttctttgtcacggggaaattgcggctcccatattagggagcgataattgataaggcagttaactgtaa

SEQ ID NO: 357118 - DNA, 1320 bp, Homo sapiens
tctcctgaagaatacaccacttagccaggtgtggtggctcgtgcctgtaatctcagctcttcgggaggctgaggcaggagattggcttgaatccagaaggcagaagttgcagtgggctgagatcacaccagtgtactccagcgtgggcgacagtgtgtgactgtgtctcaacaacaacaaaaagttttaataatgagtgatttctgatgacatagcaggtgaaataggaacttacagaaaggaaggggaatgttttggagcgaacggatggtttatgcaagtgtagcaaaatcttggtgattactgaatctggtcattatgctagtccctctgcttgtgtacattaagtttttcctaaaaggttgagggggtgggtattttgcagaaggcactctttggtgctttacaaagatcttcagggtaggcttaggaggtttgactttcccattttactcagggaactgtagttaagaaaggagacatacttggccgggcacggtggctcacgcctgtaatcccagcactttgtgagctgaatttaatgctcaaagagacggccccccttttctactccttaaactctggcattgttcactagcttctgaaatcctctgtggttcttgcaggcacttccaggttggcttaaagggttaccctaggccagcagtcagctcagtcagggtggtgaccaaggaccctgaacaaggtgtttggttccccgggccgacatcaggactggagtccagcctccctgcagattccacaggtgcttccctcacccgtgtccacatttatccttcagcatcctgcctggaagtcctctgctgtgccacccagataggattctcctaggccttccctccccccaggcgagtgtgcagctgggttcttcctgagccagcgccgcaaccacgcggagccggagtgtgtgtctcacactgacagcaggttctgattcattcttttttcagtgccaggtggagctcaacaggaaagtcctagcggatctggccatctacgagccaaagactttcaaatctttggctgccttggccagtaggaggcgacacgaaggatttgctgctgccttgggggatgggaaggaacctgaaggcattttttccagagtggtgcagtaccactgaggactgttgctgtattgattaggaaaagagacagagtaatttgcagtttgtttgatttatacttttgtttatctacaacccaataacagacatgagggatggccctgtctctctgggacagagcctcacagatgatgtccatgttttgtgtgaatgaaactcaaacactcttcag

SEQ ID NO: 357119 - DNA, 752 bp, Homo sapiens
  misc_feature (15)..(15): n is a, c, g, or t
  misc_feature (22)..(22): n is a, c, g, or t
aacttaggctaggtncgaggcngggtggtgggcaagatggcagcggcgctgcgcgtgcgttgttgagtgttcgggacgccggcctgcaggcgccatggtcttcctcaccgcgcagctctggctgcggaatcgcgtcaccgaccgctactttcggatccaggaggtgctgaagcacgccaggcacttccggggaaggaaaaatcgctgctacaggttggcggtcagaaccgtgattcgagcctttgtgaaatgcaccaaagcccgatacctgaagaaaaagaacatgaggaccctctggattaatcgaattacagctgctagccaggaacatggactgaagtatccagcgctcattgggaatttagttaaggtatgggtgagtatgtgggtcccactgaaattctggacatctgcagaaaccatcatgcggggcgtggtggtgcttcctgtagtcccagctaatcaggaggctgaggccagaggatccctggagactgacttctgggctgtagtttgctatgctgatggggtgtccatgttaagtgtggtatcaatatggtgacctcttgggagcaagggaccaccacgttgcctaaggaggggtgaaccagcccaggctggaaacggagcaggtcacaattcccatgttgatgagtgatgagattgtgcctaggaatagtgccagcaacagcctgggcaacatagtgagaccactctctacaaaaaaataaaatttgctgggtgtggtggta

SEQ ID NO: 357120 - DNA, 418 bp, Homo sapiens
  misc_feature (15)..(15): n is a, c, g, or t
  misc_feature (22)..(22): n is a, c, g, or t
aacttaggctaggtncgaggcngggtggtgggcaagatggcagcggcgctgcgcgtgcgttgttgagtgttcgggacgccggcctgcaggcgccatggtcttcctcaccgcgcagctctggctgcggaatcgcgtcaccgaccgctactttcggatccaggaggtgctgaagcacgccaggcacttccggggaaggaaaaatcgctgctacaggttggcggtcagaaccgtgattcgagcctttgtgaaatgcaccaaagcccgatacctgaagaaaaagaacatgaggaccacggagtctcgcgctgtcacccaggctggagtgcaatggcgcgatctaggcttaatgcaacctcgtctcccggtttttagcaagcccgacatgcaagggggatccttagagcgaccgcaacagcgg

SEQ ID NO: 357121 - DNA, 665 bp, Homo sapiens
ctcctgcccctcctgcacagctgtggtcgatcgcaggacagccgcaggtgatgaaaaaccgtgaacccaggacgggcagggcgtgagaccgcctgcgggaggatcagcgatgtcaagacgttacaaacgcacgaaccccctcgccgtctccctggcgtttgtgaggtcctgtccaagctccttcacacgtagatcaccgggcctcgctcccccgactccttccgtgggcctgaaccttgaggtacttaggcctccccacgctggaggggctctgtagggacgtcgaggccacgtttccagtcatccctccacccgtctctccccaggggctgagtgttgaaggcaagactttgcaggagtctggcgttaatacgcatccccaaagtctggagtcgataaggactgaagacacgacgccgacggcggccgggggacaccgggcatgcgcgtctcatccagggggaggccgagcggagcctctgaccctgccccgcgcccagggttcagcagtgggggtcgtcccgccccagatcccaccgagatggccccccttgacccacaggcctttcgagacgcgagcttccgcgatccggggtctctgtgcgaacgtgggcatcttggaagagtcccagccccgctcggggcgcacaggcaggcgctctcag

SEQ ID NO: 357122 - DNA, 428 bp, Homo sapiens
taagtttttcctaaaaggttgagggggtgggtattttgcagaaggcactctttggtgctttacaaagatcttcagggtaggcttaggaggtttgactttcccattttactcagggaactgtagttaagaaaggagacatacttggccgggcacggtggctcacgcctgtaatcccagcactttgtgaggctgaggcgggtggatcacgaggtcaggagatcgagaccatcctggctaacatggtgaaacaccatctctactaaaaatacaaaaagtagccaggtgcggtggcgggcacctgtagtcccagctacttgtgaggctgaggcaggagaatggcatgaacctgggaggtggagcttgcaatgagctgagatcgcaccactgcactccagcttgggcgacacagtgagactctgtttcaaaaa

SEQ ID NO: 357123 - DNA, 719 bp, Homo sapiens
  misc_feature (15)..(15): n is a, c, g, or t
  misc_feature (22)..(22): n is a, c, g, or t
aacttaggctaggtncgaggcngggtggtgggcaagatggcagcggcgctgcgcgtgcgttgttgagtgttcgggacgccggcctgcaggcgccatggtcttcctcaccgcgcagctctggctgcggaatcgcgtcaccgaccgctactttcggatccaggaggtgctgaagcacgccaggcacttccggggaaggaaaaatcgctgctacaggttggcggtcagaaccgtgattcgagcctttgtgaaatgcaccaaagcccgatacctgaagaaaaagaacatgaggaccctctggattaatcgaattacagctgctagccaggaacatggactgaagtatccagcgctcattgggaatttagttaagtgccaggtggagctcaacaggaaagtcctagcggatctggccatctacgagccaaagactttcaaatctttggctgccttggccagtaggaggcgacacgaaggatttgctgctgccttgggggatgggaaggaacctgaaggcattttttccagagtggtgcagtaccactgaggactgttgctgtattgattaggaaaagagacagagtaatttgcagtttgtttgatttatacttttgtttatctacaacccaataacagacatgagggatggccctgtctctctgggacagagcctcacagatgatgtccatgttttgtgtgaatgaaactcaaacactcttcag

SEQ ID NO: 357124 - DNA, 2199 bp, Homo sapiens
taccccagagatcccccacccacagcttcacccgagggatcccccaccccacggcttcacccccgggatctcccgcccacaggttcaccccagggatcccccacccaccgcatcacccgtcggttggcggtcagaaccgtgattcgagcctttgtgaaatgcaccaaagcccgatacctgaagaaaaagaacatgaggaccctctggattaatcgaattacagctgctagccaggaacatggactgaagtatccagcgctcattgggaatttagttaagtgccaggtggagctcaacaggaaagtcctagcggatctggccatctacgagccaaagactttcaaatctttggctgccttggccagtaggaggcgacacgaaggatttgctgctgccttgggggatgggaaggaacctgaaggcattttttccagagtggtgcagtaccactgaggactgttgctgtattgattaggaaaagagacagagtaatttgcagtttgtttgatttatacttttgtttatctacaacccaataacagacatgagggatggccctgtctctctgggacagagcctcacagatgatgtccatgttttgtgtgaatgaaactcaaacactcttcagtttttagagtcattttctggtatcgagcgaccacaccgaggagcacaccctgcttccaaggctgctgccttctgcacacagtgggggatccccacccaccctggctcccctcaagggctgcgtgcacagtgcccgctttccagttacctgacccaccctgagtccctattccattttgctcggggctgacctcagacatgccctgtggctcagctctgccactactcagaacaccagcctcagcttccctatgtcccccagattcagcagcccagcagggattgggggaaatgctcccacatcaggtgggtggtggcctggtccctgcagactggactggcttttcagccatctccaggaagcaacacctagcagacaactgtcccttaaccccaagggtgatgcacacttctcccctggtctttctgccccccgatgcccctacatttacacagcagtgcgcagacccttgccgcaacctgcttgtcttgctgaccctgctgtaggagcgcctaaactgagtgcccgtctcccctccaaaggcagctggcttgaatcctgtgggaacgtgcccttcaccctttgccagcagttgctggggagtctttccggcccctttctcagactcaccacctacctccaacctgcgcagaacaatcagcgtcctgaccacttgctagagatggcttcaggccgaccactccatcctcactgcaggccttcattccttctggcttccatcactgcatggccccctaagaggtccccctcctggcccttgtcactgtgcctcatgacagccactacgccctaagcctttggaggccagggacaaagtctcgttcactgtcctttccgctgcatgagtgcagtgtctggccaggtgcacggggcactcagtgcctgtcagcccttggtaaacagtcctggacaacagggtcaaggacagagccctgggcggccacattcggtgcgtgctcctgtgttgtggcaaagctgccttttctgcgtttcatgtcagtgaaggaagacagggatgtggcagagccctgcgggttgctcccatcactcactcggtttgtgccatagtcctcctgttcccaggcggtcccagggcctgcccctgatgggctggaggcaccaccaacctcccactcctctggcagtcacagctcagggaatgggcaagcagcaccaatgagaaaccagctgtgtggtggggtttccagagaagaggaaattccttctttcctggagagcgtgcagctgtaactcacagacgagacatccctgagctaccagcccgtggtcctgtactagtcctggcaaaggttccggtaactgcagcaacagatacctcctgcccctcctgcacagctgtggtcgatcgcaggacagccgcaggtgatgaaaaaccgtgaacccaggacgggcagggcgtgagaccgcctttcgagacgcgagcttccgcgatccggggtctctgtgcgaacgtgggcatcttggaagagtcccagccccgctcggggcgcacaggcaggcgctctcagcacggcacccgcgcctccgct

SEQ ID NO: 357125 - DNA, 3313 bp, Homo sapiens
  misc_feature (15)..(15): n is a, c, g, or t
  misc_feature (22)..(22): n is a, c, g, or t
aacttaggctaggtncgaggcngggtggtgggcaagatggcagcggcgctgcgcgtgcgttgttgagtgttcgggacgccggcctgcaggcgccatggtcttcctcaccgcgcagctctggctgcggaatcgcgtcaccgaccgctactttcggatccaggaggtgctgaagcacgccaggcacttccggggaaggaaaaatcgctgctacaggttggcggtcagaaccgtgattcgagcctttgtgaaatgcaccaaagcccgatacctgaagaaaaagaacatgaggacccgtaagcgtggacccgggacacccgccggccagcgcactcgcggcccctgcgtttctgcgccgcgacccagctagtgtgcagccgcccggccaccctcagccccttcctttcataccttgcttcgaaactccgacaaattatgtcgccccgcaggcaaactgtgggacatccgttctcccgccccgccgccacccccactgtcaccccctgctccagcccctcgcccgggccactgcagagccgccttgacactctccctgcgtcgccagccaccgccctagtcgctgctgctctcatccctccggtggcttcccttccctttggcagctgaagtcaacccagccccttgccaaccctccagggctactatctgctgccgtggtgctcctcgaagagaccacgcctgctgccaagctctgcccacccggaaccccccgcatttctgggaggctggcgcctccactctgtccacgtgccgcctcattactgcgcctcaccactcccgtctcagcctcatgaacctagcatctaacgtaccccggtttttttttcttaccccgagacggagtctcgcgctgtcacccaggctggagtgcaatggcgcgatctaggcttaatgcaacctcgtctcccgggttcaagcgattttcccgccccagtctcccgagtaactgtgactgcaggtgtgcgccaccaagctattttttgtatttttagtagagaccgggttccgccatgttggtcaggctggtctcgaactccagatctgaaatgatctgcctgccttgccctcccaaagtgctgggattacaggcgtgagacaccgtgcccagctgggtttttgctgtttttaattttgaaacagggtcttgatttcgcttaggccagagtgatggcaccatcatagctcactgattttgctatttacttttagaaaaatattctttagatcaattagaggctttgctgggacataacatccagaagtcatttttaagtatcttcatgttttcttatttcagctctggattaatcgaattacagctgctagccaggaacatggactgaagtatccagcgctcattgggaatttagttaagtgccaggtggagctcaacaggaaagtcctagcggatctggccatctacgagccaaagactttcaaatctttggctgccttggccagtaggaggcgacacgaaggatttgctgctgccttgggggatgggaaggaacctgaaggcattttttccagagtggtgcagtaccactgaggactgttgctgtattgattaggaaaagagacagagtaatttgcagtttgtttgatttatacttttgtttatctacaacccaataacagacatgagggatggccctgtctctctgggacagagcctcacagatgatgtccatgttttgtgtgaatgaaactcaaacactcttcagtttttagagtcattttctggtatcgagcgaccacaccgaggagcacaccctgcttccaaggctgctgccttctgcacacagtgggggatccccacccaccctggctcccctcaagggctgcgtgcacagtgcccgctttccagttacctgacccaccctgagtccctattccattttgctcggggctgacctcagacatgccctgtggctcagctctgccactactcagaacaccagcctcagcttccctatgtcccccagattcagcagcccagcagggattgggggaaatgctcccacatcaggtgggtggtggcctggtccctgcagactggactggcttttcagccatctccaggaagcaacacctagcagacaactgtcccttaaccccaagggtgatgcacacttctcccctggtctttctgccccccgatgcccctacatttacacagcagtgcgcagacccttgccgcaacctgcttgtcttgctgaccctgctgtaggagcgcctaaactgagtgcccgtctcccctccaaaggcagctggcttgaatcctgtgggaacgtgcccttcaccctttgccagcagttgctggggagtctttccggcccctttctcagactcaccacctacctccaacctgcgcagaacaatcagcgtcctgaccacttgctagagatggcttcaggccgaccactccatcctcactgcaggccttcattccttctggcttccatcactgcatggccccctaagaggtccccctcctggcccttgtcactgtgcctcatgacagccactacgccctaagcctttggaggccagggacaaagtctcgttcactgtcctttccgctgcatgagtgcagtgtctggccaggtgcacggggcactcagtgcctgtcagcccttggtaaacagtcctggacaacagggtcaaggacagagccctgggcggccacattcggtgcgtgctcctgtgttgtggcaaagctgccttttctgcgtttcatgtcagtgaaggaagacagggatgtggcagagccctgcgggttgctcccatcactcactcggtttgtgccatagtcctcctgttcccaggcggtcccagggcctgcccctgatgggctggaggcaccaccaacctcccactcctctggcagtcacagctcagggaatgggcaagcagcaccaatgagaaaccagctgtgtggtggggtttccagagaagaggaaattccttctttcctggagagcgtgcagctgtaactcacagacgagacatccctgagctaccagcccgtggtcctgtactagtcctggcaaaggttccggtaactgcagcaacagatacctcctgcccctcctgcacagctgtggtcgatcgcaggacagccgcaggtgatgaaaaaccgtgaacccaggacgggcagggcgtgagaccgcctttcgagacgcgagcttccgcgatccggggtctctgtgcgaacgtgggcatcttggaagagtcccagccccgctcggggcgcacaggcaggcgctctcagcacggcacccgcgcctccgct

SEQ ID NO: 357126 - DNA, 800 bp, Homo sapiens
acccggaagcgctcgtgaccaccatttccgacccgggcaagatggcagcggcgctgcgcgtgcgttgttgagtgttcgggacgccggcctgcaggcgccatggtcttcctcaccgcgcagctctggctgcggaatcgcgtcaccgaccgctactttcggatccaggaggtgctgaagcacgccaggcacttccggggaaggaaaaatcgctgctacaggttggcggtcagaaccgtgattcgagcctttgtgaaatgcaccaaagcccgatacctgaagaaaaagaacatgaggaccctctggattaatcgaattacagctgctagccaggaacatggactgaagtatccagcgctcattgggaatttagttaagtgccaggtggagctcaacaggaaagtcctagcggatctggccatctacgagccaaagactttcaaatctttggctgccttggccagtaggaggcgacacgaaggatttgctgctgccttgggggatgggaaggaacctgaaggcattttttccagagtggtgcagtaccactgaggactgttgctgtattgattaggaaaagagacagagtaatttgcagtttgtttgatttatacttttgtttatctacaacccaataacagacatgagggatggccctgtctctctgggacagagcctcacagatgatgtccatgttttgtgtgaatgaaactcaaacactcttcagaaaaaaacacacaacctcattaatataaaaaaccaacaaagcacacaataacaaatcacacaaaaacaaacacaaa

SEQ ID NO: 357127 - DNA, 996 bp, Homo sapiens
acccggaagcgctcgtgaccaccatttccgacccgggcaagatggcagcggcgctgcgcgtgcgttgttgagtgttcgggacgccggcctgcaggcgccatggtcttcctcaccgcgcagctctggctgcggaatcgcgtcaccgaccgctactttcggatccaggaggtgctgaagcacgccaggcacttccggggaaggaaaaatcgctgctacaggttggcggtcagaaccgtgattcgagcctttgtgaaatgcaccaaagcccgatacctgaagaaaaagaacatgaggaccctctggattaatcgaattacagctgctagccaggaacatggactgaagtatccagcgctcattgggaatttagttaagtgccaggtggagctcaacaggaaagtcctagcggatctggccatctacgagccaaagactttcaaatctttggctgccttggccagtaggaggcgacacgaaggatttgctgctgccttgggggatgggaaggaacctgaaggcattttttccagagtggtgcagtaccactgaggactgttgctgtattgattaggaaaagagacagagtaatttgcagtttgtttgatttatacttttgtttatctacaacccaataacagacatgagggatggccctgtctctctgggacagagcctcacagatgatgtccatgttttgtgtgaatgaaactcaaacactcttcagtttttagagtcattttctggtatcgagcgaccacaccgaggagcacaccctgcttccaaggctgctgccttctgcacacagtggtcgatcgcaggacagccgcaggtgatgaaaaaccgtgaacccaggacgggcagggcgtgagaccgcctttcgagacgcgagcttccgcgatccggggtctctgtgcgaacgtgggcatcttggaagagtcccagccccgctcggggcgcacaggcaggcgctctcagcacggcacccgcgcctccgct

SEQ ID NO: 357128 - DNA, 640 bp, Homo sapiens
  misc_feature (15)..(15): n is a, c, g, or t
  misc_feature (22)..(22): n is a, c, g, or t
aacttaggctaggtncgaggcngggtggtgggcaagatggcagcggcgctgcgcgtgcgttgttgagtgttcgggacgccggcctgcaggcgccatggtcttcctcaccgcgcagctctggctgcggaatcgcgtcaccgaccgctactttcggatccaggaggtgctgaagcacgccaggcacttccggggaaggaaaaatcgctgctacagctctggattaatcgaattacagctgctagccaggaacatggactgaagtatccagcgctcattgggaatttagttaagtgccaggtggagctcaacaggaaagtcctagcggatctggccatctacgagccaaagactttcaaatctttggctgccttggccagtaggaggcgacacgaaggatttgctgctgccttgggggatgggaaggaacctgaaggcattttttccagagtggtgcagtaccactgaggactgttgctgtattgattaggaaaagagacagagtaatttgcagtttgtttgatttatacttttgtttatctacaacccaataacagacatgagggatggccctgtctctctgggacagagcctcacagatgatgtccatgttttgtgtgaatgaaactcaaacactcttcag

SEQ ID NO: 357129 - DNA, 331 bp, Homo sapiens
  misc_feature (15)..(15): n is a, c, g, or t
  misc_feature (22)..(22): n is a, c, g, or t
aacttaggctaggtncgaggcngggtggtgggcaagatggcagcggcgctgcgcgtgcgttgttgagtgttcgggacgccggcctgcaggcgccatggtcttcctcaccgcgcagctctggctgcggaatcgcgtcaccgaccgctactttcggatccaggaggtgctgaagcacgccaggcacttccggggaaggaaaaatcgctgctacaggttggcggtcagaaccgtgattcgagcctttgtgaaatgcaccaaagcccgatacctgaagaaaaagaacatgaggaccaatcttctcgacagttacttatggggacacgaatgttca

SEQ ID NO: 357130 - DNA, 566 bp, Homo sapiens
aggcaacaagagtgaaactatctcaaaaaataaaaaaaacattgaggggccagtcatacccacctaatttagggatagggaatggtgattagcaacgattttcaaaatccacagcaccggccgagtagataaaacaggtggtgttgaaataggagataggagtgcctccctgtcacgctgtcacttggctctcctcccccaaggctcctgcagcttgctttgcttagggaatacaagccccacccctgaggcaggggccagacttgggggcaggttgggcagtaggcattgctatgtcctaggggaagtcgtgtgacagccataacaagacccatgaaaaggctggatcagtgacttcactcctgggcatggctcctgagatacttgtttggcacatgttggtacctggtgctttagtaataaaaactgaagaactcaggctgggcatggtggctcacacttgtaatcccagcactttgggaggccgaggcgggcagattacctgaggtcgggagttcgagaccagcctgaccgacatggagaaaccccgtctctactaaaaatac

SEQ ID NO: 357131 - DNA, 5741 bp, Homo sapiens
tagagcataaggtagagaggctcggtttattcggacgaggatagatcttcaaacgcatctcagatgaggagtgttttgtgctgggcatggagccccgctatgcacggccagagtggatgattgtcacagtgctgcctgtgcccccgctctccgtgcggcctgctgttgtgatgcagggctctgcccgtaaccaggatgacctgactcacaaactggctgacatcgtgaagatcaacaatcagctgcggcgcaatgagcagaacggcgcagcggcccatgtcattgcagaggatgtgaagctcctccagttccatgtggccaccatggtggacaatgagctgcctggcttgccccgtgccatgcagaagtctgggcgtcccctcaagtccctgaagcagcggttgaagggcaaggaaggccgggtgcgagggaacctgatgggcaaaagagtggacttctcggcccgtactgtcatcacccccgaccccaacctctccattgaccaggttggcgtgccccgctccattgctgccaacatgacctttgcggagattgtcacccccttcaacattgacagacttcaagaactagtgcgcagggggaacagccagtacccaggcgccaagtacatcatccgagacaatggtgatcgcattgacttgcgtttccaccccaagcccagtgaccttcacctgcagaccggctataaggtggaacggcacatgtgtgatggggacattgttatcttcaaccggcagccaactctgcacaaaatgtccatgatggggcatcgggtccgcattctcccatggtctacctttcgcttgaatcttagcgtgacaactccgtacaatgcagactttgacggggatgagatgaacttgcacctgccacagtctctggagacgcgagcagagatccaggagctggccatggttcctcgcatgattgtcaccccccagagcaatcggcctgtcatgggtattgtgcaggacacactcacagcagtgcgcaaattcaccaagagagacgtcttcctggagcggggtgaagtgatgaacctcctgatgttcctgtcgacgtgggatgggaaggtcccacagccggccatcctaaagccccggcccctgtggacaggcaagcaaatcttctccctcatcatacctggtcacatcaattgtatccgtacccacagcacccatcccgatgatgaagacagtggcccttacaagcacatctctcctggggacaccaaggtggtggtggagaatggggagctgatcatgggcatcctgtgtaagaagtctctgggcacgtcagctggctccctggtccacatctcctacctagagatgggtcatgacatcactcgcctcttctactccaacattcagactgtcattaacaactggctcctcatcgagggtcatactattggcattggggactccattgctgattctaagacttaccaggacattcagaacactattaagaaggccaagcaggacgtaatagaggtcatcgagaaggcacacaacaatgagctggagcccaccccagggaacactctgcggcagacgtttgagaatcaggtgaaccgcattcttaacgatgcccgagacaagactggctcctctgctcagaaatccctgtctgaatacaacaacttcaagtctatggtcgtgtccggagctaaaggttccaagattaacatctcccaggtcattgctgtcgttggacagcagaacgtcgagggcaagcggattccatttggcttcaagcaccggactctgcctcacttcatcaaggatgactacgggcctgagagccgtggctttgtggagaactcctacctagccggcctcacacccactgagttctttttccacgccatggggggtcgtgaggggctcattgacacggctgtcaagactgctgagactggatacatccagcggcggctgatcaagtccatggagtcagtgatggtgaagtacgacgcgactgtgcggaactccatcaaccaggtggtgcagctgcgctacggcgaagacggcctggcaggcgagagcgttgagttccagaacctggctacgcttaagccttccaacaaggcttttgagaagaagttccgctttgattataccaatgagagggccctgcggcgcactctgcaggaggacctggtgaaggacgtgctgagcaacgcacacatccagaacgagttggagcgggaatttgagcggatgcgggaggatcgggaggtgctcagggtcatcttcccaactggagacagcaaggtcgtcctcccctgtaacctgctgcggatgatctggaatgctcagaaaatcttccacatcaacccacgccttccctccgacctgcaccccatcaaagtggtggagggagtcaaggaattgagcaagaagctggtgattgtgaatggggatgacccactaagtcgacaggcccaggaaaatgccacgctgctcttcaacatccacctgcggtccacgttgtgttcccgccgcatggcagaggagtttcggctcagtggggaggccttcgactggctgcttggggagattgagtccaagttcaaccaagccattgcgcatcccggggaaatggtgggggctctggctgcgcagtcccttggagaacctgccacccagatgaccttgaataccttccactatgctggtgtgtctgccaagaatgtgacgctgggtgtgccccgacttaaggagctcatcaacatttccaagaagccaaagactccttcgcttactgtcttcctgttgggccagtccgctcgagatgctgagagagccaaggatattctgtgccgtctggagcatacaacgttgaggaaggtgactgccaacacagccatctactatgaccccaacccccagagcacggtggtggcagaggatcaggaatgggtgaatgtctactatgaaatgcctgactttgatgtggcccgaatctccccctggctgttgcgggtggagctggatcggaagcacatgactgaccggaagctcaccatggagcagattgctgaaaagatcaatgctggttttggtgacgacttgaactgcatctttaatgatgacaatgcagagaagctggtgctccgtattcgcatcatgaacagcgatgagaacaagatgcaagaggaggaagaggtggtggacaagatggatgatgatgtcttcctgcgctgcatcgagtccaacatgctgacagatatgaccctgcagggcatcgagcagatcagcaaggtgtacatgcacttgccacagacagacaacaagaagaagatcatcatcacggaggatggggaattcaaggccctgcaggagtggatcctggagacggacggcgtgagcttgatgcgggtgctgagtgagaaggacgtggaccccgtacgcaccacgtccaatgacattgtggagatcttcacggtgctgggcattgaagccgtgcggaaggccctggagcgggagctgtaccacgtcatctcctttgatggctcctatgtcaattaccgacacttggctctcttgtgtgataccatgacctgtcgtggccacttgatggccatcacccgacacggagtcaaccgccaggacacaggaccactcatgaagtgttcctttgaggaaacggtggacgtgcttatggaagcagccgcacacggtgagagtgaccccatgaagggggtctctgagaatatcatgctgggccagctggctccggccggcactggctgctttgacctcctgcttgatgcagagaagtgcaagtatggcatggagatccccaccaatatccccggcctgggggctgctggacccaccggcatgttctttggttcagcacccagtcccatgggtggaatctctcctgccatgacaccttggaaccagggtgcaacccctgcctatggcgcctggtcccccagtgttgggagtggaatgaccccaggggcagccggcttctctcccagtgctgcgtcagatgccagcggcttcagcccaggttactcccctgcctggtctcccacaccgggctccccggggtccccaggtccctcaagcccctacatcccttcaccaggtggtgccatgtctcccagctactcgccaacgtcacctgcctacgagccccgctctcctgggggctacacaccccagagtccctcttattcccccacttcaccctcctactcccctacctctccatcctattctccaaccagtcccaactatagtcccacatcacccagctattcgccaacgtcacccagctactcaccgacctctcccagctactcacccacctctcccagctactcgcccacctctcccagctactcgcccacctctcccagctactcacccacttcccctagctactcgcccacttcccctagctactcgccaacgtctcccagctactcgccgacatctcccagctactcgccaacttcacccagctattctcccacttctcccagctactcacctacctctccaagctattcacccacctcccccagctactcacccacttccccaagttactcacccaccagcccgaactattctccaaccagtcccaattacaccccaacatcacccagctacagcccgacatcacccagctattcacctactagtcccaactacacacctaccagccctaactacagcccaacctctccaagctactctccaacatcacccagctattccccgacctcaccaagttactccccttccagcccacgatacacaccacagtctccaacctataccccaagctcacccagctacagccccagctcgcccagctacagcccaacctcacccaagtacaccccaaccagtccttcttacagtcccagctccccagagtataccccaacctctcccaagtactcacctaccagtcccaaatattcacccacctctcccaagtactcgcctaccagtcccacctattcacccaccaccccaaaatactccccaacatctcctacttattccccaacctctccagtctacaccccaacctctcccaagtactcacctactagccccacttactcgcccacttcccccaagtactcgcccaccagccccacctactcgcccacctcccccaaaggctcaacctactctcccacttcccctggttactcgcccaccagccccacctacagtctcacaagcccggctatcagcccggatgacagtgacgaggagaactgagggcacgtggggtgcggcagcgggctagggcccagggcagcttgcccgtgctgccgtgcagttcttgcctccctcacggggcgtcacccccagcccagctccgttgtacataaatgccttgtggcagagctcccggtgaacttctggatcccgtttctgatgcagattcttgtcttgttctccacttgtgctgttagaactcactggcccagtggtgttctcactcctaccccacccaccccctgcctgtccccaaattgaagatccttccttgcctgtggcttgatgcggggcgggtaaagggtattttaacttaggggtagttcctgctgtgagtggttacagctgatcctcgggaagaacaaagctaaagctgccttttgtctgttattttatttttttgaagtttaaataaagtttactaattttgaccaaaaaaaaatgtacatcgag

SEQ ID NO: 357132 - DNA, 4047 bp, Homo sapiens
agtcggtaccgatacgctcctagacggcaggtcattgctgtcgttggacagcagaacgtcgagggcaagcggattccatttggcttcaagcaccggactctgcctcacttcatcaaggatgactacgggcctgagagccgtggctttgtggagaactcctacctagccggcctcacacccactgagttctttttccacgccatggggggtcgtgaggggctcattgacacggctgtcaagactgctgagactggatacatccagcggcggctgatcaagtccatggagtcagtgatggtgaagtacgacgcgactgtgcggaactccatcaaccaggtggtgcagctgcgctacggcgaagacggcctggcaggcgagagcgttgagttccagaacctggctacgcttaagccttccaacaaggcttttgagaagaagttccgctttgattataccaatgagagggccctgcggcgcactctgcaggaggacctggtgaaggacgtgctgagcaacgcacacatccagaacgagttggagcgggaatttgagcggatgcgggaggatcgggaggtgctcagggtcatcttcccaactggagacagcaaggtcgtcctcccctgtaacctgctgcggatgatctggaatgctcagaaaatcttccacatcaacccacgccttccctccgacctgcaccccatcaaagtggtggagggagtcaaggaattgagcaagaagctggtgattgtgaatggggatgacccactaagtcgacaggcccaggaaaatgccacgctgctcttcaacatccacctgcggtccacgttgtgttcccgccgcatggcagaggagtttcggctcagtggggaggccttcgactggctgcttggggagattgagtccaagttcaaccaagccattgcgcatcccggggaaatggtgggggctctggctgcgcagtcccttggagaacctgccacccagatgaccttgaataccttccactatgctggtgtgtctgccaagaatgtgacgctgggtgtgccccgacttaaggagctcatcaacatttccaagaagccaaagactccttcgcttactgtcttcctgttgggccagtccgctcgagatgctgagagagccaaggatattctgtgccgtctggagcatacaacgttgaggaaggtgactgccaacacagccatctactatgaccccaacccccagagcacggtggtggcagaggatcaggaatgggtgaatgtctactatgaaatgcctgactttgatgtggcccgaatctccccctggctgttgcgggtggagctggatcggaagcacatgactgaccggaagctcaccatggagcagattgctgaaaagatcaatgctggttttggtgacgacttgaactgcatctttaatgatgacaatgcagagaagctggtgctccgtattcgcatcatgaacagcgatgagaacaagatgcaagaggaggaagaggtggtggacaagatggatgatgatgtcttcctgcgctgcatcgagtccaacatgctgacagatatgaccctgcagggcatcgagcagatcagcaaggtgtacatgcacttgccacagacagacaacaagaagaagatcatcatcacggaggatggggaattcaaggccctgcaggagtggatcctggagacggacggcgtgagcttgatgcgggtgctgagtgagaaggacgtggaccccgtacgcaccacgtccaatgacattgtggagatcttcacggtgctgggcattgaagccgtgcggaaggccctggagcgggagctgtaccacgtcatctcctttgatggctcctatgtcaattaccgacacttggctctcttgtgtgataccatgacctgtcgtggccacttgatggccatcacccgacacggagtcaaccgccaggacacaggaccactcatgaagtgttcctttgaggaaacggtggacgtgcttatggaagcagccgcacacggtgagagtgaccccatgaagggggtctctgagaatatcatgctgggccagctggctccggccggcactggctgctttgacctcctgcttgatgcagagaagtgcaagtatggcatggagatccccaccaatatccccggcctgggggctgctggacccaccggcatgttctttggttcagcacccagtcccatgggtggaatctctcctgccatgacaccttggaaccagggtgcaacccctgcctatggcgcctggtcccccagtgttgggagtggaatgaccccaggggcagccggcttctctcccagtgctgcgtcagatgccagcggcttcagcccaggttactcccctgcctggtctcccacaccgggctccccggggtccccaggtccctcaagcccctacatcccttcaccaggtggtgccatgtctcccagctactcgccaacgtcacctgcctacgagccccgctctcctgggggctacacaccccagagtccctcttattcccccacttcaccctcctactcccctacctctccatcctattctccaaccagtcccaactatagtcccacatcacccagctattcgccaacgtcacccagctactcaccgacctctcccagctactcacccacctctcccagctactcgcccacctctcccagctactcgcccacctctcccagctactcacccacttcccctagctactcgcccacttcccctagctactcgccaacgtctcccagctactcgccgacatctcccagctactcgccaacttcacccagctattctcccacttctcccagctactcacctacctctccaagctattcacccacctcccccagctactcacccacttccccaagttactcacccaccagcccgaactattctccaaccagtcccaattacaccccaacatcacccagctacagcccgacatcacccagctattcacctactagtcccaactacacacctaccagccctaactacagcccaacctctccaagctactctccaacatcacccagctattccccgacctcaccaagttactccccttccagcccacgatacacaccacagtctccaacctataccccaagctcacccagctacagccccagctcgcccagctacagcccaacctcacccaagtacaccccaaccagtccttcttacagtcccagctccccagagtataccccaacctctcccaagtactcacctaccagtcccaaatattcacccacctctcccaagtactcgcctaccagtcccacctattcacccaccaccccaaaatactccccaacatctcctacttattccccaacctctccagtctacaccccaacctctcccaagtactcacctactagccccacttactcgcccacttcccccaagtactcgcccaccagccccacctactcgcccacctcccccaaaggctcaacctactctcccacttcccctggttactcgcccaccagccccacctacagtctcacaagcccggctatcagcccggatgacagtgacgaggagaactgagggcacgtggggtgcggcagcgggctagggcccagggcagcttgcccgtgctgccgtgcagttcttgcctccctcacggggcgtcacccccagcccagctccgttgtacataaatgccttgtggcagagctcccggtgaacttctggatcccgtttctgatgcagattcttgtcttgttctccacttgtgctgttagaactcactggcccagtggtgttctcactcctaccccacccaccccctgcctgtccccaaattgaagatccttccttgcctgtggcttgatgcggggcgggtaaagggtattttaacttaggggtagttcctgctgtgagtggttacagctgatcctcgggaagaacaaagctaaagctgccttttgtctgttattttatttttttgaagtttaaataaagtttactaattttgaccaaaaaaaaatgtacatcgag

SEQ ID NO: 357133 - DNA, 6849 bp, Homo sapiens
gagagcgcggccgggacggttggagaagaaggcggctccccggaagggggagagacaaactgccgtaacctctgccgttcaggaacccggttacttatttattcgttaccctttttcttcttcctcccccaaaaaccttttccttttcccttctttttttttcctttttgggagctgaaaaatttccggtaagggaaagaagggctcctttcgctccttatttcgccgcctccttccctccgccaccttcccctcctccggctttttcctcccaactcggggaggtccttcccggtggccgccctgacgaggtctgagcacctaggcggaggcggcgcaggctttttgtagtgaggtttgcgcctgcgcaggcgcctgcctccgccatgcacgggggtggccccccctcgggggacagcgcatgcccgctgcgcaccatcaagagagtccagttcggagtcctgagtccggatgaactgaagcgaatgtctgtgacggagggtggcatcaaatacccagagacgactgagggaggccgccccaagcttggggggctgatggacccgaggcagggggtgattgagcggactggccgctgccaaacatgtgcaggaaacatgacagagtgtcctggccactttggccacattgaactggccaagcctgtgtttcacgtgggcttcctggtgaagacaatgaaagttttgcgctgtgtctgcttcttctgctccaaactgcttgtggactctaacaacccaaagatcaaggatatcctggctaagtccaagggacagcccaagaagcggctcacacatgtctacgacctttgcaagggcaaaaacatatgcgagggtggggaggagatggacaacaagttcggtgtggaacaacctgagggtgacgaggatctgaccaaagaaaagggccatggtggctgtgggcggtaccagcccaggatccggcgttctggcctagagctgtatgcggaatggaagcacgttaatgaggactctcaggagaagaagatcctgctgagtccagagcgagtgcatgagatcttcaaacgcatctcagatgaggagtgttttgtgctgggcatggagccccgctatgcacggccagagtggatgattgtcacagtgctgcctgtgcccccgctctccgtgcggcctgctgttgtgatgcagggctctgcccgtaaccaggatgacctgactcacaaactggctgacatcgtgaagatcaacaatcagctgcggcgcaatgagcagaacggcgcagcggcccatgtcattgcagaggatgtgaagctcctccagttccatgtggccaccatggtggacaatgagctgcctggcttgccccgtgccatgcagaagtctgggcgtcccctcaagtccctgaagcagcggttgaagggcaaggaaggccgggtgcgagggaacctgatgggcaaaagagtggacttctcggcccgtactgtcatcacccccgaccccaacctctccattgaccaggttggcgtgccccgctccattgctgccaacatgacctttgcggagattgtcacccccttcaacattgacagacttcaagaactagtgcgcagggggaacagccagtacccaggcgccaagtacatcatccgagacaatggtgatcgcattgacttgcgtttccaccccaagcccagtgaccttcacctgcagaccggctataaggtggaacggcacatgtgtgatggggacattgttatcttcaaccggcagccaactctgcacaaaatgtccatgatggggcatcgggtccgcattctcccatggtctacctttcgcttgaatcttagcgtgacaactccgtacaatgcagactttgacggggatgagatgaacttgcacctgccacagtctctggagacgcgagcagagatccaggagctggccatggttcctcgcatgattgtcaccccccagagcaatcggcctgtcatgggtattgtgcaggacacactcacagcagtgcgcaaattcaccaagagagacgtcttcctggagcggggtgaagtgatgaacctcctgatgttcctgtcgacgtgggatgggaaggtcccacagccggccatcctaaagccccggcccctgtggacaggcaagcaaatcttctccctcatcatacctggtcacatcaattgtatccgtacccacagcacccatcccgatgatgaagacagtggcccttacaagcacatctctcctggggacaccaaggtggtggtggagaatggggagctgatcatgggcatcctgtgtaagaagtctctgggcacgtcagctggctccctggtccacatctcctacctagagatgggtcatgacatcactcgcctcttctactccaacattcagactgtcattaacaactggctcctcatcgagggtcatactattggcattggggactccattgctgattctaagacttaccaggacattcagaacactattaagaaggccaagcaggacgtaatagaggtcatcgagaaggcacacaacaatgagctggagcccaccccagggaacactctgcggcagacgtttgagaatcaggtgaaccgcattcttaacgatgcccgagacaagactggctcctctgctcagaaatccctgtctgaatacaacaacttcaagtctatggtcgtgtccggagctaaaggttccaagattaacatctcccaggtcattgctgtcgttggacagcagaacgtcgagggcaagcggattccatttggcttcaagcaccggactctgcctcacttcatcaaggatgactacgggcctgagagccgtggctttgtggagaactcctacctagccggcctcacacccactgagttctttttccacgccatggggggtcgtgaggggctcattgacacggctgtcaagactgctgagactggatacatccagcggcggctgatcaagtccatggagtcagtgatggtgaagtacgacgcgactgtgcggaactccatcaaccaggtggtgcagctgcgctacggcgaagacggcctggcaggcgagagcgttgagttccagaacctggctacgcttaagccttccaacaaggcttttgagaagaagttccgctttgattataccaatgagagggccctgcggcgcactctgcaggaggacctggtgaaggacgtgctgagcaacgcacacatccagaacgagttggagcgggaatttgagcggatgcgggaggatcgggaggtgctcagggtcatcttcccaactggagacagcaaggtcgtcctcccctgtaacctgctgcggatgatctggaatgctcagaaaatcttccacatcaacccacgccttccctccgacctgcaccccatcaaagtggtggagggagtcaaggaattgagcaagaagctggtgattgtgaatggggatgacccactaagtcgacaggcccaggaaaatgccacgctgctcttcaacatccacctgcggtccacgttgtgttcccgccgcatggcagaggagtttcggctcagtggggaggccttcgactggctgcttggggagattgagtccaagttcaaccaagccattgcgcatcccggggaaatggtgggggctctggctgcgcagtcccttggagaacctgccacccagatgaccttgaataccttccactatgctggtgtgtctgccaagaatgtgacgctgggtgtgccccgacttaaggagctcatcaacatttccaagaagccaaagactccttcgcttactgtcttcctgttgggccagtccgctcgagatgctgagagagccaaggatattctgtgccgtctggagcatacaacgttgaggaaggtgactgccaacacagccatctactatgaccccaacccccagagcacggtggtggcagaggatcaggaatgggtgaatgtctactatgaaatgcctgactttgatgtggcccgaatctccccctggctgttgcgggtggagctggatcggaagcacatgactgaccggaagctcaccatggagcagattgctgaaaagatcaatgctggttttggtgacgacttgaactgcatctttaatgatgacaatgcagagaagctggtgctccgtattcgcatcatgaacagcgatgagaacaagatgcaagaggaggaagaggtggtggacaagatggatgatgatgtcttcctgcgctgcatcgagtccaacatgctgacagatatgaccctgcagggcatcgagcagatcagcaaggtgtacatgcacttgccacagacagacaacaagaagaagatcatcatcacggaggatggggaattcaaggccctgcaggagtggatcctggagacggacggcgtgagcttgatgcgggtgctgagtgagaaggacgtggaccccgtacgcaccacgtccaatgacattgtggagatcttcacggtgctgggcattgaagccgtgcggaaggccctggagcgggagctgtaccacgtcatctcctttgatggctcctatgtcaattaccgacacttggctctcttgtgtgataccatgacctgtcgtggccacttgatggccatcacccgacacggagtcaaccgccaggacacaggaccactcatgaagtgttcctttgaggaaacggtggacgtgcttatggaagcagccgcacacggtgagagtgaccccatgaagggggtctctgagaatatcatgctgggccagctggctccggccggcactggctgctttgacctcctgcttgatgcagagaagtgcaagtatggcatggagatccccaccaatatccccggcctgggggctgctggacccaccggcatgttctttggttcagcacccagtcccatgggtggaatctctcctgccatgacaccttggaaccagggtgcaacccctgcctatggcgcctggtcccccagtgttgggagtggaatgaccccaggggcagccggcttctctcccagtgctgcgtcagatgccagcggcttcagcccaggttactcccctgcctggtctcccacaccgggctccccggggtccccaggtccctcaagcccctacatcccttcaccaggtgagttgtcgccatctgtcaggccaggtttgtttcctccacagttctgggtgagtctgtccattgctcatctcctttgttggctgcttccccacaggtggtgccatgtctcccagctactcgccaacgtcacctgcctacgagccccgctctcctgggggctacacaccccagagtccctcttattcccccacttcaccctcctactcccctacctctccatcctattctccaaccagtcccaactatagtcccacatcacccagctattcgccaacgtcacccagctactcaccgacctctcccagctactcacccacctctcccagctactcgcccacctctcccagctactcgcccacctctcccagctactcacccacttcccctagctactcgcccacttcccctagctactcgccaacgtctcccagctactcgccgacatctcccagctactcgccaacttcacccagctattctcccacttctcccagctactcacctacctctccaagctattcacccacctcccccagctactcacccacttccccaagttactcacccaccagcccgaactattctccaaccagtcccaattacaccccaacatcacccagctacagcccgacatcacccagctattcacctactagtcccaactacacacctaccagccctaactacagcccaacctctccaagctactctccaacatcacccagctattccccgacctcaccaagttactccccttccagcccacgatacacaccacagtctccaacctataccccaagctcacccagctacagccccagctcgcccagctacagcccaacctcacccaagtacaccccaaccagtccttcttacagtcccagctccccagagtataccccaacctctcccaagtactcacctaccagtcccaaatattcacccacctctcccaagtactcgcctaccagtcccacctattcacccaccaccccaaaatactccccaacatctcctacttattccccaacctctccagtctacaccccaacctctcccaagtactcacctactagccccacttactcgcccacttcccccaagtactcgcccaccagccccacctactcgcccacctcccccaaaggctcaacctactctcccacttcccctggttactcgcccaccagccccacctacagtctcacaagcccggctatcagcccggatgacagtgacgaggagaactgagggcacgtggggtgcggcagcgggctagggcccagggcagcttgcccgtgctgccgtgcagttcttgcctccctcacggggcgtcacccccagcccagctccgttgtacataaatgccttgtggcagagctcccggtgaacttctggatcccgtttctgatgcagattcttgtcttgttctccacttgtgctgttagaactcactggcccagtggtgttctcactcctaccccacccaccccctgcctgtccccaaattgaagatccttccttgcctgtggcttgatgcggggcgggtaaagggtattttaacttaggggtagttcctgctgtgagtggttacagctgatcctcgggaagaacaaagctaaagctgccttttgtctgttattttatttttttgaagtttaaataaagtttactaattttgaccaaaaaaaaatgtacatcgag

SEQ ID NO: 357134 - DNA, 2585 bp, Homo sapiens
ggcggtagggcatatcgtcgaccacgcgctccgaggaagaggtggtggacaagatggatgatgatgtcttcctgcgctgcatcgagtccaacatgctgacagatatgaccctgcagggcatcgagcagatcagcaaggtgtacatgcacttgccacagacagacaacaagaagaagatcatcatcacggaggatggggaattcaaggccctgcaggagtggatcctggagacggacggcgtgagcttgatgcgggtgctgagtgagaaggacgtggaccccgtacgcaccacgtccaatgacattgtggagatcttcacggtgctgggcattgaagccgtgcggaaggccctggagcgggagctgtaccacgtcatctcctttgatggctcctatgtcaattaccgacacttggctctcttgtgtgataccatgacctgtcgtggccacttgatggccatcacccgacacggagtcaaccgccaggacacaggaccactcatgaagtgttcctttgaggaaacggtggacgtgcttatggaagcagccgcacacggtgagagtgaccccatgaagggggtctctgagaatatcatgctgggccagctggctccggccggcactggctgctttgacctcctgcttgatgcagagaagtgcaagtatggcatggagatccccaccaatatccccggcctgggggctgctggacccaccggcatgttctttggttcagcacccagtcccatgggtggaatctctcctgccatgacaccttggaaccagggtgcaacccctgcctatggcgcctggtcccccagtgttgggagtggaatgaccccaggggcagccggcttctctcccagtgctgcgtcagatgccagcggcttcagcccaggttactcccctgcctggtctcccacaccgggctccccggggtccccaggtccctcaagcccctacatcccttcaccaggtggtgccatgtctcccagctactcgccaacgtcacctgcctacgagccccgctctcctgggggctacacaccccagagtccctcttattcccccacttcaccctcctactcccctacctctccatcctattctccaaccagtcccaactatagtcccacatcacccagctattcgccaacgtcacccagctactcaccgacctctcccagctactcacccacctctcccagctactcgcccacctctcccagctactcgcccacctctcccagctactcacccacttcccctagctactcgcccacttcccctagctactcgccaacgtctcccagctactcgccgacatctcccagctactcgccaacttcacccagctattctcccacttctcccagctactcacctacctctccaagctattcacccacctcccccagctactcacccacttccccaagttactcacccaccagcccgaactattctccaaccagtcccaattacaccccaacatcacccagctacagcccgacatcacccagctattcacctactagtcccaactacacacctaccagccctaactacagcccaacctctccaagctactctccaacatcacccagctattccccgacctcaccaagttactccccttccagcccacgatacacaccacagtctccaacctataccccaagctcacccagctacagccccagctcgcccagctacagcccaacctcacccaagtacaccccaaccagtccttcttacagtcccagctccccagagtataccccaacctctcccaagtactcacctaccagtcccaaatattcacccacctctcccaagtactcgcctaccagtcccacctattcacccaccaccccaaaatactccccaacatctcctacttattccccaacctctccagtctacaccccaacctctcccaagtactcacctactagccccacttactcgcccacttcccccaagtactcgcccaccagccccacctactcgcccacctcccccaaaggctcaacctactctcccacttcccctggttactcgcccaccagccccacctacagtctcacaagcccggctatcagcccggatgacagtgacgaggagaactgagggcacgtggggtgcggcagcgggctagggcccagggcagcttgcccgtgctgccgtgcagttcttgcctccctcacggggcgtcacccccagcccagctccgttgtacataaatgccttgtggcagagctcccggtgaacttctggatcccgtttctgatgcagattcttgtcttgttctccacttgtgctgttagaactcactggcccagtggtgttctcactcctaccccacccaccccctgcctgtccccaaattgaagatccttccttgcctgtggcttgatgcggggcgggtaaagggtattttaacttaggggtagttcctgctgtgagtggttacagctgatcctcgggaagaacaaagctaaagctgccttttgtctgttattttatttttttgaagtttaaataaagtttactaattttgaccaaaaaaaaatgtacatcgag

SEQ ID NO: 357135 - DNA, 1858 bp, Homo sapiens
gggagtggaatgaccccaggggcagccggcttctctcccagtgctgcgtcagatgccagcggcttcagcccaggttactcccctgcctggtctcccacaccgggctccccggggtccccaggtccctcaagcccctacatcccttcaccaggtgagttgtcgccatctgtcaggccaggtttgtttcctccacagttctgggtgagtctgtccattgctcatctcctttgttggctgcttccccacaggtggtgccatgtctcccagctactcgccaacgtcacctgcctacgagccccgctctcctgggggctacacaccccagagtccctcttattcccccacttcaccctcctactcccctacctctccatcctattctccaaccagtcccaactatagtcccacatcacccagctattcgccaacgtcacccagctactcaccgacctctcccagctactcacccacctctcccagctactcgcccacctctcccagctactcgcccacctctcccagctactcacccacttcccctagctactcgcccacttcccctagctactcgccaacgtctcccagctactcgccgacatctcccagctactcgccaacttcacccagctattctcccacttctcccagctactcacctacctctccaagctattcacccacctcccccagctactcacccacttccccaagttactcacccaccagcccgaactattctccaaccagtcccaattacaccccaacatcacccagctacagcccgacatcacccagctattcacctactagtcccaactacacacctaccagccctaactacagcccaacctctccaagctactctccaacatcacccagctattccccgacctcaccaagttactccccttccagcccacgatacacaccacagtctccaacctataccccaagctcacccagctacagccccagctcgcccagctacagcccaacctcacccaagtacaccccaaccagtccttcttacagtcccagctccccagagtataccccaacctctcccaagtactcacctaccagtcccaaatattcacccacctctcccaagtactcgcctaccagtcccacctattcacccaccaccccaaaatactccccaacatctcctacttattccccaacctctccagtctacaccccaacctctcccaagtactcacctactagccccacttactcgcccacttcccccaagtactcgcccaccagccccacctactcgcccacctcccccaaaggctcaacctactctcccacttcccctggttactcgcccaccagccccacctacagtctcacaagcccggctatcagcccggatgacagtgacgaggagaactgagggcacgtggggtgcggcagcgggctagggcccagggcagcttgcccgtgctgccgtgcagttcttgcctccctcacggggcgtcacccccagcccagctccgttgtacataaatgccttgtggcagagctcccggtgaacttctggatcccgtttctgatgcagattcttgtcttgttctccacttgtgctgttagaactcactggcccagtggtgttctcactcctaccccacccaccccctgcctgtccccaaattgaagatccttccttgcctgtggcttgatgcggggcgggtaaagggtattttaacttaggggtagttcctgctgtgagtggttacagctgatcctcgggaagaacaaagctaaagctgccttttgtctgttattttatttttttgaagtttaaataaagtttactaattttgaccaaaaaaaaatgtacatcgag

SEQ ID NO: 357136 - DNA, 6163 bp, Homo sapiens
gagagcgcggccgggacggttggagaagaaggcggctccccggaagggggagagacaaactgccgtaacctctgccgttcaggaacccggttacttatttattcgttaccctttttcttcttcctcccccaaaaaccttttccttttcccttctttttttttcctttttgggagctgaaaaatttccggtaagggaaagaagggctcctttcgctccttatttcgccgcctccttccctccgccaccttcccctcctccggctttttcctcccaactcggggaggtccttcccggtggccgccctgacgaggtctgagcacctaggcggaggcggcgcaggctttttgtagtgaggtttgcgcctgcgcaggcgcctgcctccgccatgcacgggggtggccccccctcgggggacagcgcatgcccgctgcgcaccatcaagagagtccagttcggagtcctgagtccggatgaactgaagcgaatgtctgtgacggagggtggcatcaaatacccagagacgactgagggaggccgccccaagcttggggggctgatggacccgaggcagggggtgattgagcggactggccgctgccaaacatgtgcaggaaacatgacagagtgtcctggccactttggccacattgaactggccaagcctgtgtttcacgtgggcttcctggtgaagacaatgaaagttttgcgctgtgtctgcttcttctgctccaaactgcttgtggactctaacaacccaaagatcaaggatatcctggctaagtccaagggacagcccaagaagcggctcacacatgtctacgacctttgcaagggcaaaaacatatgcgagggtggggaggagatggacaacaagttcggtgtggaacaacctgagggtgacgaggatctgaccaaagaaaagggccatggtggctgtgggcggtaccagcccaggatccggcgttctggcctagagctgtatgcggaatggaagcacgttaatgaggactctcaggagaagaagatcctgctgagtccagagcgagtgcatgagatcttcaaacgcatctcagatgaggagtgttttgtgctgggcatggagccccgctatgcacggccagagtggatgattgtcacagtgctgcctgtgcccccgctctccgtgcggcctgctgttgtgatgcagggctctgcccgtaaccaggatgacctgactcacaaactggctgacatcgtgaagatcaacaatcagctgcggcgcaatgagcagaacggcgcagcggcccatgtcattgcagaggatgtgaagctcctccagttccatgtggccaccatggtggacaatgagctgcctggcttgccccgtgccatgcagaagtctgggcgtcccctcaagtccctgaagcagcggttgaagggcaaggaaggccgggtgcgagggaacctgatgggcaaaagagtggacttctcggcccgtactgtcatcacccccgaccccaacctctccattgaccaggttggcgtgccccgctccattgctgccaacatgacctttgcggagattgtcacccccttcaacattgacagacttcaagaactagtgcgcagggggaacagccagtacccaggcgccaagtacatcatccgagacaatggtgatcgcattgacttgcgtttccaccccaagcccagtgaccttcacctgcagaccggctataaggtggaacggcacatgtgtgatggggacattgttatcttcaaccggcagccaactctgcacaaaatgtccatgatggggcatcgggtccgcattctcccatggtctacctttcgcttgaatcttagcgtgacaactccgtacaatgcagactttgacggggatgagatgaacttgcacctgccacagtctctggagacgcgagcagagatccaggagctggccatggttcctcgcatgattgtcaccccccagagcaatcggcctgtcatgggtattgtgcaggacacactcacagcagtgcgcaaattcaccaagagagacgtcttcctggagcggggtgaagtgatgaacctcctgatgttcctgtcgacgtgggatgggaaggtcccacagccggccatcctaaagccccggcccctgtggacaggcaagcaaatcttctccctcatcatacctggtcacatcaattgtatccgtacccacagcacccatcccgatgatgaagacagtggcccttacaagcacatctctcctggggacaccaaggtggtggtggagaatggggagctgatcatgggcatcctgtgtaagaagtctctgggcacgtcagctggctccctggtccacatctcctacctagagatgggtcatgacatcactcgcctcttctactccaacattcagactgtcattaacaactggctcctcatcgagggtcatactattggcattggggactccattgctgattctaagacttaccaggacattcagaacactattaagaaggccaagcaggacgtaatagaggtcatcgagaaggcacacaacaatgagctggagcccaccccagggaacactctgcggcagacgtttgagaatcaggtgaaccgcattcttaacgatgcccgagacaagactggctcctctgctcagaaatccctgtctgaatacaacaacttcaagtctatggtcgtgtccggagctaaaggttccaagattaacatctcccaggtcattgctgtcgttggacagcagaacgtcgagggcaagcggattccatttggcttcaagcaccggactctgcctcacttcatcaaggatgactacgggcctgagagccgtggctttgtggagaactcctacctagccggcctcacacccactgagttctttttccacgccatggggggtcgtgaggggctcattgacacggctgtcaagactgctgagactggatacatccagcggcggctgatcaagtccatggagtcagtgatggtgaagtacgacgcgactgtgcggaactccatcaaccaggtggtgcagctgcgctacggcgaagacggcctggcaggcgagagcgttgagttccagaacctggctacgcttaagccttccaacaaggcttttgagaagaagttccgctttgattataccaatgagagggccctgcggcgcactctgcaggaggacctggtgaaggacgtgctgagcaacgcacacatccagaacgagttggagcgggaatttgagcggatgcgggaggatcgggaggtgctcagggtcatcttcccaactggagacagcaaggtcgtcctcccctgtaacctgctgcggatgatctggaatgctcagaaaatcttccacatcaacccacgccttccctccgacctgcaccccatcaaagtggtggagggagtcaaggaattgagcaagaagctggtgattgtgaatggggatgacccactaagtcgacaggcccaggaaaatgccacgctgctcttcaacatccacctgcggtccacgttgtgttcccgccgcatggcagaggagtttcggctcagtggggaggccttcgactggctgcttggggagattgagtccaagttcaaccaagccattgcgcatcccggggaaatggtgggggctctggctgcgcagtcccttggagaacctgccacccagatgaccttgaataccttccactatgctggtgtgtctgccaagaatgtgacgctgggtgtgccccgacttaaggagctcatcaacatttccaagaagccaaagactccttcgcttactgtcttcctgttgggccagtccgctcgagatgctgagagagccaaggatattctgtgccgtctggagcatacaacgttgaggaaggtgactgccaacacagccatctactatgaccccaacccccagagcacggtggtggcagaggatcaggaatgggtgaatgtctactatgaaatgcctgactttgatgtggcccgaatctccccctggctgttgcgggtggagctggatcggaagcacatgactgaccggaagctcaccatggagcagattgctgaaaagatcaatgctggttttggtgacgacttgaactgcatctttaatgatgacaatgcagagaagctggtgctccgtattcgcatcatgaacagcgatgagaacaagatgcaagaggaggaagaggtggtggacaagatggatgatgatgtcttcctgcgctgcatcgagtccaacatgctgacagatatgaccctgcagggcatcgagcagatcagcaaggtgtacatgcacttgccacagacagacaacaagaagaagatcatcatcacggaggatggggaattcaaggccctgcaggagtggatcctggagacggacggcgtgagcttgatgcgggtgctgagtgagaaggacgtggaccccgtacgcaccacgtccaatgacattgtggagatcttcacggtgctgggcattgaagccgtgcggaaggccctggagcgggagctgtaccacgtcatctcctttgatggctcctatgtcaattaccgacacttggctctcttgtgtgataccatgacctgtcgtggccacttgatggccatcacccgacacggagtcaaccgccaggacacaggaccactcatgaagtgttcctttgaggaaacggtggacgtgcttatggaagcagccgcacacggtgagagtgaccccatgaagggggtctctgagaatatcatgctgggccagctggctccggccggcactggctgctttgacctcctgcttgatgcagagaagtgcaagtatggcatggagatccccaccaatatccccggcctgggggctgctggacccaccggcatgttctttggttcagcacccagtcccatgggtggaatctctcctgccatgacaccttggaaccagggtgcaacccctgcctatggcgcctggtcccccagtgttgggagtggaatgaccccaggggcagccggcttctctcccagtgctgcgtcagatgccagcggcttcagcccaggttactcccctgcctggtctcccacaccgggctccccggggtccccaggtccctcaagcccctacatcccttcaccaggtggtgccatgtctcccagctactcgccaacgtcacctgcctacgagccccgctctcctgggggctacacaccccagagtccctcttattcccccacttcaccctcctactcccctacctctccatcctattctccaaccagtcccaactatagtcccacatcacccagctattcgccaacgtcacccagctactcaccgacctctcccagctactcacccacctctcccagctactcgcccacctctcccagctactcgcccacctctcccagctactcacccacttcccctagctactcgcccacttcccctagctactcgccaacgtctcccagctactcgccgacatctcccagctactcgccaacttcacccagctattctcccacttctcccagctactcacctacctctccaagctattcacccacctcccccagctactcacccacttccccaagttactcacccaccagcccgaactattctccaaccagtcccaattacaccccaacatcacccagctacagcccgacatcacccagctattcacctactagtcccaactacacacctaccagccctaactacagcccaacctctccaagctactctccaacatcacccagctattccccgacctcaccaagttactccccttccagcccacgatacacaccacagtctccaacctataccccaagctcacccagctacagccccagctcgcccagctacagcccaacctcacccaagtacaccccaaccagtccttcttacagtcccagctccccagagtataccccaacctctcccaagtactcacctaccagtcccaaatattcacccacctctcccaagtactcgcctaccagtcccacctattcacccaccaccccaaaatactccccaacatctcctacttattccccaaccttttacaccaaccccgtgatcgtggggttgtaattacaaccccacgatcacacatagtattgtggtgtgttgaattcaatacg

SEQ ID NO: 357137 - DNA, 6207 bp, Homo sapiens
gagagcgcggccgggacggttggagaagaaggcggctccccggaagggggagagacaaactgccgtaacctctgccgttcaggaacccggttacttatttattcgttaccctttttcttcttcctcccccaaaaaccttttccttttcccttctttttttttcctttttgggagctgaaaaatttccggtaagggaaagaagggctcctttcgctccttatttcgccgcctccttccctccgccaccttcccctcctccggctttttcctcccaactcggggaggtccttcccggtggccgccctgacgaggtctgagcacctaggcggaggcggcgcaggctttttgtagtgaggtttgcgcctgcgcaggcgcctgcctccgccatgcacgggggtggccccccctcgggggacagcgcatgcccgctgcgcaccatcaagagagtccagttcggagtcctgagtccggatgaactgaagcgaatgtctgtgacggagggtggcatcaaatacccagagacgactgagggaggccgccccaagcttggggggctgatggacccgaggcagggggtgattgagcggactggccgctgccaaacatgtgcaggaaacatgacagagtgtcctggccactttggccacattgaactggccaagcctgtgtttcacgtgggcttcctggtgaagacaatgaaagttttgcgctgtgtctgcttcttctgctccaaactgcttgtggactctaacaacccaaagatcaaggatatcctggctaagtccaagggacagcccaagaagcggctcacacatgtctacgacctttgcaagggcaaaaacatatgcgagggtggggaggagatggacaacaagttcggtgtggaacaacctgagggtgacgaggatctgaccaaagaaaagggccatggtggctgtgggcggtaccagcccaggatccggcgttctggcctagagctgtatgcggaatggaagcacgttaatgaggactctcaggagaagaagatcctgctgagtccagagcgagtgcatgagatcttcaaacgcatctcagatgaggagtgttttgtgctgggcatggagccccgctatgcacggccagagtggatgattgtcacagtgctgcctgtgcccccgctctccgtgcggcctgctgttgtgatgcagggctctgcccgtaaccaggatgacctgactcacaaactggctgacatcgtgaagatcaacaatcagctgcggcgcaatgagcagaacggcgcagcggcccatgtcattgcagaggatgtgaagctcctccagttccatgtggccaccatggtggacaatgagctgcctggcttgccccgtgccatgcagaagtctgggcgtcccctcaagtccctgaagcagcggttgaagggcaaggaaggccgggtgcgagggaacctgatgggcaaaagagtggacttctcggcccgtactgtcatcacccccgaccccaacctctccattgaccaggttggcgtgccccgctccattgctgccaacatgacctttgcggagattgtcacccccttcaacattgacagacttcaagaactagtgcgcagggggaacagccagtacccaggcgccaagtacatcatccgagacaatggtgatcgcattgacttgcgtttccaccccaagcccagtgaccttcacctgcagaccggctataaggtggaacggcacatgtgtgatggggacattgttatcttcaaccggcagccaactctgcacaaaatgtccatgatggggcatcgggtccgcattctcccatggtctacctttcgcttgaatcttagcgtgacaactccgtacaatgcagactttgacggggatgagatgaacttgcacctgccacagtctctggagacgcgagcagagatccaggagctggccatggttcctcgcatgattgtcaccccccagagcaatcggcctgtcatgggtattgtgcaggacacactcacagcagtgcgcaaattcaccaagagagacgtcttcctggagcggggtgaagtgatgaacctcctgatgttcctgtcgacgtgggatgggaaggtcccacagccggccatcctaaagccccggcccctgtggacaggcaagcaaatcttctccctcatcatacctggtcacatcaattgtatccgtacccacagcacccatcccgatgatgaagacagtggcccttacaagcacatctctcctggggacaccaaggtggtggtggagaatggggagctgatcatgggcatcctgtgtaagaagtctctgggcacgtcagctggctccctggtccacatctcctacctagagatgggtcatgacatcactcgcctcttctactccaacattcagactgtcattaacaactggctcctcatcgagggtcatactattggcattggggactccattgctgattctaagacttaccaggacattcagaacactattaagaaggccaagcaggacgtaatagaggtcatcgagaaggcacacaacaatgagctggagcccaccccagggaacactctgcggcagacgtttgagaatcaggtgaaccgcattcttaacgatgcccgagacaagactggctcctctgctcagaaatccctgtctgaatacaacaacttcaagtctatggtcgtgtccggagctaaaggttccaagattaacatctcccaggtcattgctgtcgttggacagcagaacgtcgagggcaagcggattccatttggcttcaagcaccggactctgcctcacttcatcaaggatgactacgggcctgagagccgtggctttgtggagaactcctacctagccggcctcacacccactgagttctttttccacgccatggggggtcgtgaggggctcattgacacggctgtcaagactgctgagactggatacatccagcggcggctgatcaagtccatggagtcagtgatggtgaagtacgacgcgactgtgcggaactccatcaaccaggtggtgcagctgcgctacggcgaagacggcctggcaggcgagagcgttgagttccagaacctggctacgcttaagccttccaacaaggcttttgagaagaagttccgctttgattataccaatgagagggccctgcggcgcactctgcaggaggacctggtgaaggacgtgctgagcaacgcacacatccagaacgagttggagcgggaatttgagcggatgcgggaggatcgggaggtgctcagggtcatcttcccaactggagacagcaaggtcgtcctcccctgtaacctgctgcggatgatctggaatgctcagaaaatcttccacatcaacccacgccttccctccgacctgcaccccatcaaagtggtggagggagtcaaggaattgagcaagaagctggtgattgtgaatggggatgacccactaagtcgacaggcccaggaaaatgccacgctgctcttcaacatccacctgcggtccacgttgtgttcccgccgcatggcagaggagtttcggctcagtggggaggccttcgactggctgcttggggagattgagtccaagttcaaccaagccattgcgcatcccggggaaatggtgggggctctggctgcgcagtcccttggagaacctgccacccagatgaccttgaataccttccactatgctggtgtgtctgccaagaatgtgacgctgggtgtgccccgacttaaggagctcatcaacatttccaagaagccaaagactccttcgcttactgtcttcctgttgggccagtccgctcgagatgctgagagagccaaggatattctgtgccgtctggagcatacaacgttgaggaaggtgactgccaacacagccatctactatgaccccaacccccagagcacggtggtggcagaggatcaggaatgggtgaatgtctactatgaaatgcctgactttgatgtggcccgaatctccccctggctgttgcgggtggagctggatcggaagcacatgactgaccggaagctcaccatggagcagattgctgaaaagatcaatgctggttttggtgacgacttgaactgcatctttaatgatgacaatgcagagaagctggtgctccgtattcgcatcatgaacagcgatgagaacaagatgcaagaggaggaagaggtggtggacaagatggatgatgatgtcttcctgcgctgcatcgagtccaacatgctgacagatatgaccctgcagggcatcgagcagatcagcaaggtgtacatgcacttgccacagacagacaacaagaagaagatcatcatcacggaggatggggaattcaaggccctgcaggagtggatcctggagacggacggcgtgagcttgatgcgggtgctgagtgagaaggacgtggaccccgtacgcaccacgtccaatgacattgtggagatcttcacggtgctgggcattgaagccgtgcggaaggccctggagcgggagctgtaccacgtcatctcctttgatggctcctatgtcaattaccgacacttggctctcttgtgtgataccatgacctgtcgtggccacttgatggccatcacccgacacggagtcaaccgccaggacacaggaccactcatgaagtgttcctttgaggaaacggtggacgtgcttatggaagcagccgcacacggtgagagtgaccccatgaagggggtctctgagaatatcatgctgggccagctggctccggccggcactggctgctttgacctcctgcttgatgcagagaagtgcaagtatggcatggagatccccaccaatatccccggcctgggggctgctggacccaccggcatgttctttggttcagcacccagtcccatgggtggaatctctcctgccatgacaccttggaaccagggtgcaacccctgcctatggcgcctggtcccccagtgttgggagtggaatgaccccaggggcagccggcttctctcccagtgctgcgtcagatgccagcggcttcagcccaggttactcccctgcctggtctcccacaccgggctccccggggtccccaggtccctcaagcccctacatcccttcaccaggtggtgccatgtctcccagctactcgccaacgtcacctgcctacgagccccgctctcctgggggctacacaccccagagtccctcttattcccccacttcaccctcctactcccctacctctccatcctattctccaaccagtcccaactatagtcccacatcacccagctattcgccaacgtcacccagctactcaccgacctctcccagctactcacccacctctcccagctactcgcccacctctcccagctactcgcccacctctcccagctactcacccacttcccctagctactcgcccacttcccctagctactcgccaacgtctcccagctactcgccgacatctcccagctactcgccaacttcacccagctattctcccacttctcccagctactcacctacctctccaagctattcacccacctcccccagctactcacccacttccccaagttactcacccaccagcccgaactattctccaaccagtcccaattacaccccaacatcacccagctacagcccgacatcacccagctattcacctactagtcccaactacacacctaccagccctaactacagcccaacctctccaagctactctccaacatcacccagctattccccgacctcaccaagttactccccttccagcccacgatacacaccacagtctccaacctataccccaagctcacccagctacagccccagctcgcccagctacagcccaacctcacccaagtacaccccaaccagtccttcttacagtcccagctccccagagtataccccaacctctcccaagtactcacctaccgggttaggtctacctggccaggtagacctaacccaggttaacctaacccaggtacacctaacccaggtagacctaactagaagtgtgaaaacgtaggcttggattaaggcgacagcgatttctaggatagtcagtagaattagaatcgtgacgatgatcagtgtagagggaaggttaatggttgatatcgctagggtggtgcttccaatcaggtgcatgagtaggtggcctg

SEQ ID NO: 357138 - DNA, 5955 bp, Homo sapiens
gagagcgcggccgggacggttggagaagaaggcggctccccggaagggggagagacaaactgccgtaacctctgccgttcaggaacccggttacttatttattcgttaccctttttcttcttcctcccccaaaaaccttttccttttcccttctttttttttcctttttgggagctgaaaaatttccggtaagggaaagaagggctcctttcgctccttatttcgccgcctccttccctccgccaccttcccctcctccggctttttcctcccaactcggggaggtccttcccggtggccgccctgacgaggtctgagcacctaggcggaggcggcgcaggctttttgtagtgaggtttgcgcctgcgcaggcgcctgcctccgccatgcacgggggtggccccccctcgggggacagcgcatgcccgctgcgcaccatcaagagagtccagttcggagtcctgagtccggatgaactgaagcgaatgtctgtgacggagggtggcatcaaatacccagagacgactgagggaggccgccccaagcttggggggctgatggacccgaggcagggggtgattgagcggactggccgctgccaaacatgtgcaggaaacatgacagagtgtcctggccactttggccacattgaactggccaagcctgtgtttcacgtgggcttcctggtgaagacaatgaaagttttgcgctgtgtctgcttcttctgctccaaactgcttgtggactctaacaacccaaagatcaaggatatcctggctaagtccaagggacagcccaagaagcggctcacacatgtctacgacctttgcaagggcaaaaacatatgcgagggtggggaggagatggacaacaagttcggtgtggaacaacctgagggtgacgaggatctgaccaaagaaaagggccatggtggctgtgggcggtaccagcccaggatccggcgttctggcctagagctgtatgcggaatggaagcacgttaatgaggactctcaggagaagaagatcctgctgagtccagagcgagtgcatgagatcttcaaacgcatctcagatgaggagtgttttgtgctgggcatggagccccgctatgcacggccagagtggatgattgtcacagtgctgcctgtgcccccgctctccgtgcggcctgctgttgtgatgcagggctctgcccgtaaccaggatgacctgactcacaaactggctgacatcgtgaagatcaacaatcagctgcggcgcaatgagcagaacggcgcagcggcccatgtcattgcagaggatgtgaagctcctccagttccatgtggccaccatggtggacaatgagctgcctggcttgccccgtgccatgcagaagtctgggcgtcccctcaagtccctgaagcagcggttgaagggcaaggaaggccgggtgcgagggaacctgatgggcaaaagagtggacttctcggcccgtactgtcatcacccccgaccccaacctctccattgaccaggttggcgtgccccgctccattgctgccaacatgacctttgcggagattgtcacccccttcaacattgacagacttcaagaactagtgcgcagggggaacagccagtacccaggcgccaagtacatcatccgagacaatggtgatcgcattgacttgcgtttccaccccaagcccagtgaccttcacctgcagaccggctataaggtggaacggcacatgtgtgatggggacattgttatcttcaaccggcagccaactctgcacaaaatgtccatgatggggcatcgggtccgcattctcccatggtctacctttcgcttgaatcttagcgtgacaactccgtacaatgcagactttgacggggatgagatgaacttgcacctgccacagtctctggagacgcgagcagagatccaggagctggccatggttcctcgcatgattgtcaccccccagagcaatcggcctgtcatgggtattgtgcaggacacactcacagcagtgcgcaaattcaccaagagagacgtcttcctggagcggggtgaagtgatgaacctcctgatgttcctgtcgacgtgggatgggaaggtcccacagccggccatcctaaagccccggcccctgtggacaggcaagcaaatcttctccctcatcatacctggtcacatcaattgtatccgtacccacagcacccatcccgatgatgaagacagtggcccttacaagcacatctctcctggggacaccaaggtggtggtggagaatggggagctgatcatgggcatcctgtgtaagaagtctctgggcacgtcagctggctccctggtccacatctcctacctagagatgggtcatgacatcactcgcctcttctactccaacattcagactgtcattaacaactggctcctcatcgagggtcatactattggcattggggactccattgctgattctaagacttaccaggacattcagaacactattaagaaggccaagcaggacgtaatagaggtcatcgagaaggcacacaacaatgagctggagcccaccccagggaacactctgcggcagacgtttgagaatcaggtgaaccgcattcttaacgatgcccgagacaagactggctcctctgctcagaaatccctgtctgaatacaacaacttcaagtctatggtcgtgtccggagctaaaggttccaagattaacatctcccaggtcattgctgtcgttggacagcagaacgtcgagggcaagcggattccatttggcttcaagcaccggactctgcctcacttcatcaaggatgactacgggcctgagagccgtggctttgtggagaactcctacctagccggcctcacacccactgagttctttttccacgccatggggggtcgtgaggggctcattgacacggctgtcaagactgctgagactggatacatccagcggcggctgatcaagtccatggagtcagtgatggtgaagtacgacgcgactgtgcggaactccatcaaccaggtggtgcagctgcgctacggcgaagacggcctggcaggcgagagcgttgagttccagaacctggctacgcttaagccttccaacaaggcttttgagaagaagttccgctttgattataccaatgagagggccctgcggcgcactctgcaggaggacctggtgaaggacgtgctgagcaacgcacacatccagaacgagttggagcgggaatttgagcggatgcgggaggatcgggaggtgctcagggtcatcttcccaactggagacagcaaggtcgtcctcccctgtaacctgctgcggatgatctggaatgctcagaaaatcttccacatcaacccacgccttccctccgacctgcaccccatcaaagtggtggagggagtcaaggaattgagcaagaagctggtgattgtgaatggggatgacccactaagtcgacaggcccaggaaaatgccacgctgctcttcaacatccacctgcggtccacgttgtgttcccgccgcatggcagaggagtttcggctcagtggggaggccttcgactggctgcttggggagattgagtccaagttcaaccaagccattgcgcatcccggggaaatggtgggggctctggctgcgcagtcccttggagaacctgccacccagatgaccttgaataccttccactatgctggtgtgtctgccaagaatgtgacgctgggtgtgccccgacttaaggagctcatcaacatttccaagaagccaaagactccttcgcttactgtcttcctgttgggccagtccgctcgagatgctgagagagccaaggatattctgtgccgtctggagcatacaacgttgaggaaggtgactgccaacacagccatctactatgaccccaacccccagagcacggtggtggcagaggatcaggaatgggtgaatgtctactatgaaatgcctgactttgatgtggcccgaatctccccctggctgttgcgggtggagctggatcggaagcacatgactgaccggaagctcaccatggagcagattgctgaaaagatcaatgctggttttggtgacgacttgaactgcatctttaatgatgacaatgcagagaagctggtgctccgtattcgcatcatgaacagcgatgagaacaagatgcaagaggaggaagaggtggtggacaagatggatgatgatgtcttcctgcgctgcatcgagtccaacatgctgacagatatgaccctgcagggcatcgagcagatcagcaaggtgtacatgcacttgccacagacagacaacaagaagaagatcatcatcacggaggatggggaattcaaggccctgcaggagtggatcctggagacggacggcgtgagcttgatgcgggtgctgagtgagaaggacgtggaccccgtacgcaccacgtccaatgacattgtggagatcttcacggtgctgggcattgaagccgtgcggaaggccctggagcgggagctgtaccacgtcatctcctttgatggctcctatgtcaattaccgacacttggctctcttgtgtgataccatgacctgtcgtggccacttgatggccatcacccgacacggagtcaaccgccaggacacaggaccactcatgaagtgttcctttgaggaaacggtggacgtgcttatggaagcagccgcacacggtgagagtgaccccatgaagggggtctctgagaatatcatgctgggccagctggctccggccggcactggctgctttgacctcctgcttgatgcagagaagtgcaagtatggcatggagatccccaccaatatccccggcctgggggctgctggacccaccggcatgttctttggttcagcacccagtcccatgggtggaatctctcctgccatgacaccttggaaccagggtgcaacccctgcctatggcgcctggtcccccagtgttgggagtggaatgaccccaggggcagccggcttctctcccagtgctgcgtcagatgccagcggcttcagcccaggttactcccctgcctggtctcccacaccgggctccccggggtccccaggtccctcaagcccctacatcccttcaccaggtggtgccatgtctcccagctactcgccaacgtcacctgcctacgagccccgctctcctgggggctacacaccccagagtccctcttattcccccacttcaccctcctactcccctacctctccatcctattctccaaccagtcccaactatagtcccacatcacccagctattcgccaacgtcacccagctactcaccgacctctcccagctactcacccacctctcccagctactcgcccacctctcccagctactcgcccacctctcccagctactcacccacttcccctagctactcgcccacttcccctagctactcgccaacgtctcccagctactcgccgacatctcccagctactcgccaacttcacccagctattctcccacttctcccagctactcacctacctctccaagctattcacccacctcccccagctactcacccacttccccaagttactcacccaccagcccgaactattctccaaccagtcccaattacaccccaacatcacccagctacagcccgacatcacccagctattcacctactagtcccaactacacacctaccagccctaactacagcccaacctctccaagctactctccaacatcacccagctattccccgacctcaccaagttactccccttccagcccacgatacacaccacagtctccaacctataccccaagctcacccagctacagccccagctcttttacaccaaccccgtgatcgtggggttgtaattacaaccccacgatcacacatagtattgtggtgtgttgaattcaatacg

SEQ ID NO: 357139 - DNA, 1168 bp, Homo sapiens
tatgttgattggcattgcagggatgcctctctgattatactacccgcgtttcaagggtgtctagaccatgcagggacgcctgccttgtccatcacccttagcggcaagtcccgcttttctggggaaggggcaagtacctcaaccccttctctttctctctcctccttctctgcttttctgggagaggggcaagtacccctcaaccccttctccttcacccttagcggcaagtcccgcttttctatggggcaagaacaccccaatcccttgtttctgcaccccaacctcttatctctgtgccccaatcacttatttctacaccccaaccagtccttcttacagtcccagctccccagagtataccccaacctctcccaagtactcacctaccagtcccaaatattcacccacctctcccaagtactcgcctaccagtcccacctattcacccaccaccccaaaatactccccaacatctcctacttattccccaacctctccagtctacaccccaacctctcccaagtactcacctactagccccacttactcgcccacttcccccaagtactcgcccaccagccccacctactcgcccacctcccccaaaggctcaacctactctcccacttcccctggttactcgcccaccagccccacctacagtctcacaagcccggctatcagcccggatgacagtgacgaggagaactgagggcacgtggggtgcggcagcgggctagggcccagggcagcttgcccgtgctgccgtgcagttcttgcctccctcacggggcgtcacccccagcccagctccgttgtacataaatgccttgtggcagagctcccggtgaacttctggatcccgtttctgatgcagattcttgtcttgttctccacttgtgctgttagaactcactggcccagtggtgttctcactcctaccccacccaccccctgcctgtccccaaattgaagatccttccttgcctgtggcttgatgcggggcgggtaaagggtattttaacttaggggtagttcctgctgtgagtggttacagctgatcctcgggaagaacaaagctaaagctgccttttgtctgttattttatttttttgaagtttaaataaagtttactaattttgaccaaaaaaaaatgtacatcgag

SEQ ID NO: 357140 - DNA, 5135 bp, Homo sapiens
gagagcgcggccgggacggttggagaagaaggcggctccccggaagggggagagacaaactgccgtaacctctgccgttcaggaacccggttacttatttattcgttaccctttttcttcttcctcccccaaaaaccttttccttttcccttctttttttttcctttttgggagctgaaaaatttccggtaagggaaagaagggctcctttcgctccttatttcgccgcctccttccctccgccaccttcccctcctccggctttttcctcccaactcggggaggtccttcccggtggccgccctgacgaggtctgagcacctaggcggaggcggcgcaggctttttgtagtgaggtttgcgcctgcgcaggcgcctgcctccgccatgcacgggggtggccccccctcgggggacagcgcatgcccgctgcgcaccatcaagagagtccagttcggagtcctgagtccggatgaactgaagcgaatgtctgtgacggagggtggcatcaaatacccagagacgactgagggaggccgccccaagcttggggggctgatggacccgaggcagggggtgattgagcggactggccgctgccaaacatgtgcaggaaacatgacagagtgtcctggccactttggccacattgaactggccaagcctgtgtttcacgtgggcttcctggtgaagacaatgaaagttttgcgctgtgtctgcttcttctgctccaaactgcttgtggactctaacaacccaaagatcaaggatatcctggctaagtccaagggacagcccaagaagcggctcacacatgtctacgacctttgcaagggcaaaaacatatgcgagggtggggaggagatggacaacaagttcggtgtggaacaacctgagggtgacgaggatctgaccaaagaaaagggccatggtggctgtgggcggtaccagcccaggatccggcgttctggcctagagctgtatgcggaatggaagcacgttaatgaggactctcaggagaagaagatcctgctgagtccagagcgagtgcatgagatcttcaaacgcatctcagatgaggagtgttttgtgctgggcatggagccccgctatgcacggccagagtggatgattgtcacagtgctgcctgtgcccccgctctccgtgcggcctgctgttgtgatgcagggctctgcccgtaaccaggatgacctgactcacaaactggctgacatcgtgaagatcaacaatcagctgcggcgcaatgagcagaacggcgcagcggcccatgtcattgcagaggatgtgaagctcctccagttccatgtggccaccatggtggacaatgagctgcctggcttgccccgtgccatgcagaagtctgggcgtcccctcaagtccctgaagcagcggttgaagggcaaggaaggccgggtgcgagggaacctgatgggcaaaagagtggacttctcggcccgtactgtcatcacccccgaccccaacctctccattgaccaggttggcgtgccccgctccattgctgccaacatgacctttgcggagattgtcacccccttcaacattgacagacttcaagaactagtgcgcagggggaacagccagtacccaggcgccaagtacatcatccgagacaatggtgatcgcattgacttgcgtttccaccccaagcccagtgaccttcacctgcagaccggctataaggtggaacggcacatgtgtgatggggacattgttatcttcaaccggcagccaactctgcacaaaatgtccatgatggggcatcgggtccgcattctcccatggtctacctttcgcttgaatcttagcgtgacaactccgtacaatgcagactttgacggggatgagatgaacttgcacctgccacagtctctggagacgcgagcagagatccaggagctggccatggttcctcgcatgattgtcaccccccagagcaatcggcctgtcatgggtattgtgcaggacacactcacagcagtgcgcaaattcaccaagagagacgtcttcctggagcggggtgaagtgatgaacctcctgatgttcctgtcgacgtgggatgggaaggtcccacagccggccatcctaaagccccggcccctgtggacaggcaagcaaatcttctccctcatcatacctggtcacatcaattgtatccgtacccacagcacccatcccgatgatgaagacagtggcccttacaagcacatctctcctggggacaccaaggtggtggtggagaatggggagctgatcatgggcatcctgtgtaagaagtctctgggcacgtcagctggctccctggtccacatctcctacctagagatgggtcatgacatcactcgcctcttctactccaacattcagactgtcattaacaactggctcctcatcgagggtcatactattggcattggggactccattgctgattctaagacttaccaggacattcagaacactattaagaaggccaagcaggacgtaatagaggtcatcgagaaggcacacaacaatgagctggagcccaccccagggaacactctgcggcagacgtttgagaatcaggtgaaccgcattcttaacgatgcccgagacaagactggctcctctgctcagaaatccctgtctgaatacaacaacttcaagtctatggtcgtgtccggagctaaaggttccaagattaacatctcccaggtcattgctgtcgttggacagcagaacgtcgagggcaagcggattccatttggcttcaagcaccggactctgcctcacttcatcaaggatgactacgggcctgagagccgtggctttgtggagaactcctacctagccggcctcacacccactgagttctttttccacgccatggggggtcgtgaggggctcattgacacggctgtcaagactgctgagactggatacatccagcggcggctgatcaagtccatggagtcagtgatggtgaagtacgacgcgactgtgcggaactccatcaaccaggtggtgcagctgcgctacggcgaagacggcctggcaggcgagagcgttgagttccagaacctggctacgcttaagccttccaacaaggcttttgagaagaagttccgctttgattataccaatgagagggccctgcggcgcactctgcaggaggacctggtgaaggacgtgctgagcaacgcacacatccagaacgagttggagcgggaatttgagcggatgcgggaggatcgggaggtgctcagggtcatcttcccaactggagacagcaaggtcgtcctcccctgtaacctgctgcggatgatctggaatgctcagaaaatcttccacatcaacccacgccttccctccgacctgcaccccatcaaagtggtggagggagtcaaggaattgagcaagaagctggtgattgtgaatggggatgacccactaagtcgacaggcccaggaaaatgccacgctgctcttcaacatccacctgcggtccacgttgtgttcccgccgcatggcagaggagtttcggctcagtggggaggccttcgactggctgcttggggagattgagtccaagttcaaccaagccattgcgcatcccggggaaatggtgggggctctggctgcgcagtcccttggagaacctgccacccagatgaccttgaataccttccactatgctggtgtgtctgccaagaatgtgacgctgggtgtgccccgacttaaggagctcatcaacatttccaagaagccaaagactccttcgcttactgtcttcctgttgggccagtccgctcgagatgctgagagagccaaggatattctgtgccgtctggagcatacaacgttgaggaaggtgactgccaacacagccatctactatgaccccaacccccagagcacggtggtggcagaggatcaggaatgggtgaatgtctactatgaaatgcctgactttgatgtggcccgaatctccccctggctgttgcgggtggagctggatcggaagcacatgactgaccggaagctcaccatggagcagattgctgaaaagatcaatgctggttttggtgacgacttgaactgcatctttaatgatgacaatgcagagaagctggtgctccgtattcgcatcatgaacagcgatgagaacaagatgcaagaggaggaagaggtggtggacaagatggatgatgatgtcttcctgcgctgcatcgagtccaacatgctgacagatatgaccctgcagggcatcgagcagatcagcaaggtgtacatgcacttgccacagacagacaacaagaagaagatcatcatcacggaggatggggaattcaaggccctgcaggagtggatcctggagacggacggcgtgagcttgatgcgggtgctgagtgagaaggacgtggaccccgtacgcaccacgtccaatgacattgtggagatcttcacggtgctgggcattgaagccgtgcggaaggccctggagcgggagctgtaccacgtcatctcctttgatggctcctatgtcaattaccgacacttggctctcttgtgtgataccatgacctgtcgtggccacttgatggccatcacccgacacggagtcaaccgccaggacacaggaccactcatgaagtgttcctttgaggaaacggtggacgtgcttatggaagcagccgcacacggtgagagtgaccccatgaagggggtctctgagaatatcatgctgggccagctggctccggccggcactggctgctttgacctcctgcttgatgcagagaagtgcaagtatggcatggagatccccaccaatatccccggcctgggggctgctggacccaccggcatgttctttggttcagcacccagtcccatgggtggaatctctcctgccatgacaccttggaaccagggtgcaacccctgcctatggcgcctggtcccccagtgttgggagtggaatgaccccaggggcagccggcttctctcccagtgctgcgtcagatgccagcggcttcagcccaggttactcccctgcctggtctcccacaccgggctccccggggtgcaggaggaggacgcccgggggaagaggg

SEQ ID NO: 357141 - DNA, 4381 bp, Homo sapiens
gagagcgcggccgggacggttggagaagaaggcggctccccggaagggggagagacaaactgccgtaacctctgccgttcaggaacccggttacttatttattcgttaccctttttcttcttcctcccccaaaaaccttttccttttcccttctttttttttcctttttgggagctgaaaaatttccggtaagggaaagaagggctcctttcgctccttatttcgccgcctccttccctccgccaccttcccctcctccggctttttcctcccaactcggggaggtccttcccggtggccgccctgacgaggtctgagcacctaggcggaggcggcgcaggctttttgtagtgaggtttgcgcctgcgcaggcgcctgcctccgccatgcacgggggtggccccccctcgggggacagcgcatgcccgctgcgcaccatcaagagagtccagttcggagtcctgagtccggatgaactgaagcgaatgtctgtgacggagggtggcatcaaatacccagagacgactgagggaggccgccccaagcttggggggctgatggacccgaggcagggggtgattgagcggactggccgctgccaaacatgtgcaggaaacatgacagagtgtcctggccactttggccacattgaactggccaagcctgtgtttcacgtgggcttcctggtgaagacaatgaaagttttgcgctgtgtctgcttcttctgctccaaactgcttgtggactctaacaacccaaagatcaaggatatcctggctaagtccaagggacagcccaagaagcggctcacacatgtctacgacctttgcaagggcaaaaacatatgcgagggtggggaggagatggacaacaagttcggtgtggaacaacctgagggtgacgaggatctgaccaaagaaaagggccatggtggctgtgggcggtaccagcccaggatccggcgttctggcctagagctgtatgcggaatggaagcacgttaatgaggactctcaggagaagaagatcctgctgagtccagagcgagtgcatgagatcttcaaacgcatctcagatgaggagtgttttgtgctgggcatggagccccgctatgcacggccagagtggatgattgtcacagtgctgcctgtgcccccgctctccgtgcggcctgctgttgtgatgcagggctctgcccgtaaccaggatgacctgactcacaaactggctgacatcgtgaagatcaacaatcagctgcggcgcaatgagcagaacggcgcagcggcccatgtcattgcagaggatgtgaagctcctccagttccatgtggccaccatggtggacaatgagctgcctggcttgccccgtgccatgcagaagtctgggcgtcccctcaagtccctgaagcagcggttgaagggcaaggaaggccgggtgcgagggaacctgatgggcaaaagagtggacttctcggcccgtactgtcatcacccccgaccccaacctctccattgaccaggttggcgtgccccgctccattgctgccaacatgacctttgcggagattgtcacccccttcaacattgacagacttcaagaactagtgcgcagggggaacagccagtacccaggcgccaagtacatcatccgagacaatggtgatcgcattgacttgcgtttccaccccaagcccagtgaccttcacctgcagaccggctataaggtggaacggcacatgtgtgatggggacattgttatcttcaaccggcagccaactctgcacaaaatgtccatgatggggcatcgggtccgcattctcccatggtctacctttcgcttgaatcttagcgtgacaactccgtacaatgcagactttgacggggatgagatgaacttgcacctgccacagtctctggagacgcgagcagagatccaggagctggccatggttcctcgcatgattgtcaccccccagagcaatcggcctgtcatgggtattgtgcaggacacactcacagcagtgcgcaaattcaccaagagagacgtcttcctggagcggggtgaagtgatgaacctcctgatgttcctgtcgacgtgggatgggaaggtcccacagccggccatcctaaagccccggcccctgtggacaggcaagcaaatcttctccctcatcatacctggtcacatcaattgtatccgtacccacagcacccatcccgatgatgaagacagtggcccttacaagcacatctctcctggggacaccaaggtggtggtggagaatggggagctgatcatgggcatcctgtgtaagaagtctctgggcacgtcagctggctccctggtccacatctcctacctagagatgggtcatgacatcactcgcctcttctactccaacattcagactgtcattaacaactggctcctcatcgagggtcatactattggcattggggactccattgctgattctaagacttaccaggacattcagaacactattaagaaggccaagcaggacgtaatagaggtcatcgagaaggcacacaacaatgagctggagcccaccccagggaacactctgcggcagacgtttgagaatcaggtgaaccgcattcttaacgatgcccgagacaagactggctcctctgctcagaaatccctgtctgaatacaacaacttcaagtctatggtcgtgtccggagctaaaggttccaagattaacatctcccaggtcattgctgtcgttggacagcagaacgtcgagggcaagcggattccatttggcttcaagcaccggactctgcctcacttcatcaaggatgactacgggcctgagagccgtggctttgtggagaactcctacctagccggcctcacacccactgagttctttttccacgccatggggggtcgtgaggggctcattgacacggctgtcaagactgctgagactggatacatccagcggcggctgatcaagtccatggagtcagtgatggtgaagtacgacgcgactgtgcggaactccatcaaccaggtggtgcagctgcgctacggcgaagacggcctggcaggcgagagcgttgagttccagaacctggctacgcttaagccttccaacaaggcttttgagaagaagttccgctttgattataccaatgagagggccctgcggcgcactctgcaggaggacctggtgaaggacgtgctgagcaacgcacacatccagaacgagttggagcgggaatttgagcggatgcgggaggatcgggaggtgctcagggtcatcttcccaactggagacagcaaggtcgtcctcccctgtaacctgctgcggatgatctggaatgctcagaaaatcttccacatcaacccacgccttccctccgacctgcaccccatcaaagtggtggagggagtcaaggaattgagcaagaagctggtgattgtgaatggggatgacccactaagtcgacaggcccaggaaaatgccacgctgctcttcaacatccacctgcggtccacgttgtgttcccgccgcatggcagaggagtttcggctcagtggggaggccttcgactggctgcttggggagattgagtccaagttcaaccaagccattgcgcatcccggggaaatggtgggggctctggctgcgcagtcccttggagaacctgccacccagatgaccttgaataccttccactatgctggtgtgtctgccaagaatgtgacgctgggtgtgccccgacttaaggagctcatcaacatttccaagaagccaaagactccttcgcttactgtcttcctgttgggccagtccgctcgagatgctgagagagccaaggatattctgtgccgtctggagcatacaacgttgaggaaggtgactgccaacacagccatctactatgaccccaacccccagagcacggtggtggcagaggatcaggaatgggtgaatgtctactatgaaatgcctgactttgatgtggcccgaatctccccctggctgttgcgggtggagctggatcggaagcacatgactgaccggaagctcaccatggagcagattgctgaaaagatcaatgctggttttggtgacgacttgaactgcatctttaatgatgacaatgcagagaagctggtgctccgtattcgcatcatgaacagcgatgagaacaagatgcaagaggaggaagaggtggtggacaagatggatgatgatgtcttcctgcgctgcatcgagtccaacatgctgacagatatgaccctgcagggcatcgagcagatcagcaaggtgtacatgcacttgccacagacagacaaccagcattgatcttttcagcaatctgctccatggggaggttattggca

SEQ ID NO: 357142 - DNA, 4150 bp, Homo sapiens
gagagcgcggccgggacggttggagaagaaggcggctccccggaagggggagagacaaactgccgtaacctctgccgttcaggaacccggttacttatttattcgttaccctttttcttcttcctcccccaaaaaccttttccttttcccttctttttttttcctttttgggagctgaaaaatttccggtaagggaaagaagggctcctttcgctccttatttcgccgcctccttccctccgccaccttcccctcctccggctttttcctcccaactcggggaggtccttcccggtggccgccctgacgaggtctgagcacctaggcggaggcggcgcaggctttttgtagtgaggtttgcgcctgcgcaggcgcctgcctccgccatgcacgggggtggccccccctcgggggacagcgcatgcccgctgcgcaccatcaagagagtccagttcggagtcctgagtccggatgaactgaagcgaatgtctgtgacggagggtggcatcaaatacccagagacgactgagggaggccgccccaagcttggggggctgatggacccgaggcagggggtgattgagcggactggccgctgccaaacatgtgcaggaaacatgacagagtgtcctggccactttggccacattgaactggccaagcctgtgtttcacgtgggcttcctggtgaagacaatgaaagttttgcgctgtgtctgcttcttctgctccaaactgcttgtggactctaacaacccaaagatcaaggatatcctggctaagtccaagggacagcccaagaagcggctcacacatgtctacgacctttgcaagggcaaaaacatatgcgagggtggggaggagatggacaacaagttcggtgtggaacaacctgagggtgacgaggatctgaccaaagaaaagggccatggtggctgtgggcggtaccagcccaggatccggcgttctggcctagagctgtatgcggaatggaagcacgttaatgaggactctcaggagaagaagatcctgctgagtccagagcgagtgcatgagatcttcaaacgcatctcagatgaggagtgttttgtgctgggcatggagccccgctatgcacggccagagtggatgattgtcacagtgctgcctgtgcccccgctctccgtgcggcctgctgttgtgatgcagggctctgcccgtaaccaggatgacctgactcacaaactggctgacatcgtgaagatcaacaatcagctgcggcgcaatgagcagaacggcgcagcggcccatgtcattgcagaggatgtgaagctcctccagttccatgtggccaccatggtggacaatgagctgcctggcttgccccgtgccatgcagaagtctgggcgtcccctcaagtccctgaagcagcggttgaagggcaaggaaggccgggtgcgagggaacctgatgggcaaaagagtggacttctcggcccgtactgtcatcacccccgaccccaacctctccattgaccaggttggcgtgccccgctccattgctgccaacatgacctttgcggagattgtcacccccttcaacattgacagacttcaagaactagtgcgcagggggaacagccagtacccaggcgccaagtacatcatccgagacaatggtgatcgcattgacttgcgtttccaccccaagcccagtgaccttcacctgcagaccggctataaggtggaacggcacatgtgtgatggggacattgttatcttcaaccggcagccaactctgcacaaaatgtccatgatggggcatcgggtccgcattctcccatggtctacctttcgcttgaatcttagcgtgacaactccgtacaatgcagactttgacggggatgagatgaacttgcacctgccacagtctctggagacgcgagcagagatccaggagctggccatggttcctcgcatgattgtcaccccccagagcaatcggcctgtcatgggtattgtgcaggacacactcacagcagtgcgcaaattcaccaagagagacgtcttcctggagcggggtgaagtgatgaacctcctgatgttcctgtcgacgtgggatgggaaggtcccacagccggccatcctaaagccccggcccctgtggacaggcaagcaaatcttctccctcatcatacctggtcacatcaattgtatccgtacccacagcacccatcccgatgatgaagacagtggcccttacaagcacatctctcctggggacaccaaggtggtggtggagaatggggagctgatcatgggcatcctgtgtaagaagtctctgggcacgtcagctggctccctggtccacatctcctacctagagatgggtcatgacatcactcgcctcttctactccaacattcagactgtcattaacaactggctcctcatcgagggtcatactattggcattggggactccattgctgattctaagacttaccaggacattcagaacactattaagaaggccaagcaggacgtaatagaggtcatcgagaaggcacacaacaatgagctggagcccaccccagggaacactctgcggcagacgtttgagaatcaggtgaaccgcattcttaacgatgcccgagacaagactggctcctctgctcagaaatccctgtctgaatacaacaacttcaagtctatggtcgtgtccggagctaaaggttccaagattaacatctcccaggtcattgctgtcgttggacagcagaacgtcgagggcaagcggattccatttggcttcaagcaccggactctgcctcacttcatcaaggatgactacgggcctgagagccgtggctttgtggagaactcctacctagccggcctcacacccactgagttctttttccacgccatggggggtcgtgaggggctcattgacacggctgtcaagactgctgagactggatacatccagcggcggctgatcaagtccatggagtcagtgatggtgaagtacgacgcgactgtgcggaactccatcaaccaggtggtgcagctgcgctacggcgaagacggcctggcaggcgagagcgttgagttccagaacctggctacgcttaagccttccaacaaggcttttgagaagaagttccgctttgattataccaatgagagggccctgcggcgcactctgcaggaggacctggtgaaggacgtgctgagcaacgcacacatccagaacgagttggagcgggaatttgagcggatgcgggaggatcgggaggtgctcagggtcatcttcccaactggagacagcaaggtcgtcctcccctgtaacctgctgcggatgatctggaatgctcagaaaatcttccacatcaacccacgccttccctccgacctgcaccccatcaaagtggtggagggagtcaaggaattgagcaagaagctggtgattgtgaatggggatgacccactaagtcgacaggcccaggaaaatgccacgctgctcttcaacatccacctgcggtccacgttgtgttcccgccgcatggcagaggagtttcggctcagtggggaggccttcgactggctgcttggggagattgagtccaagttcaaccaagccattgcgcatcccggggaaatggtgggggctctggctgcgcagtcccttggagaacctgccacccagatgaccttgaataccttccactatgctggtgtgtctgccaagaatgtgacgctgggtgtgccccgacttaaggagctcatcaacatttccaagaagccaaagactccttcgcttactgtcttcctgttgggccagtccgctcgagatgctgagagagccaaggatattctgtgccgtctggagcatacaacgttgaggaaggtgactgccaacacagccatctactatgaccccaacccccagagcacggtggtggcagaggatcaggaatgggtgaatgtctactatgaaatgcctgactttgatgtggcccgaatctccccctggctgttgcgggtggagctggatcggaagcacatgactgaccggaagctcaccatggagcagattgctgaaaagatcaatgctggttttgtgacgacttgaactgcatcttaatatgcgtagctctgcgtccagcc

SEQ ID NO: 357143 - DNA, 2730 bp, Homo sapiens
  misc_feature (2689)..(2689): n is a, c, g, or t
gagagcgcggccgggacggttggagaagaaggcggctccccggaagggggagagacaaactgccgtaacctctgccgttcaggaacccggttacttatttattcgttaccctttttcttcttcctcccccaaaaaccttttccttttcccttctttttttttcctttttgggagctgaaaaatttccggtaagggaaagaagggctcctttcgctccttatttcgccgcctccttccctccgccaccttcccctcctccggctttttcctcccaactcggggaggtccttcccggtggccgccctgacgaggtctgagcacctaggcggaggcggcgcaggctttttgtagtgaggtttgcgcctgcgcaggcgcctgcctccgccatgcacgggggtggccccccctcgggggacagcgcatgcccgctgcgcaccatcaagagagtccagttcggagtcctgagtccggatgaactgaagcgaatgtctgtgacggagggtggcatcaaatacccagagacgactgagggaggccgccccaagcttggggggctgatggacccgaggcagggggtgattgagcggactggccgctgccaaacatgtgcaggaaacatgacagagtgtcctggccactttggccacattgaactggccaagcctgtgtttcacgtgggcttcctggtgaagacaatgaaagttttgcgctgtgtctgcttcttctgctccaaactgcttgtggactctaacaacccaaagatcaaggatatcctggctaagtccaagggacagcccaagaagcggctcacacatgtctacgacctttgcaagggcaaaaacatatgcgagggtggggaggagatggacaacaagttcggtgtggaacaacctgagggtgacgaggatctgaccaaagaaaagggccatggtggctgtgggcggtaccagcccaggatccggcgttctggcctagagctgtatgcggaatggaagcacgttaatgaggactctcaggagaagaagatcctgctgagtccagagcgagtgcatgagatcttcaaacgcatctcagatgaggagtgttttgtgctgggcatggagccccgctatgcacggccagagtggatgattgtcacagtgctgcctgtgcccccgctctccgtgcggcctgctgttgtgatgcagggctctgcccgtaaccaggatgacctgactcacaaactggctgacatcgtgaagatcaacaatcagctgcggcgcaatgagcagaacggcgcagcggcccatgtcattgcagaggatgtgaagctcctccagttccatgtggccaccatggtggacaatgagctgcctggcttgccccgtgccatgcagaagtctgggcgtcccctcaagtccctgaagcagcggttgaagggcaaggaaggccgggtgcgagggaacctgatgggcaaaagagtggacttctcggcccgtactgtcatcacccccgaccccaacctctccattgaccaggttggcgtgccccgctccattgctgccaacatgacctttgcggagattgtcacccccttcaacattgacagacttcaagaactagtgcgcagggggaacagccagtacccaggcgccaagtacatcatccgagacaatggtgatcgcattgacttgcgtttccaccccaagcccagtgaccttcacctgcagaccggctataaggtggaacggcacatgtgtgatggggacattgttatcttcaaccggcagccaactctgcacaaaatgtccatgatggggcatcgggtccgcattctcccatggtctacctttcgcttgaatcttagcgtgacaactccgtacaatgcagactttgacggggatgagatgaacttgcacctgccacagtctctggagacgcgagcagagatccaggagctggccatggttcctcgcatgattgtcaccccccagagcaatcggcctgtcatgggtattgtgcaggacacactcacagcagtgcgcaaattcaccaagagagacgtcttcctggagcggggtgaagtgatgaacctcctgatgttcctgtcgacgtgggatgggaaggtcccacagccggccatcctaaagccccggcccctgtggacaggcaagcaaatcttctccctcatcatacctggtcacatcaattgtatccgtacccacagcacccatcccgatgatgaagacagtggcccttacaagcacatctctcctggggacaccaaggtggtggtggagaatggggagctgatcatgggcatcctgtgtaagaagtctctgggcacgtcagctggctccctggtccacatctcctacctagagatgggtcatgacatcactcgcctcttctactccaacattcagactgtcattaacaactggctcctcatcgagggtcatactattggcattggggactccattgctgattctaagacttaccaggacattcagaacactattaagaaggccaagcaggacgtaatagaggtcatcgagaaggcacacaacaatgagctggagcccaccccagggaacaggaactgtgagaggtccctgcttgtgggggtcctgtggtgggaggtggtttaagggaactggtctggggttgggatggagatgcctagaagaaggagtcggttataacnctccaaaggcagagagagagaagtgggagaccccagggtgg

SEQ ID NO: 357144 - DNA, 2470 bp, Homo sapiens
gagagcgcggccgggacggttggagaagaaggcggctccccggaagggggagagacaaactgccgtaacctctgccgttcaggaacccggttacttatttattcgttaccctttttcttcttcctcccccaaaaaccttttccttttcccttctttttttttcctttttgggagctgaaaaatttccggtaagggaaagaagggctcctttcgctccttatttcgccgcctccttccctccgccaccttcccctcctccggctttttcctcccaactcggggaggtccttcccggtggccgccctgacgaggtctgagcacctaggcggaggcggcgcaggctttttgtagtgaggtttgcgcctgcgcaggcgcctgcctccgccatgcacgggggtggccccccctcgggggacagcgcatgcccgctgcgcaccatcaagagagtccagttcggagtcctgagtccggatgaactgaagcgaatgtctgtgacggagggtggcatcaaatacccagagacgactgagggaggccgccccaagcttggggggctgatggacccgaggcagggggtgattgagcggactggccgctgccaaacatgtgcaggaaacatgacagagtgtcctggccactttggccacattgaactggccaagcctgtgtttcacgtgggcttcctggtgaagacaatgaaagttttgcgctgtgtctgcttcttctgctccaaactgcttgtggactctaacaacccaaagatcaaggatatcctggctaagtccaagggacagcccaagaagcggctcacacatgtctacgacctttgcaagggcaaaaacatatgcgagggtggggaggagatggacaacaagttcggtgtggaacaacctgagggtgacgaggatctgaccaaagaaaagggccatggtggctgtgggcggtaccagcccaggatccggcgttctggcctagagctgtatgcggaatggaagcacgttaatgaggactctcaggagaagaagatcctgctgagtccagagcgagtgcatgagatcttcaaacgcatctcagatgaggagtgttttgtgctgggcatggagccccgctatgcacggccagagtggatgattgtcacagtgctgcctgtgcccccgctctccgtgcggcctgctgttgtgatgcagggctctgcccgtaaccaggatgacctgactcacaaactggctgacatcgtgaagatcaacaatcagctgcggcgcaatgagcagaacggcgcagcggcccatgtcattgcagaggatgtgaagctcctccagttccatgtggccaccatggtggacaatgagctgcctggcttgccccgtgccatgcagaagtctgggcgtcccctcaagtccctgaagcagcggttgaagggcaaggaaggccgggtgcgagggaacctgatgggcaaaagagtggacttctcggcccgtactgtcatcacccccgaccccaacctctccattgaccaggttggcgtgccccgctccattgctgccaacatgacctttgcggagattgtcacccccttcaacattgacagacttcaagaactagtgcgcagggggaacagccagtacccaggcgccaagtacatcatccgagacaatggtgatcgcattgacttgcgtttccaccccaagcccagtgaccttcacctgcagaccggctataaggtggaacggcacatgtgtgatggggacattgttatcttcaaccggcagccaactctgcacaaaatgtccatgatggggcatcgggtccgcattctcccatggtctacctttcgcttgaatcttagcgtgacaactccgtacaatgcagactttgacggggatgagatgaacttgcacctgccacagtctctggagacgcgagcagagatccaggagctggccatggttcctcgcatgattgtcaccccccagagcaatcggcctgtcatgggtattgtgcaggacacactcacagcagtgcgcaaattcaccaagagagacgtcttcctggagcggggtgaagtgatgaacctcctgatgttcctgtcgacgtgggatgggaaggtcccacagccggccatcctaaagccccggcccctgtggacaggcaagcaaatcttctccctcatcatacctggtcacatcaattgtatccgtacccacagcacccatcccgatgatgaagacagtggcccttacaagcacatctctcctggggacaccaaggtggtggtggagaatggggagctgatcatgggcatcctgtgtaagaagtctctgggcacgtcagctggctccctggtccacatctcctacctagagatgggtcatgacatcactcgcctcttctactccaacattcagactgtcattaacaactggctcctcatcgagggacacgaatgttcagggacaagctcgagttcgta

SEQ ID NO: 357145 - DNA, 2354 bp, Homo sapiens
gagagcgcggccgggacggttggagaagaaggcggctccccggaagggggagagacaaactgccgtaacctctgccgttcaggaacccggttacttatttattcgttaccctttttcttcttcctcccccaaaaaccttttccttttcccttctttttttttcctttttgggagctgaaaaatttccggtaagggaaagaagggctcctttcgctccttatttcgccgcctccttccctccgccaccttcccctcctccggctttttcctcccaactcggggaggtccttcccggtggccgccctgacgaggtctgagcacctaggcggaggcggcgcaggctttttgtagtgaggtttgcgcctgcgcaggcgcctgcctccgccatgcacgggggtggccccccctcgggggacagcgcatgcccgctgcgcaccatcaagagagtccagttcggagtcctgagtccggatgaactgaagcgaatgtctgtgacggagggtggcatcaaatacccagagacgactgagggaggccgccccaagcttggggggctgatggacccgaggcagggggtgattgagcggactggccgctgccaaacatgtgcaggaaacatgacagagtgtcctggccactttggccacattgaactggccaagcctgtgtttcacgtgggcttcctggtgaagacaatgaaagttttgcgctgtgtctgcttcttctgctccaaactgcttgtggactctaacaacccaaagatcaaggatatcctggctaagtccaagggacagcccaagaagcggctcacacatgtctacgacctttgcaagggcaaaaacatatgcgagggtggggaggagatggacaacaagttcggtgtggaacaacctgagggtgacgaggatctgaccaaagaaaagggccatggtggctgtgggcggtaccagcccaggatccggcgttctggcctagagctgtatgcggaatggaagcacgttaatgaggactctcaggagaagaagatcctgctgagtccagagcgagtgcatgagatcttcaaacgcatctcagatgaggagtgttttgtgctgggcatggagccccgctatgcacggccagagtggatgattgtcacagtgctgcctgtgcccccgctctccgtgcggcctgctgttgtgatgcagggctctgcccgtaaccaggatgacctgactcacaaactggctgacatcgtgaagatcaacaatcagctgcggcgcaatgagcagaacggcgcagcggcccatgtcattgcagaggatgtgaagctcctccagttccatgtggccaccatggtggacaatgagctgcctggcttgccccgtgccatgcagaagtctgggcgtcccctcaagtccctgaagcagcggttgaagggcaaggaaggccgggtgcgagggaacctgatgggcaaaagagtggacttctcggcccgtactgtcatcacccccgaccccaacctctccattgaccaggttggcgtgccccgctccattgctgccaacatgacctttgcggagattgtcacccccttcaacattgacagacttcaagaactagtgcgcagggggaacagccagtacccaggcgccaagtacatcatccgagacaatggtgatcgcattgacttgcgtttccaccccaagcccagtgaccttcacctgcagaccggctataaggtggaacggcacatgtgtgatggggacattgttatcttcaaccggcagccaactctgcacaaaatgtccatgatggggcatcgggtccgcattctcccatggtctacctttcgcttgaatcttagcgtgacaactccgtacaatgcagactttgacggggatgagatgaacttgcacctgccacagtctctggagacgcgagcagagatccaggagctggccatggttcctcgcatgattgtcaccccccagagcaatcggcctgtcatgggtattgtgcaggacacactcacagcagtgcgcaaattcaccaagagagacgtcttcctggagcggggtgaagtgatgaacctcctgatgttcctgtcgacgtgggatgggaaggtcccacagccggccatcctaaagccccggcccctgtggacaggcaagcaaatcttctccctcatcatacctggtcacatcaattgtatccgtacccacagcacccatcccgatgatgaagacagtggcccttacaagcacatctctcctggggacaccaagctggtgctggagaatggcgacctgattatggccatccgcctgtatgcagtctgtgagcacgtcaatgggctcctctcaggcaacatc

SEQ ID NO: 357146 - DNA, 2332 bp, Homo sapiens
gagagcgcggccgggacggttggagaagaaggcggctccccggaagggggagagacaaactgccgtaacctctgccgttcaggaacccggttacttatttattcgttaccctttttcttcttcctcccccaaaaaccttttccttttcccttctttttttttcctttttgggagctgaaaaatttccggtaagggaaagaagggctcctttcgctccttatttcgccgcctccttccctccgccaccttcccctcctccggctttttcctcccaactcggggaggtccttcccggtggccgccctgacgaggtctgagcacctaggcggaggcggcgcaggctttttgtagtgaggtttgcgcctgcgcaggcgcctgcctccgccatgcacgggggtggccccccctcgggggacagcgcatgcccgctgcgcaccatcaagagagtccagttcggagtcctgagtccggatgaactgaagcgaatgtctgtgacggagggtggcatcaaatacccagagacgactgagggaggccgccccaagcttggggggctgatggacccgaggcagggggtgattgagcggactggccgctgccaaacatgtgcaggaaacatgacagagtgtcctggccactttggccacattgaactggccaagcctgtgtttcacgtgggcttcctggtgaagacaatgaaagttttgcgctgtgtctgcttcttctgctccaaactgcttgtggactctaacaacccaaagatcaaggatatcctggctaagtccaagggacagcccaagaagcggctcacacatgtctacgacctttgcaagggcaaaaacatatgcgagggtggggaggagatggacaacaagttcggtgtggaacaacctgagggtgacgaggatctgaccaaagaaaagggccatggtggctgtgggcggtaccagcccaggatccggcgttctggcctagagctgtatgcggaatggaagcacgttaatgaggactctcaggagaagaagatcctgctgagtccagagcgagtgcatgagatcttcaaacgcatctcagatgaggagtgttttgtgctgggcatggagccccgctatgcacggccagagtggatgattgtcacagtgctgcctgtgcccccgctctccgtgcggcctgctgttgtgatgcagggctctgcccgtaaccaggatgacctgactcacaaactggctgacatcgtgaagatcaacaatcagctgcggcgcaatgagcagaacggcgcagcggcccatgtcattgcagaggatgtgaagctcctccagttccatgtggccaccatggtggacaatgagctgcctggcttgccccgtgccatgcagaagtctgggcgtcccctcaagtccctgaagcagcggttgaagggcaaggaaggccgggtgcgagggaacctgatgggcaaaagagtggacttctcggcccgtactgtcatcacccccgaccccaacctctccattgaccaggttggcgtgccccgctccattgctgccaacatgacctttgcggagattgtcacccccttcaacattgacagacttcaagaactagtgcgcagggggaacagccagtacccaggcgccaagtacatcatccgagacaatggtgatcgcattgacttgcgtttccaccccaagcccagtgaccttcacctgcagaccggctataaggtggaacggcacatgtgtgatggggacattgttatcttcaaccggcagccaactctgcacaaaatgtccatgatggggcatcgggtccgcattctcccatggtctacctttcgcttgaatcttagcgtgacaactccgtacaatgcagactttgacggggatgagatgaacttgcacctgccacagtctctggagacgcgagcagagatccaggagctggccatggttcctcgcatgattgtcaccccccagagcaatcggcctgtcatgggtattgtgcaggacacactcacagcagtgcgcaaattcaccaagagagacgtcttcctggagcggatgcttaacgagaaaccacaaaggaactccatccaaatagaggctagagtttcctaaggagaaagaaacatccctggggactgagctagttcatcagtacagagacaaaattacagaaattgaggggaaaagtacaattctgggagaaagcaatggagactactgaattcacactcactgcccctctggaaactgtgttccaagatctccctcactcaaaaattggatggctttttattttgtttttaccaagtaaaatggttcccttgcaataa

SEQ ID NO: 357147 - DNA, 590 bp, Homo sapiens
ccaggtagacctaacagcacaagtggagaacaagacaagagtctgcatcagaaacgggatccagaagttcacccacctctcccagtgctgcgtcagatgccagcggcttcagcccaggttactcccctgcctggtctcccacaccgggctccccggggtccccaggtccctcaagcccctacatcccttcaccaggtggtgccatgtctcccagctactcgccaacgtcacctgcctacgagccccgctctcctgggggctacacaccccagagtccctcttattcccccacttcaccctcctactcccctacctgggttaggtctacctggccaggtagacctaactacttcaggtgatttgtaatctctaggccataggaaatgggataatgtaggcttttgatgcaatggattggactttgtaaaggtgaagcttcaagctatctacttagggtgcctggggactttgaagagttatagaactatggtgcagctgcagtggcctttctgtaaatgtactactttctgttcacacatctcaccctgggtaggtctaccctacctgggttagtctaccaggggtcgcgc

SEQ ID NO: 357148 - DNA, 425 bp, Homo sapiens
tcatggctcctcaccccaccaggttttggtgacgacttgaactgcatctttaatgatgacaatgcagagaagctggtgctccgtattcgcatcatgaacagcgatgagaacaagatgcaagaggtaatgggggtcctagaagtcagcgtgtcacatgtataaaacgcatgaatcacgttagagaccaaagaaaagaagatgcaatcaacgttgaggggcggccaggcgtggtggctcacgcctgtaatcccagcactttgggaggctgaggcgggtggatcacctgagctcgggagttcgagaccagcctgaccaacatggagtaaccccgtctctactaaaaataaaaattagccgggcatggtggtatgtgcctgtaatcccagctacttgggaggctgaggcaacaagagtgaaactatctc

SEQ ID NO: 357149 - DNA, 345 bp, Homo sapiens
tacggcgaagacggcctggcaggcgagagcgttgagttccagaacctggctacgcttaagccttccaacaaggcttttgagaagaagtgaggaggcgggcaggcgggtggttcttgcccctggggctcagggcctgagtagtaggattcccatacctattccagagagatagcctggtatgtgtcttgcactagagcttacctttcagcatccttccccacctatctgaaacagctgtgtgacatgggggaggtggtggatggaggtggatttaagattggtccccacatcgtccctgctgatattataaagcagatgcagaggggtgggcctgtactcaggtcc

SEQ ID NO: 357150 - DNA, 561 bp, Homo sapiens
catgggtgcaagggtgtcaccagtccatgattgctgttcttgctcctcacgatttcctgtgttcctctttgcagccaccggcatgttctttggttcagcacccagtcccatgggtggaatctctcctgccatgacaccttggaaccagggtgcaacccctgcctatggcgcctggtcccccagtgttggtgagtaacctgatccaggaagagggccctccaggtggttcagaggtggataagctgggatcgtgaacggtagccattgttggaactctgaaggccgcagagggctagtgaaaggtggggcagggagaattgggggcctttggtctcccgctctggccttaacttgcttctctcactctatagggagtggaatgaccccaggggcagccggcttctctcccagtgctgcgtcagatgccagcggcttcagcccaggttactcccctgcctggtctcccacaccgggctccccggggtccccaggtccctcaagcccctacatcccttcaccaggtgagttgtcgccatctgtcaggccaggtttgtttcctcc

SEQ ID NO: 357151 - DNA, 396 bp, Homo sapiens
gtggctggggctggcggagacttttgggaaggaggggtcagaggcctggagggaggaaactggaagggaaggaaacaggaggggctggcctggtgtggagggaaatggtccaccctctgggctctgatggcccctgtctctccttggaagggccatggtggctgtgggcggtaccagcccaggatccggcgttctggcctagagctgtatgcggaatggaagcacgttaatgaggactctcaggagaagaagatcctgctgagtccagagcgagtgcatgagatcttcaaacgcatctcagatgaggagtgttttgtgctgggcatggagccccgctatgcacggccagagtggatgattgtcacagtgctgcctgtgcccccgctctccgtgcgg

SEQ ID NO: 357152 - DNA, 213 bp, Homo sapiens
tgtcgacgtgggatgggaaggtcccacagccggccatcctaaagccccggcccctgtggacaggcaagcaaatcttctccctcatcatacctggtcacatcaattgtatccgtacccacagcacccatcccgatgatgaagacagtggcccttacaagcacatctctcctggggacaccaaggtagggcttggcttctggatatgtgaggaca

SEQ ID NO: 357153 - DNA, 6752 bp, Homo sapiens
gagagcgcggccgggacggttggagaagaaggcggctccccggaagggggagagacaaactgccgtaacctctgccgttcaggaacccggttacttatttattcgttaccctttttcttcttcctcccccaaaaaccttttccttttcccttctttttttttcctttttgggagctgaaaaatttccggtaagggaaagaagggctcctttcgctccttatttcgccgcctccttccctccgccaccttcccctcctccggctttttcctcccaactcggggaggtccttcccggtggccgccctgacgaggtctgagcacctaggcggaggcggcgcaggctttttgtagtgaggtttgcgcctgcgcaggcgcctgcctccgccatgcacgggggtggccccccctcgggggacagcgcatgcccgctgcgcaccatcaagagagtccagttcggagtcctgagtccggatgaactgaagcgaatgtctgtgacggagggtggcatcaaatacccagagacgactgagggaggccgccccaagcttggggggctgatggacccgaggcagggggtgattgagcggactggccgctgccaaacatgtgcaggaaacatgacagagtgtcctggccactttggccacattgaactggccaagcctgtgtttcacgtgggcttcctggtgaagacaatgaaagttttgcgctgtgtctgcttcttctgctccaaactgcttgtggactctaacaacccaaagatcaaggatatcctggctaagtccaagggacagcccaagaagcggctcacacatgtctacgacctttgcaagggcaaaaacatatgcgagggtggggaggagatggacaacaagttcggtgtggaacaacctgagggtgacgaggatctgaccaaagaaaagggccatggtggctgtgggcggtaccagcccaggatccggcgttctggcctagagctgtatgcggaatggaagcacgttaatgaggactctcaggagaagaagatcctgctgagtccagagcgagtgcatgagatcttcaaacgcatctcagatgaggagtgttttgtgctgggcatggagccccgctatgcacggccagagtggatgattgtcacagtgctgcctgtgcccccgctctccgtgcggcctgctgttgtgatgcagggctctgcccgtaaccaggatgacctgactcacaaactggctgacatcgtgaagatcaacaatcagctgcggcgcaatgagcagaacggcgcagcggcccatgtcattgcagaggatgtgaagctcctccagttccatgtggccaccatggtggacaatgagctgcctggcttgccccgtgccatgcagaagtctgggcgtcccctcaagtccctgaagcagcggttgaagggcaaggaaggccgggtgcgagggaacctgatgggcaaaagagtggacttctcggcccgtactgtcatcacccccgaccccaacctctccattgaccaggttggcgtgccccgctccattgctgccaacatgacctttgcggagattgtcacccccttcaacattgacagacttcaagaactagtgcgcagggggaacagccagtacccaggcgccaagtacatcatccgagacaatggtgatcgcattgacttgcgtttccaccccaagcccagtgaccttcacctgcagaccggctataaggtggaacggcacatgtgtgatggggacattgttatcttcaaccggcagccaactctgcacaaaatgtccatgatggggcatcgggtccgcattctcccatggtctacctttcgcttgaatcttagcgtgacaactccgtacaatgcagactttgacggggatgagatgaacttgcacctgccacagtctctggagacgcgagcagagatccaggagctggccatggttcctcgcatgattgtcaccccccagagcaatcggcctgtcatgggtattgtgcaggacacactcacagcagtgcgcaaattcaccaagagagacgtcttcctggagcggggtgaagtgatgaacctcctgatgttcctgtcgacgtgggatgggaaggtcccacagccggccatcctaaagccccggcccctgtggacaggcaagcaaatcttctccctcatcatacctggtcacatcaattgtatccgtacccacagcacccatcccgatgatgaagacagtggcccttacaagcacatctctcctggggacaccaaggtggtggtggagaatggggagctgatcatgggcatcctgtgtaagaagtctctgggcacgtcagctggctccctggtccacatctcctacctagagatgggtcatgacatcactcgcctcttctactccaacattcagactgtcattaacaactggctcctcatcgagggtcatactattggcattggggactccattgctgattctaagacttaccaggacattcagaacactattaagaaggccaagcaggacgtaatagaggtcatcgagaaggcacacaacaatgagctggagcccaccccagggaacactctgcggcagacgtttgagaatcaggtgaaccgcattcttaacgatgcccgagacaagactggctcctctgctcagaaatccctgtctgaatacaacaacttcaagtctatggtcgtgtccggagctaaaggttccaagattaacatctcccaggtcattgctgtcgttggacagcagaacgtcgagggcaagcggattccatttggcttcaagcaccggactctgcctcacttcatcaaggatgactacgggcctgagagccgtggctttgtggagaactcctacctagccggcctcacacccactgagttctttttccacgccatggggggtcgtgaggggctcattgacacggctgtcaagactgctgagactggatacatccagcggcggctgatcaagtccatggagtcagtgatggtgaagtacgacgcgactgtgcggaactccatcaaccaggtggtgcagctgcgctacggcgaagacggcctggcaggcgagagcgttgagttccagaacctggctacgcttaagccttccaacaaggcttttgagaagaagttccgctttgattataccaatgagagggccctgcggcgcactctgcaggaggacctggtgaaggacgtgctgagcaacgcacacatccagaacgagttggagcgggaatttgagcggatgcgggaggatcgggaggtgctcagggtcatcttcccaactggagacagcaaggtcgtcctcccctgtaacctgctgcggatgatctggaatgctcagaaaatcttccacatcaacccacgccttccctccgacctgcaccccatcaaagtggtggagggagtcaaggaattgagcaagaagctggtgattgtgaatggggatgacccactaagtcgacaggcccaggaaaatgccacgctgctcttcaacatccacctgcggtccacgttgtgttcccgccgcatggcagaggagtttcggctcagtggggaggccttcgactggctgcttggggagattgagtccaagttcaaccaagccattgcgcatcccggggaaatggtgggggctctggctgcgcagtcccttggagaacctgccacccagatgaccttgaataccttccactatgctggtgtgtctgccaagaatgtgacgctgggtgtgccccgacttaaggagctcatcaacatttccaagaagccaaagactccttcgcttactgtcttcctgttgggccagtccgctcgagatgctgagagagccaaggatattctgtgccgtctggagcatacaacgttgaggaaggtgactgccaacacagccatctactatgaccccaacccccagagcacggtggtggcagaggatcaggaatgggtgaatgtctactatgaaatgcctgactttgatgtggcccgaatctccccctggctgttgcgggtggagctggatcggaagcacatgactgaccggaagctcaccatggagcagattgctgaaaagatcaatgctggttttggtgacgacttgaactgcatctttaatgatgacaatgcagagaagctggtgctccgtattcgcatcatgaacagcgatgagaacaagatgcaagaggaggaagaggtggtggacaagatggatgatgatgtcttcctgcgctgcatcgagtccaacatgctgacagatatgaccctgcagggcatcgagcagatcagcaaggtgtacatgcacttgccacagacagacaacaagaagaagatcatcatcacggaggatggggaattcaaggccctgcaggagtggatcctggagacggacggcgtgagcttgatgcgggtgctgagtgagaaggacgtggaccccgtacgcaccacgtccaatgacattgtggagatcttcacggtgctgggcattgaagccgtgcggaaggccctggagcgggagctgtaccacgtcatctcctttgatggctcctatgtcaattaccgacacttggctctcttgtgtgataccatgacctgtcgtggccacttgatggccatcacccgacacggagtcaaccgccaggacacaggaccactcatgaagtgttcctttgaggaaacggtggacgtgcttatggaagcagccgcacacggtgagagtgaccccatgaagggggtctctgagaatatcatgctgggccagctggctccggccggcactggctgctttgacctcctgcttgatgcagagaagtgcaagtatggcatggagatccccaccaatatccccggcctgggggctgctggacccaccggcatgttctttggttcagcacccagtcccatgggtggaatctctcctgccatgacaccttggaaccagggtgcaacccctgcctatggcgcctggtcccccagtgttgggagtggaatgaccccaggggcagccggcttctctcccagtgctgcgtcagatgccagcggcttcagcccaggttactcccctgcctggtctcccacaccgggctccccggggtccccaggtccctcaagcccctacatcccttcaccaggtggtgccatgtctcccagctactcgccaacgtcacctgcctacgagccccgctctcctgggggctacacaccccagagtccctcttattcccccacttcaccctcctactcccctacctctccatcctattctccaaccagtcccaactatagtcccacatcacccagctattcgccaacgtcacccagctactcaccgacctctcccagctactcacccacctctcccagctactcgcccacctctcccagctactcgcccacctctcccagctactcacccacttcccctagctactcgcccacttcccctagctactcgccaacgtctcccagctactcgccgacatctcccagctactcgccaacttcacccagctattctcccacttctcccagctactcacctacctctccaagctattcacccacctcccccagctactcacccacttccccaagttactcacccaccagcccgaactattctccaaccagtcccaattacaccccaacatcacccagctacagcccgacatcacccagctattcacctactagtcccaactacacacctaccagccctaactacagcccaacctctccaagctactctccaacatcacccagctattccccgacctcaccaagttactccccttccagcccacgatacacaccacagtctccaacctataccccaagctcacccagctacagccccagctcgcccagctacagcccaacctcacccaagtacaccccaaccagtccttcttacagtcccagctccccagagtataccccaacctctcccaagtactcacctaccagtcccaaatattcacccacctctcccaagtactcgcctaccagtcccacctattcacccaccaccccaaaatactccccaacatctcctacttattccccaacctctccagtctacaccccaacctctcccaagtactcacctactagccccacttactcgcccacttcccccaagtactcgcccaccagccccacctactcgcccacctcccccaaaggctcaacctactctcccacttcccctggttactcgcccaccagccccacctacagtctcacaagcccggctatcagcccggatgacagtgacgaggagaactgagggcacgtggggtgcggcagcgggctagggcccagggcagcttgcccgtgctgccgtgcagttcttgcctccctcacggggcgtcacccccagcccagctccgttgtacataaatgccttgtggcagagctcccggtgaacttctggatcccgtttctgatgcagattcttgtcttgttctccacttgtgctgttagaactcactggcccagtggtgttctcactcctaccccacccaccccctgcctgtccccaaattgaagatccttccttgcctgtggcttgatgcggggcgggtaaagggtattttaacttaggggtagttcctgctgtgagtggttacagctgatcctcgggaagaacaaagctaaagctgccttttgtctgttattttatttttttgaagtttaaataaagtttactaattttgaccaaaaaaaaatgtacatcgag

SEQ ID NO: 357154 - DNA, 4895 bp, Homo sapiens
tcagggcgacatactgcacttctggctccccagacagcaaagtgacaagtggaggggctaacttcttcagcagcatattgtagtagtcagaatccttaggtaacaattctagaaacttcattaggacttttaccgctgaaagcaccactgctgagttggcatgggatagccggggagttacccgctcacagatgctgagcggtgaagtgatgaacctcctgatgttcctgtcgacgtgggatgggaaggtcccacagccggccatcctaaagccccggcccctgtggacaggcaagcaaatcttctccctcatcatacctggtcacatcaattgtatccgtacccacagcacccatcccgatgatgaagacagtggcccttacaagcacatctctcctggggacaccaaggtggtggtggagaatggggagctgatcatgggcatcctgtgtaagaagtctctgggcacgtcagctggctccctggtccacatctcctacctagagatgggtcatgacatcactcgcctcttctactccaacattcagactgtcattaacaactggctcctcatcgagggtcatactattggcattggggactccattgctgattctaagacttaccaggacattcagaacactattaagaaggccaagcaggacgtaatagaggtcatcgagaaggcacacaacaatgagctggagcccaccccagggaacactctgcggcagacgtttgagaatcaggtgaaccgcattcttaacgatgcccgagacaagactggctcctctgctcagaaatccctgtctgaatacaacaacttcaagtctatggtcgtgtccggagctaaaggttccaagattaacatctcccaggtcattgctgtcgttggacagcagaacgtcgagggcaagcggattccatttggcttcaagcaccggactctgcctcacttcatcaaggatgactacgggcctgagagccgtggctttgtggagaactcctacctagccggcctcacacccactgagttctttttccacgccatggggggtcgtgaggggctcattgacacggctgtcaagactgctgagactggatacatccagcggcggctgatcaagtccatggagtcagtgatggtgaagtacgacgcgactgtgcggaactccatcaaccaggtggtgcagctgcgctacggcgaagacggcctggcaggcgagagcgttgagttccagaacctggctacgcttaagccttccaacaaggcttttgagaagaagttccgctttgattataccaatgagagggccctgcggcgcactctgcaggaggacctggtgaaggacgtgctgagcaacgcacacatccagaacgagttggagcgggaatttgagcggatgcgggaggatcgggaggtgctcagggtcatcttcccaactggagacagcaaggtcgtcctcccctgtaacctgctgcggatgatctggaatgctcagaaaatcttccacatcaacccacgccttccctccgacctgcaccccatcaaagtggtggagggagtcaaggaattgagcaagaagctggtgattgtgaatggggatgacccactaagtcgacaggcccaggaaaatgccacgctgctcttcaacatccacctgcggtccacgttgtgttcccgccgcatggcagaggagtttcggctcagtggggaggccttcgactggctgcttggggagattgagtccaagttcaaccaagccattgcgcatcccggggaaatggtgggggctctggctgcgcagtcccttggagaacctgccacccagatgaccttgaataccttccactatgctggtgtgtctgccaagaatgtgacgctgggtgtgccccgacttaaggagctcatcaacatttccaagaagccaaagactccttcgcttactgtcttcctgttgggccagtccgctcgagatgctgagagagccaaggatattctgtgccgtctggagcatacaacgttgaggaaggtgactgccaacacagccatctactatgaccccaacccccagagcacggtggtggcagaggatcaggaatgggtgaatgtctactatgaaatgcctgactttgatgtggcccgaatctccccctggctgttgcgggtggagctggatcggaagcacatgactgaccggaagctcaccatggagcagattgctgaaaagatcaatgctggttttggtgacgacttgaactgcatctttaatgatgacaatgcagagaagctggtgctccgtattcgcatcatgaacagcgatgagaacaagatgcaagaggaggaagaggtggtggacaagatggatgatgatgtcttcctgcgctgcatcgagtccaacatgctgacagatatgaccctgcagggcatcgagcagatcagcaaggtgtacatgcacttgccacagacagacaacaagaagaagatcatcatcacggaggatggggaattcaaggccctgcaggagtggatcctggagacggacggcgtgagcttgatgcgggtgctgagtgagaaggacgtggaccccgtacgcaccacgtccaatgacattgtggagatcttcacggtgctgggcattgaagccgtgcggaaggccctggagcgggagctgtaccacgtcatctcctttgatggctcctatgtcaattaccgacacttggctctcttgtgtgataccatgacctgtcgtggccacttgatggccatcacccgacacggagtcaaccgccaggacacaggaccactcatgaagtgttcctttgaggaaacggtggacgtgcttatggaagcagccgcacacggtgagagtgaccccatgaagggggtctctgagaatatcatgctgggccagctggctccggccggcactggctgctttgacctcctgcttgatgcagagaagtgcaagtatggcatggagatccccaccaatatccccggcctgggggctgctggacccaccggcatgttctttggttcagcacccagtcccatgggtggaatctctcctgccatgacaccttggaaccagggtgcaacccctgcctatggcgcctggtcccccagtgttgggagtggaatgaccccaggggcagccggcttctctcccagtgctgcgtcagatgccagcggcttcagcccaggttactcccctgcctggtctcccacaccgggctccccggggtccccaggtccctcaagcccctacatcccttcaccaggtggtgccatgtctcccagctactcgccaacgtcacctgcctacgagccccgctctcctgggggctacacaccccagagtccctcttattcccccacttcaccctcctactcccctacctctccatcctattctccaaccagtcccaactatagtcccacatcacccagctattcgccaacgtcacccagctactcaccgacctctcccagctactcacccacctctcccagctactcgcccacctctcccagctactcgcccacctctcccagctactcacccacttcccctagctactcgcccacttcccctagctactcgccaacgtctcccagctactcgccgacatctcccagctactcgccaacttcacccagctattctcccacttctcccagctactcacctacctctccaagctattcacccacctcccccagctactcacccacttccccaagttactcacccaccagcccgaactattctccaaccagtcccaattacaccccaacatcacccagctacagcccgacatcacccagctattcacctactagtcccaactacacacctaccagccctaactacagcccaacctctccaagctactctccaacatcacccagctattccccgacctcaccaagttactccccttccagcccacgatacacaccacagtctccaacctataccccaagctcacccagctacagccccagctcgcccagctacagcccaacctcacccaagtacaccccaaccagtccttcttacagtcccagctccccagagtataccccaacctctcccaagtactcacctaccagtcccaaatattcacccacctctcccaagtactcgcctaccagtcccacctattcacccaccaccccaaaatactccccaacatctcctacttattccccaacctctccagtctacaccccaacctctcccaagtactcacctactagccccacttactcgcccacttcccccaagtactcgcccaccagccccacctactcgcccacctcccccaaaggctcaacctactctcccacttcccctggttactcgcccaccagccccacctacagtctcacaagcccggctatcagcccggatgacagtgacgaggagaactgagggcacgtggggtgcggcagcgggctagggcccagggcagcttgcccgtgctgccgtgcagttcttgcctccctcacggggcgtcacccccagcccagctccgttgtacataaatgccttgtggcagagctcccggtgaacttctggatcccgtttctgatgcagattcttgtcttgttctccacttgtgctgttagaactcactggcccagtggtgttctcactcctaccccacccaccccctgcctgtccccaaattgaagatccttccttgcctgtggcttgatgcggggcgggtaaagggtattttaacttaggggtagttcctgctgtgagtggttacagctgatcctcgggaagaacaaagctaaagctgccttttgtctgttattttatttttttgaagtttaaataaagtttactaattttgaccaaaaaaaaatgtacatcgag

SEQ ID NO: 357155 - DNA, 2635 bp, Homo sapiens
ttctagaggatccctcacgccatgtcacaacctggtgctccgtattcgcatcatgaacagcgatgagaacaagatgcaagaggaggaagaggtggtggacaagatggatgatgatgtcttcctgcgctgcatcgagtccaacatgctgacagatatgaccctgcagggcatcgagcagatcagcaaggtgtacatgcacttgccacagacagacaacaagaagaagatcatcatcacggaggatggggaattcaaggccctgcaggagtggatcctggagacggacggcgtgagcttgatgcgggtgctgagtgagaaggacgtggaccccgtacgcaccacgtccaatgacattgtggagatcttcacggtgctgggcattgaagccgtgcggaaggccctggagcgggagctgtaccacgtcatctcctttgatggctcctatgtcaattaccgacacttggctctcttgtgtgataccatgacctgtcgtggccacttgatggccatcacccgacacggagtcaaccgccaggacacaggaccactcatgaagtgttcctttgaggaaacggtggacgtgcttatggaagcagccgcacacggtgagagtgaccccatgaagggggtctctgagaatatcatgctgggccagctggctccggccggcactggctgctttgacctcctgcttgatgcagagaagtgcaagtatggcatggagatccccaccaatatccccggcctgggggctgctggacccaccggcatgttctttggttcagcacccagtcccatgggtggaatctctcctgccatgacaccttggaaccagggtgcaacccctgcctatggcgcctggtcccccagtgttgggagtggaatgaccccaggggcagccggcttctctcccagtgctgcgtcagatgccagcggcttcagcccaggttactcccctgcctggtctcccacaccgggctccccggggtccccaggtccctcaagcccctacatcccttcaccaggtggtgccatgtctcccagctactcgccaacgtcacctgcctacgagccccgctctcctgggggctacacaccccagagtccctcttattcccccacttcaccctcctactcccctacctctccatcctattctccaaccagtcccaactatagtcccacatcacccagctattcgccaacgtcacccagctactcaccgacctctcccagctactcacccacctctcccagctactcgcccacctctcccagctactcgcccacctctcccagctactcacccacttcccctagctactcgcccacttcccctagctactcgccaacgtctcccagctactcgccgacatctcccagctactcgccaacttcacccagctattctcccacttctcccagctactcacctacctctccaagctattcacccacctcccccagctactcacccacttccccaagttactcacccaccagcccgaactattctccaaccagtcccaattacaccccaacatcacccagctacagcccgacatcacccagctattcacctactagtcccaactacacacctaccagccctaactacagcccaacctctccaagctactctccaacatcacccagctattccccgacctcaccaagttactccccttccagcccacgatacacaccacagtctccaacctataccccaagctcacccagctacagccccagctcgcccagctacagcccaacctcacccaagtacaccccaaccagtccttcttacagtcccagctccccagagtataccccaacctctcccaagtactcacctaccagtcccaaatattcacccacctctcccaagtactcgcctaccagtcccacctattcacccaccaccccaaaatactccccaacatctcctacttattccccaacctctccagtctacaccccaacctctcccaagtactcacctactagccccacttactcgcccacttcccccaagtactcgcccaccagccccacctactcgcccacctcccccaaaggctcaacctactctcccacttcccctggttactcgcccaccagccccacctacagtctcacaagcccggctatcagcccggatgacagtgacgaggagaactgagggcacgtggggtgcggcagcgggctagggcccagggcagcttgcccgtgctgccgtgcagttcttgcctccctcacggggcgtcacccccagcccagctccgttgtacataaatgccttgtggcagagctcccggtgaacttctggatcccgtttctgatgcagattcttgtcttgttctccacttgtgctgttagaactcactggcccagtggtgttctcactcctaccccacccaccccctgcctgtccccaaattgaagatccttccttgcctgtggcttgatgcggggcgggtaaagggtattttaacttaggggtagttcctgctgtgagtggttacagctgatcctcgggaagaacaaagctaaagctgccttttgtctgttattttatttttttgaagtttaaataaagtttactaattttgaccaaaaaaaaatgtacatcgag

SEQ ID NO: 357156 - DNA, 2881 bp, Homo sapiens
agctaaactaattttgcaaatcaaacagacacttgaaaaactagcatatgtaaaggtattcgttaatcctgtgaatggtagcttttgcacagaacttccaatagccaaaccaaaaccaaatctattgtagttatatacttcatttaacctaggtcacaagacccagggaatcttctaacctcacttttacagtaggtattactcttgtgacatttttttggttatcaacaacctaaatataaattactttggaaaaagtaaggctgtcttgcaaaatgatcccagctctgattagcagccctctggagttcagtacttaagcggatcagaggaagaggtggtggacaagatggatgatgatgtcttcctgcgctgcatcgagtccaacatgctgacagatatgaccctgcagggcatcgagcagatcagcaaggtgtacatgcacttgccacagacagacaacaagaagaagatcatcatcacggaggatggggaattcaaggccctgcaggagtggatcctggagacggacggcgtgagcttgatgcgggtgctgagtgagaaggacgtggaccccgtacgcaccacgtccaatgacattgtggagatcttcacggtgctgggcattgaagccgtgcggaaggccctggagcgggagctgtaccacgtcatctcctttgatggctcctatgtcaattaccgacacttggctctcttgtgtgataccatgacctgtcgtggccacttgatggccatcacccgacacggagtcaaccgccaggacacaggaccactcatgaagtgttcctttgaggaaacggtggacgtgcttatggaagcagccgcacacggtgagagtgaccccatgaagggggtctctgagaatatcatgctgggccagctggctccggccggcactggctgctttgacctcctgcttgatgcagagaagtgcaagtatggcatggagatccccaccaatatccccggcctgggggctgctggacccaccggcatgttctttggttcagcacccagtcccatgggtggaatctctcctgccatgacaccttggaaccagggtgcaacccctgcctatggcgcctggtcccccagtgttgggagtggaatgaccccaggggcagccggcttctctcccagtgctgcgtcagatgccagcggcttcagcccaggttactcccctgcctggtctcccacaccgggctccccggggtccccaggtccctcaagcccctacatcccttcaccaggtggtgccatgtctcccagctactcgccaacgtcacctgcctacgagccccgctctcctgggggctacacaccccagagtccctcttattcccccacttcaccctcctactcccctacctctccatcctattctccaaccagtcccaactatagtcccacatcacccagctattcgccaacgtcacccagctactcaccgacctctcccagctactcacccacctctcccagctactcgcccacctctcccagctactcgcccacctctcccagctactcacccacttcccctagctactcgcccacttcccctagctactcgccaacgtctcccagctactcgccgacatctcccagctactcgccaacttcacccagctattctcccacttctcccagctactcacctacctctccaagctattcacccacctcccccagctactcacccacttccccaagttactcacccaccagcccgaactattctccaaccagtcccaattacaccccaacatcacccagctacagcccgacatcacccagctattcacctactagtcccaactacacacctaccagccctaactacagcccaacctctccaagctactctccaacatcacccagctattccccgacctcaccaagttactccccttccagcccacgatacacaccacagtctccaacctataccccaagctcacccagctacagccccagctcgcccagctacagcccaacctcacccaagtacaccccaaccagtccttcttacagtcccagctccccagagtataccccaacctctcccaagtactcacctaccagtcccaaatattcacccacctctcccaagtactcgcctaccagtcccacctattcacccaccaccccaaaatactccccaacatctcctacttattccccaacctctccagtctacaccccaacctctcccaagtactcacctactagccccacttactcgcccacttcccccaagtactcgcccaccagccccacctactcgcccacctcccccaaaggctcaacctactctcccacttcccctggttactcgcccaccagccccacctacagtctcacaagcccggctatcagcccggatgacagtgacgaggagaactgagggcacgtggggtgcggcagcgggctagggcccagggcagcttgcccgtgctgccgtgcagttcttgcctccctcacggggcgtcacccccagcccagctccgttgtacataaatgccttgtggcagagctcccggtgaacttctggatcccgtttctgatgcagattcttgtcttgttctccacttgtgctgttagaactcactggcccagtggtgttctcactcctaccccacccaccccctgcctgtccccaaattgaagatccttccttgcctgtggcttgatgcggggcgggtaaagggtattttaacttaggggtagttcctgctgtgagtggttacagctgatcctcgggaagaacaaagctaaagctgccttttgtctgttattttatttttttgaagtttaaataaagtttactaattttgaccaaaaaaaaatgtacatcgag

SEQ ID NO: 357157 - DNA, 6105 bp, Homo sapiens
gagagcgcggccgggacggttggagaagaaggcggctccccggaagggggagagacaaactgccgtaacctctgccgttcaggaacccggttacttatttattcgttaccctttttcttcttcctcccccaaaaaccttttccttttcccttctttttttttcctttttgggagctgaaaaatttccggtaagggaaagaagggctcctttcgctccttatttcgccgcctccttccctccgccaccttcccctcctccggctttttcctcccaactcggggaggtccttcccggtggccgccctgacgaggtctgagcacctaggcggaggcggcgcaggctttttgtagtgaggtttgcgcctgcgcaggcgcctgcctccgccatgcacgggggtggccccccctcgggggacagcgcatgcccgctgcgcaccatcaagagagtccagttcggagtcctgagtccggatgaactgaagcgaatgtctgtgacggagggtggcatcaaatacccagagacgactgagggaggccgccccaagcttggggggctgatggacccgaggcagggggtgattgagcggactggccgctgccaaacatgtgcaggaaacatgacagagtgtcctggccactttggccacattgaactggccaagcctgtgtttcacgtgggcttcctggtgaagacaatgaaagttttgcgctgtgtctgcttcttctgctccaaactgcttgtggactctaacaacccaaagatcaaggatatcctggctaagtccaagggacagcccaagaagcggctcacacatgtctacgacctttgcaagggcaaaaacatatgcgagggtggggaggagatggacaacaagttcggtgtggaacaacctgagggtgacgaggatctgaccaaagaaaagggccatggtggctgtgggcggtaccagcccaggatccggcgttctggcctagagctgtatgcggaatggaagcacgttaatgaggactctcaggagaagaagatcctgctgagtccagagcgagtgcatgagatcttcaaacgcatctcagatgaggagtgttttgtgctgggcatggagccccgctatgcacggccagagtggatgattgtcacagtgctgcctgtgcccccgctctccgtgcggcctgctgttgtgatgcagggctctgcccgtaaccaggatgacctgactcacaaactggctgacatcgtgaagatcaacaatcagctgcggcgcaatgagcagaacggcgcagcggcccatgtcattgcagaggatgtgaagctcctccagttccatgtggccaccatggtggacaatgagctgcctggcttgccccgtgccatgcagaagtctgggcgtcccctcaagtccctgaagcagcggttgaagggcaaggaaggccgggtgcgagggaacctgatgggcaaaagagtggacttctcggcccgtactgtcatcacccccgaccccaacctctccattgaccaggttggcgtgccccgctccattgctgccaacatgacctttgcggagattgtcacccccttcaacattgacagacttcaagaactagtgcgcagggggaacagccagtacccaggcgccaagtacatcatccgagacaatggtgatcgcattgacttgcgtttccaccccaagcccagtgaccttcacctgcagaccggctataaggtggaacggcacatgtgtgatggggacattgttatcttcaaccggcagccaactctgcacaaaatgtccatgatggggcatcgggtccgcattctcccatggtctacctttcgcttgaatcttagcgtgacaactccgtacaatgcagactttgacggggatgagatgaacttgcacctgccacagtctctggagacgcgagcagagatccaggagctggccatggttcctcgcatgattgtcaccccccagagcaatcggcctgtcatgggtattgtgcaggacacactcacagcagtgcgcaaattcaccaagagagacgtcttcctggagcggggtgaagtgatgaacctcctgatgttcctgtcgacgtgggatgggaaggtcccacagccggccatcctaaagccccggcccctgtggacaggcaagcaaatcttctccctcatcatacctggtcacatcaattgtatccgtacccacagcacccatcccgatgatgaagacagtggcccttacaagcacatctctcctggggacaccaaggtggtggtggagaatggggagctgatcatgggcatcctgtgtaagaagtctctgggcacgtcagctggctccctggtccacatctcctacctagagatgggtcatgacatcactcgcctcttctactccaacattcagactgtcattaacaactggctcctcatcgagggtcatactattggcattggggactccattgctgattctaagacttaccaggacattcagaacactattaagaaggccaagcaggacgtaatagaggtcatcgagaaggcacacaacaatgagctggagcccaccccagggaacactctgcggcagacgtttgagaatcaggtgaaccgcattcttaacgatgcccgagacaagactggctcctctgctcagaaatccctgtctgaatacaacaacttcaagtctatggtcgtgtccggagctaaaggttccaagattaacatctcccaggtcattgctgtcgttggacagcagaacgtcgagggcaagcggattccatttggcttcaagcaccggactctgcctcacttcatcaaggatgactacgggcctgagagccgtggctttgtggagaactcctacctagccggcctcacacccactgagttctttttccacgccatggggggtcgtgaggggctcattgacacggctgtcaagactgctgagactggatacatccagcggcggctgatcaagtccatggagtcagtgatggtgaagtacgacgcgactgtgcggaactccatcaaccaggtggtgcagctgcgctacggcgaagacggcctggcaggcgagagcgttgagttccagaacctggctacgcttaagccttccaacaaggcttttgagaagaagttccgctttgattataccaatgagagggccctgcggcgcactctgcaggaggacctggtgaaggacgtgctgagcaacgcacacatccagaacgagttggagcgggaatttgagcggatgcgggaggatcgggaggtgctcagggtcatcttcccaactggagacagcaaggtcgtcctcccctgtaacctgctgcggatgatctggaatgctcagaaaatcttccacatcaacccacgccttccctccgacctgcaccccatcaaagtggtggagggagtcaaggaattgagcaagaagctggtgattgtgaatggggatgacccactaagtcgacaggcccaggaaaatgccacgctgctcttcaacatccacctgcggtccacgttgtgttcccgccgcatggcagaggagtttcggctcagtggggaggccttcgactggctgcttggggagattgagtccaagttcaaccaagccattgcgcatcccggggaaatggtgggggctctggctgcgcagtcccttggagaacctgccacccagatgaccttgaataccttccactatgctggtgtgtctgccaagaatgtgacgctgggtgtgccccgacttaaggagctcatcaacatttccaagaagccaaagactccttcgcttactgtcttcctgttgggccagtccgctcgagatgctgagagagccaaggatattctgtgccgtctggagcatacaacgttgaggaaggtgactgccaacacagccatctactatgaccccaacccccagagcacggtggtggcagaggatcaggaatgggtgaatgtctactatgaaatgcctgactttgatgtggcccgaatctccccctggctgttgcgggtggagctggatcggaagcacatgactgaccggaagctcaccatggagcagattgctgaaaagatcaatgctggttttggtgacgacttgaactgcatctttaatgatgacaatgcagagaagctggtgctccgtattcgcatcatgaacagcgatgagaacaagatgcaagaggaggaagaggtggtggacaagatggatgatgatgtcttcctgcgctgcatcgagtccaacatgctgacagatatgaccctgcagggcatcgagcagatcagcaaggtgtacatgcacttgccacagacagacaacaagaagaagatcatcatcacggaggatggggaattcaaggccctgcaggagtggatcctggagacggacggcgtgagcttgatgcgggtgctgagtgagaaggacgtggaccccgtacgcaccacgtccaatgacattgtggagatcttcacggtgctgggcattgaagccgtgcggaaggccctggagcgggagctgtaccacgtcatctcctttgatggctcctatgtcaattaccgacacttggctctcttgtgtgataccatgacctgtcgtggccacttgatggccatcacccgacacggagtcaaccgccaggacacaggaccactcatgaagtgttcctttgaggaaacggtggacgtgcttatggaagcagccgcacacggtgagagtgaccccatgaagggggtctctgagaatatcatgctgggccagctggctccggccggcactggctgctttgacctcctgcttgatgcagagaagtgcaagtatggcatggagatccccaccaatatccccggcctgggggctgctggacccaccggcatgttctttggttcagcacccagtcccatgggtggaatctctcctgccatgacaccttggaaccagggtgcaacccctgcctatggcgcctggtcccccagtgttgggagtggaatgaccccaggggcagccggcttctctcccagtgctgcgtcagatgccagcggcttcagcccaggttactcccctgcctggtctcccacaccgggctccccggggtccccaggtccctcaagcccctacatcccttcaccaggtggtgccatgtctcccagctactcgccaacgtcacctgcctacgagccccgctctcctgggggctacacaccccagagtccctcttattcccccacttcaccctcctactcccctacctctccatcctattctccaaccagtcccaactatagtcccacatcacccagctattcgccaacgtcacccagctactcaccgacctctcccagctactcacccacctctcccagctactcgcccacctctcccagctactcgcccacctctcccagctactcacccacttcccctagctactcgcccacttcccctagctactcgccaacgtctcccagctactcgccgacatctcccagctactcgccaacttcacccagctattctcccacttctcccagctactcacctacctctccaagctattcacccacctcccccagctactcacccacttccccaagttactcacccaccagcccgaactattctccaaccagtcccaattacaccccaacatcacccagctacagcccgacatcacccagctattcacctactagtcccaactacacacctaccagccctaactacagcccaacctctccaagctactctccaacatcacccagctattccccgacctcaccaagttactccccttccagcccacgatacacaccacagtctccaacctataccccaagctcacccagctacagccccagctcgcccagctacagcccaacctcacccaagtacaccccaaccagtccttcttacagtcccagctccccagagtataccccaacctctcccaagtactcacctaccagtcccaaatattcacccacctctcccaagtactcgcctaccagtccttttacaccaaccccgtgatcgtggggttgtaattacaaccccacgatcacacatagtattgtggtgtgttgaattcaatacg

SEQ ID NO: 357158 - DNA, 6253 bp, Homo sapiens
  misc_feature (6239)..(6239): n is a, c, g, or t
gagagcgcggccgggacggttggagaagaaggcggctccccggaagggggagagacaaactgccgtaacctctgccgttcaggaacccggttacttatttattcgttaccctttttcttcttcctcccccaaaaaccttttccttttcccttctttttttttcctttttgggagctgaaaaatttccggtaagggaaagaagggctcctttcgctccttatttcgccgcctccttccctccgccaccttcccctcctccggctttttcctcccaactcggggaggtccttcccggtggccgccctgacgaggtctgagcacctaggcggaggcggcgcaggctttttgtagtgaggtttgcgcctgcgcaggcgcctgcctccgccatgcacgggggtggccccccctcgggggacagcgcatgcccgctgcgcaccatcaagagagtccagttcggagtcctgagtccggatgaactgaagcgaatgtctgtgacggagggtggcatcaaatacccagagacgactgagggaggccgccccaagcttggggggctgatggacccgaggcagggggtgattgagcggactggccgctgccaaacatgtgcaggaaacatgacagagtgtcctggccactttggccacattgaactggccaagcctgtgtttcacgtgggcttcctggtgaagacaatgaaagttttgcgctgtgtctgcttcttctgctccaaactgcttgtggactctaacaacccaaagatcaaggatatcctggctaagtccaagggacagcccaagaagcggctcacacatgtctacgacctttgcaagggcaaaaacatatgcgagggtggggaggagatggacaacaagttcggtgtggaacaacctgagggtgacgaggatctgaccaaagaaaagggccatggtggctgtgggcggtaccagcccaggatccggcgttctggcctagagctgtatgcggaatggaagcacgttaatgaggactctcaggagaagaagatcctgctgagtccagagcgagtgcatgagatcttcaaacgcatctcagatgaggagtgttttgtgctgggcatggagccccgctatgcacggccagagtggatgattgtcacagtgctgcctgtgcccccgctctccgtgcggcctgctgttgtgatgcagggctctgcccgtaaccaggatgacctgactcacaaactggctgacatcgtgaagatcaacaatcagctgcggcgcaatgagcagaacggcgcagcggcccatgtcattgcagaggatgtgaagctcctccagttccatgtggccaccatggtggacaatgagctgcctggcttgccccgtgccatgcagaagtctgggcgtcccctcaagtccctgaagcagcggttgaagggcaaggaaggccgggtgcgagggaacctgatgggcaaaagagtggacttctcggcccgtactgtcatcacccccgaccccaacctctccattgaccaggttggcgtgccccgctccattgctgccaacatgacctttgcggagattgtcacccccttcaacattgacagacttcaagaactagtgcgcagggggaacagccagtacccaggcgccaagtacatcatccgagacaatggtgatcgcattgacttgcgtttccaccccaagcccagtgaccttcacctgcagaccggctataaggtggaacggcacatgtgtgatggggacattgttatcttcaaccggcagccaactctgcacaaaatgtccatgatggggcatcgggtccgcattctcccatggtctacctttcgcttgaatcttagcgtgacaactccgtacaatgcagactttgacggggatgagatgaacttgcacctgccacagtctctggagacgcgagcagagatccaggagctggccatggttcctcgcatgattgtcaccccccagagcaatcggcctgtcatgggtattgtgcaggacacactcacagcagtgcgcaaattcaccaagagagacgtcttcctggagcggggtgaagtgatgaacctcctgatgttcctgtcgacgtgggatgggaaggtcccacagccggccatcctaaagccccggcccctgtggacaggcaagcaaatcttctccctcatcatacctggtcacatcaattgtatccgtacccacagcacccatcccgatgatgaagacagtggcccttacaagcacatctctcctggggacaccaaggtggtggtggagaatggggagctgatcatgggcatcctgtgtaagaagtctctgggcacgtcagctggctccctggtccacatctcctacctagagatgggtcatgacatcactcgcctcttctactccaacattcagactgtcattaacaactggctcctcatcgagggtcatactattggcattggggactccattgctgattctaagacttaccaggacattcagaacactattaagaaggccaagcaggacgtaatagaggtcatcgagaaggcacacaacaatgagctggagcccaccccagggaacactctgcggcagacgtttgagaatcaggtgaaccgcattcttaacgatgcccgagacaagactggctcctctgctcagaaatccctgtctgaatacaacaacttcaagtctatggtcgtgtccggagctaaaggttccaagattaacatctcccaggtcattgctgtcgttggacagcagaacgtcgagggcaagcggattccatttggcttcaagcaccggactctgcctcacttcatcaaggatgactacgggcctgagagccgtggctttgtggagaactcctacctagccggcctcacacccactgagttctttttccacgccatggggggtcgtgaggggctcattgacacggctgtcaagactgctgagactggatacatccagcggcggctgatcaagtccatggagtcagtgatggtgaagtacgacgcgactgtgcggaactccatcaaccaggtggtgcagctgcgctacggcgaagacggcctggcaggcgagagcgttgagttccagaacctggctacgcttaagccttccaacaaggcttttgagaagaagttccgctttgattataccaatgagagggccctgcggcgcactctgcaggaggacctggtgaaggacgtgctgagcaacgcacacatccagaacgagttggagcgggaatttgagcggatgcgggaggatcgggaggtgctcagggtcatcttcccaactggagacagcaaggtcgtcctcccctgtaacctgctgcggatgatctggaatgctcagaaaatcttccacatcaacccacgccttccctccgacctgcaccccatcaaagtggtggagggagtcaaggaattgagcaagaagctggtgattgtgaatggggatgacccactaagtcgacaggcccaggaaaatgccacgctgctcttcaacatccacctgcggtccacgttgtgttcccgccgcatggcagaggagtttcggctcagtggggaggccttcgactggctgcttggggagattgagtccaagttcaaccaagccattgcgcatcccggggaaatggtgggggctctggctgcgcagtcccttggagaacctgccacccagatgaccttgaataccttccactatgctggtgtgtctgccaagaatgtgacgctgggtgtgccccgacttaaggagctcatcaacatttccaagaagccaaagactccttcgcttactgtcttcctgttgggccagtccgctcgagatgctgagagagccaaggatattctgtgccgtctggagcatacaacgttgaggaaggtgactgccaacacagccatctactatgaccccaacccccagagcacggtggtggcagaggatcaggaatgggtgaatgtctactatgaaatgcctgactttgatgtggcccgaatctccccctggctgttgcgggtggagctggatcggaagcacatgactgaccggaagctcaccatggagcagattgctgaaaagatcaatgctggttttggtgacgacttgaactgcatctttaatgatgacaatgcagagaagctggtgctccgtattcgcatcatgaacagcgatgagaacaagatgcaagaggaggaagaggtggtggacaagatggatgatgatgtcttcctgcgctgcatcgagtccaacatgctgacagatatgaccctgcagggcatcgagcagatcagcaaggtgtacatgcacttgccacagacagacaacaagaagaagatcatcatcacggaggatggggaattcaaggccctgcaggagtggatcctggagacggacggcgtgagcttgatgcgggtgctgagtgagaaggacgtggaccccgtacgcaccacgtccaatgacattgtggagatcttcacggtgctgggcattgaagccgtgcggaaggccctggagcgggagctgtaccacgtcatctcctttgatggctcctatgtcaattaccgacacttggctctcttgtgtgataccatgacctgtcgtggccacttgatggccatcacccgacacggagtcaaccgccaggacacaggaccactcatgaagtgttcctttgaggaaacggtggacgtgcttatggaagcagccgcacacggtgagagtgaccccatgaagggggtctctgagaatatcatgctgggccagctggctccggccggcactggctgctttgacctcctgcttgatgcagagaagtgcaagtatggcatggagatccccaccaatatccccggcctgggggctgctggacccaccggcatgttctttggttcagcacccagtcccatgggtggaatctctcctgccatgacaccttggaaccagggtgcaacccctgcctatggcgcctggtcccccagtgttgggagtggaatgaccccaggggcagccggcttctctcccagtgctgcgtcagatgccagcggcttcagcccaggttactcccctgcctggtctcccacaccgggctccccggggtccccaggtccctcaagcccctacatcccttcaccaggtggtgccatgtctcccagctactcgccaacgtcacctgcctacgagccccgctctcctgggggctacacaccccagagtccctcttattcccccacttcaccctcctactcccctacctctccatcctattctccaaccagtcccaactatagtcccacatcacccagctattcgccaacgtcacccagctactcaccgacctctcccagctactcacccacctctcccagctactcgcccacctctcccagctactcgcccacctctcccagctactcacccacttcccctagctactcgcccacttcccctagctactcgccaacgtctcccagctactcgccgacatctcccagctactcgccaacttcacccagctattctcccacttctcccagctactcacctacctctccaagctattcacccacctcccccagctactcacccacttccccaagttactcacccaccagcccgaactattctccaaccagtcccaattacaccccaacatcacccagctacagcccgacatcacccagctattcacctactagtcccaactacacacctaccagccctaactacagcccaacctctccaagctactctccaacatcacccagctattccccgacctcaccaagttactccccttccagcccacgatacacaccacagtctccaacctataccccaagctcacccagctacagccccagctcgcccagctacagcccaacctcacccaagtacaccccaaccagtccttcttacagtcccagcttcactgatgccccacccagccacggcaacgacatggtttatatatctggtgtcctgctacttcggcatagaagcctccggtgctaattagccagtctctctgttgccagtattccacacctgatgggaccaattgcctagaattctgccatcatcattctcccctccccgagagggagccgtagtctcccaccctcccgagggtgtagttccaggatggcgtggcactctttgaattccttgcatgtcccacaattggttaaaccatgtcacactcctggtccttggcctggtagtgtgcaaganctcgtcagtccgct

SEQ ID NO: 357159 - DNA, 6233 bp, Homo sapiens
gagagcgcggccgggacggttggagaagaaggcggctccccggaagggggagagacaaactgccgtaacctctgccgttcaggaacccggttacttatttattcgttaccctttttcttcttcctcccccaaaaaccttttccttttcccttctttttttttcctttttgggagctgaaaaatttccggtaagggaaagaagggctcctttcgctccttatttcgccgcctccttccctccgccaccttcccctcctccggctttttcctcccaactcggggaggtccttcccggtggccgccctgacgaggtctgagcacctaggcggaggcggcgcaggctttttgtagtgaggtttgcgcctgcgcaggcgcctgcctccgccatgcacgggggtggccccccctcgggggacagcgcatgcccgctgcgcaccatcaagagagtccagttcggagtcctgagtccggatgaactgaagcgaatgtctgtgacggagggtggcatcaaatacccagagacgactgagggaggccgccccaagcttggggggctgatggacccgaggcagggggtgattgagcggactggccgctgccaaacatgtgcaggaaacatgacagagtgtcctggccactttggccacattgaactggccaagcctgtgtttcacgtgggcttcctggtgaagacaatgaaagttttgcgctgtgtctgcttcttctgctccaaactgcttgtggactctaacaacccaaagatcaaggatatcctggctaagtccaagggacagcccaagaagcggctcacacatgtctacgacctttgcaagggcaaaaacatatgcgagggtggggaggagatggacaacaagttcggtgtggaacaacctgagggtgacgaggatctgaccaaagaaaagggccatggtggctgtgggcggtaccagcccaggatccggcgttctggcctagagctgtatgcggaatggaagcacgttaatgaggactctcaggagaagaagatcctgctgagtccagagcgagtgcatgagatcttcaaacgcatctcagatgaggagtgttttgtgctgggcatggagccccgctatgcacggccagagtggatgattgtcacagtgctgcctgtgcccccgctctccgtgcggcctgctgttgtgatgcagggctctgcccgtaaccaggatgacctgactcacaaactggctgacatcgtgaagatcaacaatcagctgcggcgcaatgagcagaacggcgcagcggcccatgtcattgcagaggatgtgaagctcctccagttccatgtggccaccatggtggacaatgagctgcctggcttgccccgtgccatgcagaagtctgggcgtcccctcaagtccctgaagcagcggttgaagggcaaggaaggccgggtgcgagggaacctgatgggcaaaagagtggacttctcggcccgtactgtcatcacccccgaccccaacctctccattgaccaggttggcgtgccccgctccattgctgccaacatgacctttgcggagattgtcacccccttcaacattgacagacttcaagaactagtgcgcagggggaacagccagtacccaggcgccaagtacatcatccgagacaatggtgatcgcattgacttgcgtttccaccccaagcccagtgaccttcacctgcagaccggctataaggtggaacggcacatgtgtgatggggacattgttatcttcaaccggcagccaactctgcacaaaatgtccatgatggggcatcgggtccgcattctcccatggtctacctttcgcttgaatcttagcgtgacaactccgtacaatgcagactttgacggggatgagatgaacttgcacctgccacagtctctggagacgcgagcagagatccaggagctggccatggttcctcgcatgattgtcaccccccagagcaatcggcctgtcatgggtattgtgcaggacacactcacagcagtgcgcaaattcaccaagagagacgtcttcctggagcggggtgaagtgatgaacctcctgatgttcctgtcgacgtgggatgggaaggtcccacagccggccatcctaaagccccggcccctgtggacaggcaagcaaatcttctccctcatcatacctggtcacatcaattgtatccgtacccacagcacccatcccgatgatgaagacagtggcccttacaagcacatctctcctggggacaccaaggtggtggtggagaatggggagctgatcatgggcatcctgtgtaagaagtctctgggcacgtcagctggctccctggtccacatctcctacctagagatgggtcatgacatcactcgcctcttctactccaacattcagactgtcattaacaactggctcctcatcgagggtcatactattggcattggggactccattgctgattctaagacttaccaggacattcagaacactattaagaaggccaagcaggacgtaatagaggtcatcgagaaggcacacaacaatgagctggagcccaccccagggaacactctgcggcagacgtttgagaatcaggtgaaccgcattcttaacgatgcccgagacaagactggctcctctgctcagaaatccctgtctgaatacaacaacttcaagtctatggtcgtgtccggagctaaaggttccaagattaacatctcccaggtcattgctgtcgttggacagcagaacgtcgagggcaagcggattccatttggcttcaagcaccggactctgcctcacttcatcaaggatgactacgggcctgagagccgtggctttgtggagaactcctacctagccggcctcacacccactgagttctttttccacgccatggggggtcgtgaggggctcattgacacggctgtcaagactgctgagactggatacatccagcggcggctgatcaagtccatggagtcagtgatggtgaagtacgacgcgactgtgcggaactccatcaaccaggtggtgcagctgcgctacggcgaagacggcctggcaggcgagagcgttgagttccagaacctggctacgcttaagccttccaacaaggcttttgagaagaagttccgctttgattataccaatgagagggccctgcggcgcactctgcaggaggacctggtgaaggacgtgctgagcaacgcacacatccagaacgagttggagcgggaatttgagcggatgcgggaggatcgggaggtgctcagggtcatcttcccaactggagacagcaaggtcgtcctcccctgtaacctgctgcggatgatctggaatgctcagaaaatcttccacatcaacccacgccttccctccgacctgcaccccatcaaagtggtggagggagtcaaggaattgagcaagaagctggtgattgtgaatggggatgacccactaagtcgacaggcccaggaaaatgccacgctgctcttcaacatccacctgcggtccacgttgtgttcccgccgcatggcagaggagtttcggctcagtggggaggccttcgactggctgcttggggagattgagtccaagttcaaccaagccattgcgcatcccggggaaatggtgggggctctggctgcgcagtcccttggagaacctgccacccagatgaccttgaataccttccactatgctggtgtgtctgccaagaatgtgacgctgggtgtgccccgacttaaggagctcatcaacatttccaagaagccaaagactccttcgcttactgtcttcctgttgggccagtccgctcgagatgctgagagagccaaggatattctgtgccgtctggagcatacaacgttgaggaaggtgactgccaacacagccatctactatgaccccaacccccagagcacggtggtggcagaggatcaggaatgggtgaatgtctactatgaaatgcctgactttgatgtggcccgaatctccccctggctgttgcgggtggagctggatcggaagcacatgactgaccggaagctcaccatggagcagattgctgaaaagatcaatgctggttttggtgacgacttgaactgcatctttaatgatgacaatgcagagaagctggtgctccgtattcgcatcatgaacagcgatgagaacaagatgcaagaggaggaagaggtggtggacaagatggatgatgatgtcttcctgcgctgcatcgagtccaacatgctgacagatatgaccctgcagggcatcgagcagatcagcaaggtgtacatgcacttgccacagacagacaacaagaagaagatcatcatcacggaggatggggaattcaaggccctgcaggagtggatcctggagacggacggcgtgagcttgatgcgggtgctgagtgagaaggacgtggaccccgtacgcaccacgtccaatgacattgtggagatcttcacggtgctgggcattgaagccgtgcggaaggccctggagcgggagctgtaccacgtcatctcctttgatggctcctatgtcaattaccgacacttggctctcttgtgtgataccatgacctgtcgtggccacttgatggccatcacccgacacggagtcaaccgccaggacacaggaccactcatgaagtgttcctttgaggaaacggtggacgtgcttatggaagcagccgcacacggtgagagtgaccccatgaagggggtctctgagaatatcatgctgggccagctggctccggccggcactggctgctttgacctcctgcttgatgcagagaagtgcaagtatggcatggagatccccaccaatatccccggcctgggggctgctggacccaccggcatgttctttggttcagcacccagtcccatgggtggaatctctcctgccatgacaccttggaaccagggtgcaacccctgcctatggcgcctggtcccccagtgttgggagtggaatgaccccaggggcagccggcttctctcccagtgctgcgtcagatgccagcggcttcagcccaggttactcccctgcctggtctcccacaccgggctccccggggtccccaggtccctcaagcccctacatcccttcaccaggtggtgccatgtctcccagctactcgccaacgtcacctgcctacgagccccgctctcctgggggctacacaccccagagtccctcttattcccccacttcaccctcctactcccctacctctccatcctattctccaaccagtcccaactatagtcccacatcacccagctattcgccaacgtcacccagctactcaccgacctctcccagctactcacccacctctcccagctactcgcccacctctcccagctactcgcccacctctcccagctactcacccacttcccctagctactcgcccacttcccctagctactcgccaacgtctcccagctactcgccgacatctcccagctactcgccaacttcacccagctattctcccacttctcccagctactcacctacctctccaagctattcacccacctcccccagctactcacccacttccccaagttactcacccaccagcccgaactattctccaaccagtcccaattacaccccaacatcacccagctacagcccgacatcacccagctattcacctactagtcccaactacacacctaccagccctaactacagcccaacctctccaagctactctccaacatcacccagctattccccgacctcaccaagttactccccttccagcccacgatacacaccacagtctccaacctataccccaagctcacccagctacagccccagctcgcccagctacagcccaacctcacccaagtacaccccaaccagtccttcttacagtcccagctccccagagtataccccaacctctcccaagtactcacctaccgggttaggtctacctggccaggtagacctaacgtccaagatagaatcttagttcaactttaaatttgcccacagaaccctctaaatcctcttgtaaatttaactgttagtccaaagaggaacagctctttggacactaggaaaaaacccttgtagagcgagtaaaaaatttaacacccatagtaggcctaaaagcagccaccaattaagaaagcgttcaagctcaacacccactacctgggttagtctaccagggtag

SEQ ID NO: 357160 - DNA, 1093 bp, Homo sapiens
cctaaaggaagaagtatcaaagccacgaaacaaagaagcaatcatttatattgaacagtgctattgaaacttctaaaactaggcctctccaagctactctccaacatcacccagctattccccgacctcaccaagttactccccttccagcccacgatacacaccacagtctccaacctataccccaagctcacccagctacagccccagctcgcccagctacagcccaacctcacccaagtacaccccaaccagtccttcttacagtcccagctccccagagtataccccaacctctcccaagtactcacctaccagtcccaaatattcacccacctctcccaagtactcgcctaccagtcccacctattcacccaccaccccaaaatactccccaacatctcctacttattccccaacctctccagtctacaccccaacctctcccaagtactcacctactagccccacttactcgcccacttcccccaagtactcgcccaccagccccacctactcgcccacctcccccaaaggctcaacctactctcccacttcccctggttactcgcccaccagccccacctacagtctcacaagcccggctatcagcccggatgacagtgacgaggagaactgagggcacgtggggtgcggcagcgggctagggcccagggcagcttgcccgtgctgccgtgcagttcttgcctccctcacggggcgtcacccccagcccagctccgttgtacataaatgccttgtggcagagctcccggtgaacttctggatcccgtttctgatgcagattcttgtcttgttctccacttgtgctgttagaactcactggcccagtggtgttctcactcctaccccacccaccccctgcctgtccccaaattgaagatccttccttgcctgtggcttgatgcggggcgggtaaagggtattttaacttaggggtagttcctgctgtgagtggttacagctgatcctcgggaagaacaaagctaaagctgccttttgtctgttattttatttttttgaagtttaaataaagtttactaattttgaccaaaaaaaaatgtacatcgag

SEQ ID NO: 357161 - DNA, 5537 bp, Homo sapiens
gagagcgcggccgggacggttggagaagaaggcggctccccggaagggggagagacaaactgccgtaacctctgccgttcaggaacccggttacttatttattcgttaccctttttcttcttcctcccccaaaaaccttttccttttcccttctttttttttcctttttgggagctgaaaaatttccggtaagggaaagaagggctcctttcgctccttatttcgccgcctccttccctccgccaccttcccctcctccggctttttcctcccaactcggggaggtccttcccggtggccgccctgacgaggtctgagcacctaggcggaggcggcgcaggctttttgtagtgaggtttgcgcctgcgcaggcgcctgcctccgccatgcacgggggtggccccccctcgggggacagcgcatgcccgctgcgcaccatcaagagagtccagttcggagtcctgagtccggatgaactgaagcgaatgtctgtgacggagggtggcatcaaatacccagagacgactgagggaggccgccccaagcttggggggctgatggacccgaggcagggggtgattgagcggactggccgctgccaaacatgtgcaggaaacatgacagagtgtcctggccactttggccacattgaactggccaagcctgtgtttcacgtgggcttcctggtgaagacaatgaaagttttgcgctgtgtctgcttcttctgctccaaactgcttgtggactctaacaacccaaagatcaaggatatcctggctaagtccaagggacagcccaagaagcggctcacacatgtctacgacctttgcaagggcaaaaacatatgcgagggtggggaggagatggacaacaagttcggtgtggaacaacctgagggtgacgaggatctgaccaaagaaaagggccatggtggctgtgggcggtaccagcccaggatccggcgttctggcctagagctgtatgcggaatggaagcacgttaatgaggactctcaggagaagaagatcctgctgagtccagagcgagtgcatgagatcttcaaacgcatctcagatgaggagtgttttgtgctgggcatggagccccgctatgcacggccagagtggatgattgtcacagtgctgcctgtgcccccgctctccgtgcggcctgctgttgtgatgcagggctctgcccgtaaccaggatgacctgactcacaaactggctgacatcgtgaagatcaacaatcagctgcggcgcaatgagcagaacggcgcagcggcccatgtcattgcagaggatgtgaagctcctccagttccatgtggccaccatggtggacaatgagctgcctggcttgccccgtgccatgcagaagtctgggcgtcccctcaagtccctgaagcagcggttgaagggcaaggaaggccgggtgcgagggaacctgatgggcaaaagagtggacttctcggcccgtactgtcatcacccccgaccccaacctctccattgaccaggttggcgtgccccgctccattgctgccaacatgacctttgcggagattgtcacccccttcaacattgacagacttcaagaactagtgcgcagggggaacagccagtacccaggcgccaagtacatcatccgagacaatggtgatcgcattgacttgcgtttccaccccaagcccagtgaccttcacctgcagaccggctataaggtggaacggcacatgtgtgatggggacattgttatcttcaaccggcagccaactctgcacaaaatgtccatgatggggcatcgggtccgcattctcccatggtctacctttcgcttgaatcttagcgtgacaactccgtacaatgcagactttgacggggatgagatgaacttgcacctgccacagtctctggagacgcgagcagagatccaggagctggccatggttcctcgcatgattgtcaccccccagagcaatcggcctgtcatgggtattgtgcaggacacactcacagcagtgcgcaaattcaccaagagagacgtcttcctggagcggggtgaagtgatgaacctcctgatgttcctgtcgacgtgggatgggaaggtcccacagccggccatcctaaagccccggcccctgtggacaggcaagcaaatcttctccctcatcatacctggtcacatcaattgtatccgtacccacagcacccatcccgatgatgaagacagtggcccttacaagcacatctctcctggggacaccaaggtggtggtggagaatggggagctgatcatgggcatcctgtgtaagaagtctctgggcacgtcagctggctccctggtccacatctcctacctagagatgggtcatgacatcactcgcctcttctactccaacattcagactgtcattaacaactggctcctcatcgagggtcatactattggcattggggactccattgctgattctaagacttaccaggacattcagaacactattaagaaggccaagcaggacgtaatagaggtcatcgagaaggcacacaacaatgagctggagcccaccccagggaacactctgcggcagacgtttgagaatcaggtgaaccgcattcttaacgatgcccgagacaagactggctcctctgctcagaaatccctgtctgaatacaacaacttcaagtctatggtcgtgtccggagctaaaggttccaagattaacatctcccaggtcattgctgtcgttggacagcagaacgtcgagggcaagcggattccatttggcttcaagcaccggactctgcctcacttcatcaaggatgactacgggcctgagagccgtggctttgtggagaactcctacctagccggcctcacacccactgagttctttttccacgccatggggggtcgtgaggggctcattgacacggctgtcaagactgctgagactggatacatccagcggcggctgatcaagtccatggagtcagtgatggtgaagtacgacgcgactgtgcggaactccatcaaccaggtggtgcagctgcgctacggcgaagacggcctggcaggcgagagcgttgagttccagaacctggctacgcttaagccttccaacaaggcttttgagaagaagttccgctttgattataccaatgagagggccctgcggcgcactctgcaggaggacctggtgaaggacgtgctgagcaacgcacacatccagaacgagttggagcgggaatttgagcggatgcgggaggatcgggaggtgctcagggtcatcttcccaactggagacagcaaggtcgtcctcccctgtaacctgctgcggatgatctggaatgctcagaaaatcttccacatcaacccacgccttccctccgacctgcaccccatcaaagtggtggagggagtcaaggaattgagcaagaagctggtgattgtgaatggggatgacccactaagtcgacaggcccaggaaaatgccacgctgctcttcaacatccacctgcggtccacgttgtgttcccgccgcatggcagaggagtttcggctcagtggggaggccttcgactggctgcttggggagattgagtccaagttcaaccaagccattgcgcatcccggggaaatggtgggggctctggctgcgcagtcccttggagaacctgccacccagatgaccttgaataccttccactatgctggtgtgtctgccaagaatgtgacgctgggtgtgccccgacttaaggagctcatcaacatttccaagaagccaaagactccttcgcttactgtcttcctgttgggccagtccgctcgagatgctgagagagccaaggatattctgtgccgtctggagcatacaacgttgaggaaggtgactgccaacacagccatctactatgaccccaacccccagagcacggtggtggcagaggatcaggaatgggtgaatgtctactatgaaatgcctgactttgatgtggcccgaatctccccctggctgttgcgggtggagctggatcggaagcacatgactgaccggaagctcaccatggagcagattgctgaaaagatcaatgctggttttggtgacgacttgaactgcatctttaatgatgacaatgcagagaagctggtgctccgtattcgcatcatgaacagcgatgagaacaagatgcaagaggaggaagaggtggtggacaagatggatgatgatgtcttcctgcgctgcatcgagtccaacatgctgacagatatgaccctgcagggcatcgagcagatcagcaaggtgtacatgcacttgccacagacagacaacaagaagaagatcatcatcacggaggatggggaattcaaggccctgcaggagtggatcctggagacggacggcgtgagcttgatgcgggtgctgagtgagaaggacgtggaccccgtacgcaccacgtccaatgacattgtggagatcttcacggtgctgggcattgaagccgtgcggaaggccctggagcgggagctgtaccacgtcatctcctttgatggctcctatgtcaattaccgacacttggctctcttgtgtgataccatgacctgtcgtggccacttgatggccatcacccgacacggagtcaaccgccaggacacaggaccactcatgaagtgttcctttgaggaaacggtggacgtgcttatggaagcagccgcacacggtgagagtgaccccatgaagggggtctctgagaatatcatgctgggccagctggctccggccggcactggctgctttgacctcctgcttgatgcagagaagtgcaagtatggcatggagatccccaccaatatccccggcctgggggctgctggacccaccggcatgttctttggttcagcacccagtcccatgggtggaatctctcctgccatgacaccttggaaccagggtgcaacccctgcctatggcgcctggtcccccagtgttgggagtggaatgaccccaggggcagccggcttctctcccagtgctgcgtcagatgccagcggcttcagcccaggttactcccctgcctggtctcccacaccgggctccccggggtccccaggtccctcaagcccctacatcccttcaccaggtggtgccatgtctcccagctactcgccaacgtcacctgcctacgagccccgctctcctgggggctacacaccccagagtccctcttattcccccacttcaccctcctactcccctacctgggttaggtctacctggccaggtagacctaactacttcaggtgatttgtaatctctaggccataggaaatgggataatgtaggcttttgatgcaatggattggactttgtaaaggtgaagcttcaagctatctacttagggtgcctggggactttgaagagttatagaactatggtgcagctgcagtggcctttctgtaaatgtactactttctgttcacacatctcaccctgggtaggtctaccctacctgggttagtctaccaggggtcgcgc

SEQ ID NO: 357162 - DNA, 3791 bp, Homo sapiens
gagagcgcggccgggacggttggagaagaaggcggctccccggaagggggagagacaaactgccgtaacctctgccgttcaggaacccggttacttatttattcgttaccctttttcttcttcctcccccaaaaaccttttccttttcccttctttttttttcctttttgggagctgaaaaatttccggtaagggaaagaagggctcctttcgctccttatttcgccgcctccttccctccgccaccttcccctcctccggctttttcctcccaactcggggaggtccttcccggtggccgccctgacgaggtctgagcacctaggcggaggcggcgcaggctttttgtagtgaggtttgcgcctgcgcaggcgcctgcctccgccatgcacgggggtggccccccctcgggggacagcgcatgcccgctgcgcaccatcaagagagtccagttcggagtcctgagtccggatgaactgaagcgaatgtctgtgacggagggtggcatcaaatacccagagacgactgagggaggccgccccaagcttggggggctgatggacccgaggcagggggtgattgagcggactggccgctgccaaacatgtgcaggaaacatgacagagtgtcctggccactttggccacattgaactggccaagcctgtgtttcacgtgggcttcctggtgaagacaatgaaagttttgcgctgtgtctgcttcttctgctccaaactgcttgtggactctaacaacccaaagatcaaggatatcctggctaagtccaagggacagcccaagaagcggctcacacatgtctacgacctttgcaagggcaaaaacatatgcgagggtggggaggagatggacaacaagttcggtgtggaacaacctgagggtgacgaggatctgaccaaagaaaagggccatggtggctgtgggcggtaccagcccaggatccggcgttctggcctagagctgtatgcggaatggaagcacgttaatgaggactctcaggagaagaagatcctgctgagtccagagcgagtgcatgagatcttcaaacgcatctcagatgaggagtgttttgtgctgggcatggagccccgctatgcacggccagagtggatgattgtcacagtgctgcctgtgcccccgctctccgtgcggcctgctgttgtgatgcagggctctgcccgtaaccaggatgacctgactcacaaactggctgacatcgtgaagatcaacaatcagctgcggcgcaatgagcagaacggcgcagcggcccatgtcattgcagaggatgtgaagctcctccagttccatgtggccaccatggtggacaatgagctgcctggcttgccccgtgccatgcagaagtctgggcgtcccctcaagtccctgaagcagcggttgaagggcaaggaaggccgggtgcgagggaacctgatgggcaaaagagtggacttctcggcccgtactgtcatcacccccgaccccaacctctccattgaccaggttggcgtgccccgctccattgctgccaacatgacctttgcggagattgtcacccccttcaacattgacagacttcaagaactagtgcgcagggggaacagccagtacccaggcgccaagtacatcatccgagacaatggtgatcgcattgacttgcgtttccaccccaagcccagtgaccttcacctgcagaccggctataaggtggaacggcacatgtgtgatggggacattgttatcttcaaccggcagccaactctgcacaaaatgtccatgatggggcatcgggtccgcattctcccatggtctacctttcgcttgaatcttagcgtgacaactccgtacaatgcagactttgacggggatgagatgaacttgcacctgccacagtctctggagacgcgagcagagatccaggagctggccatggttcctcgcatgattgtcaccccccagagcaatcggcctgtcatgggtattgtgcaggacacactcacagcagtgcgcaaattcaccaagagagacgtcttcctggagcggggtgaagtgatgaacctcctgatgttcctgtcgacgtgggatgggaaggtcccacagccggccatcctaaagccccggcccctgtggacaggcaagcaaatcttctccctcatcatacctggtcacatcaattgtatccgtacccacagcacccatcccgatgatgaagacagtggcccttacaagcacatctctcctggggacaccaaggtggtggtggagaatggggagctgatcatgggcatcctgtgtaagaagtctctgggcacgtcagctggctccctggtccacatctcctacctagagatgggtcatgacatcactcgcctcttctactccaacattcagactgtcattaacaactggctcctcatcgagggtcatactattggcattggggactccattgctgattctaagacttaccaggacattcagaacactattaagaaggccaagcaggacgtaatagaggtcatcgagaaggcacacaacaatgagctggagcccaccccagggaacactctgcggcagacgtttgagaatcaggtgaaccgcattcttaacgatgcccgagacaagactggctcctctgctcagaaatccctgtctgaatacaacaacttcaagtctatggtcgtgtccggagctaaaggttccaagattaacatctcccaggtcattgctgtcgttggacagcagaacgtcgagggcaagcggattccatttggcttcaagcaccggactctgcctcacttcatcaaggatgactacgggcctgagagccgtggctttgtggagaactcctacctagccggcctcacacccactgagttctttttccacgccatggggggtcgtgaggggctcattgacacggctgtcaagactgctgagactggatacatccagcggcggctgatcaagtccatggagtcagtgatggtgaagtacgacgcgactgtgcggaactccatcaaccaggtggtgcagctgcgctacggcgaagacggcctggcaggcgagagcgttgagttccagaacctggctacgcttaagccttccaacaaggcttttgagaagaagttccgctttgattataccaatgagagggccctgcggcgcactctgcaggaggacctggtgaaggacgtgctgagcaacgcacacatccagaacgagttggagcgggaatttgagcggatgcgggaggatcgggaggtgctcagggtcatcttcccaactggagacagcaaggtcgtcctcccctgtaacctgctgcggatgatctggaatgctcagaaaatcttccacatcaacccacgccttccctccgacctgcaccccatcaaagtggtggagggagtcaaggaattgagcaagaagctggtgattgtgaatggggatgacccactaagtcgacaggcccaggaaaatgccacgctgctcttcaacatccacctgcggtccacgttgtgttcccgccgcatggcagaggagtttcggctcagtggggaggccttcgactggctgcttggggagattgagtccaagttcaaccaagccattgtgagtgttgtgctcttcacagcagtcttcttttcctccttttacctgttgacttctgtggtttccaagagcagcccacttctgtccacaacctacagaataggttctgtaggttctgtcccacctaataatagctctcattcatggagagactgcttgtacctt

SEQ ID NO: 357163 - DNA, 2486 bp, Homo sapiens
gagagcgcggccgggacggttggagaagaaggcggctccccggaagggggagagacaaactgccgtaacctctgccgttcaggaacccggttacttatttattcgttaccctttttcttcttcctcccccaaaaaccttttccttttcccttctttttttttcctttttgggagctgaaaaatttccggtaagggaaagaagggctcctttcgctccttatttcgccgcctccttccctccgccaccttcccctcctccggctttttcctcccaactcggggaggtccttcccggtggccgccctgacgaggtctgagcacctaggcggaggcggcgcaggctttttgtagtgaggtttgcgcctgcgcaggcgcctgcctccgccatgcacgggggtggccccccctcgggggacagcgcatgcccgctgcgcaccatcaagagagtccagttcggagtcctgagtccggatgaactgaagcgaatgtctgtgacggagggtggcatcaaatacccagagacgactgagggaggccgccccaagcttggggggctgatggacccgaggcagggggtgattgagcggactggccgctgccaaacatgtgcaggaaacatgacagagtgtcctggccactttggccacattgaactggccaagcctgtgtttcacgtgggcttcctggtgaagacaatgaaagttttgcgctgtgtctgcttcttctgctccaaactgcttgtggactctaacaacccaaagatcaaggatatcctggctaagtccaagggacagcccaagaagcggctcacacatgtctacgacctttgcaagggcaaaaacatatgcgagggtggggaggagatggacaacaagttcggtgtggaacaacctgagggtgacgaggatctgaccaaagaaaagggccatggtggctgtgggcggtaccagcccaggatccggcgttctggcctagagctgtatgcggaatggaagcacgttaatgaggactctcaggagaagaagatcctgctgagtccagagcgagtgcatgagatcttcaaacgcatctcagatgaggagtgttttgtgctgggcatggagccccgctatgcacggccagagtggatgattgtcacagtgctgcctgtgcccccgctctccgtgcggcctgctgttgtgatgcagggctctgcccgtaaccaggatgacctgactcacaaactggctgacatcgtgaagatcaacaatcagctgcggcgcaatgagcagaacggcgcagcggcccatgtcattgcagaggatgtgaagctcctccagttccatgtggccaccatggtggacaatgagctgcctggcttgccccgtgccatgcagaagtctgggcgtcccctcaagtccctgaagcagcggttgaagggcaaggaaggccgggtgcgagggaacctgatgggcaaaagagtggacttctcggcccgtactgtcatcacccccgaccccaacctctccattgaccaggttggcgtgccccgctccattgctgccaacatgacctttgcggagattgtcacccccttcaacattgacagacttcaagaactagtgcgcagggggaacagccagtacccaggcgccaagtacatcatccgagacaatggtgatcgcattgacttgcgtttccaccccaagcccagtgaccttcacctgcagaccggctataaggtggaacggcacatgtgtgatggggacattgttatcttcaaccggcagccaactctgcacaaaatgtccatgatggggcatcgggtccgcattctcccatggtctacctttcgcttgaatcttagcgtgacaactccgtacaatgcagactttgacggggatgagatgaacttgcacctgccacagtctctggagacgcgagcagagatccaggagctggccatggttcctcgcatgattgtcaccccccagagcaatcggcctgtcatgggtattgtgcaggacacactcacagcagtgcgcaaattcaccaagagagacgtcttcctggagcggggtgaagtgatgaacctcctgatgttcctgtcgacgtgggatgggaaggtcccacagccggccatcctaaagccccggcccctgtggacaggcaagcaaatcttctccctcatcatacctggtcacatcaattgtatccgtacccacagcacccatcccgatgatgaagacagtggcccttacaagcacatctctcctggggacaccaaggtggtggtggagaatggggagctgatcatgggcatcctgtgtaagaagtctctgggcacgtcagctggctccctggtccacatctcctacctagagatgggtcatgacatcactcgcctcttctactccaacattcagactgtcattaacaactggctcctcatcgagggtcatactattggcattggggctacagctattgttgtgtgccttctcgat

SEQ ID NO: 357164 - DNA, 2214 bp, Homo sapiens
gagagcgcggccgggacggttggagaagaaggcggctccccggaagggggagagacaaactgccgtaacctctgccgttcaggaacccggttacttatttattcgttaccctttttcttcttcctcccccaaaaaccttttccttttcccttctttttttttcctttttgggagctgaaaaatttccggtaagggaaagaagggctcctttcgctccttatttcgccgcctccttccctccgccaccttcccctcctccggctttttcctcccaactcggggaggtccttcccggtggccgccctgacgaggtctgagcacctaggcggaggcggcgcaggctttttgtagtgaggtttgcgcctgcgcaggcgcctgcctccgccatgcacgggggtggccccccctcgggggacagcgcatgcccgctgcgcaccatcaagagagtccagttcggagtcctgagtccggatgaactgaagcgaatgtctgtgacggagggtggcatcaaatacccagagacgactgagggaggccgccccaagcttggggggctgatggacccgaggcagggggtgattgagcggactggccgctgccaaacatgtgcaggaaacatgacagagtgtcctggccactttggccacattgaactggccaagcctgtgtttcacgtgggcttcctggtgaagacaatgaaagttttgcgctgtgtctgcttcttctgctccaaactgcttgtggactctaacaacccaaagatcaaggatatcctggctaagtccaagggacagcccaagaagcggctcacacatgtctacgacctttgcaagggcaaaaacatatgcgagggtggggaggagatggacaacaagttcggtgtggaacaacctgagggtgacgaggatctgaccaaagaaaagggccatggtggctgtgggcggtaccagcccaggatccggcgttctggcctagagctgtatgcggaatggaagcacgttaatgaggactctcaggagaagaagatcctgctgagtccagagcgagtgcatgagatcttcaaacgcatctcagatgaggagtgttttgtgctgggcatggagccccgctatgcacggccagagtggatgattgtcacagtgctgcctgtgcccccgctctccgtgcggcctgctgttgtgatgcagggctctgcccgtaaccaggatgacctgactcacaaactggctgacatcgtgaagatcaacaatcagctgcggcgcaatgagcagaacggcgcagcggcccatgtcattgcagaggatgtgaagctcctccagttccatgtggccaccatggtggacaatgagctgcctggcttgccccgtgccatgcagaagtctgggcgtcccctcaagtccctgaagcagcggttgaagggcaaggaaggccgggtgcgagggaacctgatgggcaaaagagtggacttctcggcccgtactgtcatcacccccgaccccaacctctccattgaccaggttggcgtgccccgctccattgctgccaacatgacctttgcggagattgtcacccccttcaacattgacagacttcaagaactagtgcgcagggggaacagccagtacccaggcgccaagtacatcatccgagacaatggtgatcgcattgacttgcgtttccaccccaagcccagtgaccttcacctgcagaccggctataaggtggaacggcacatgtgtgatggggacattgttatcttcaaccggcagccaactctgcacaaaatgtccatgatggggcatcgggtccgcattctcccatggtctacctttcgcttgaatcttagcgtgacaactccgtacaatgcagactttgacggggatgagatgaacttgcacctgccacagtctctggagacgcgagcagagatccaggagctggccatggttcctcgcatgattgtcaccccccagagcaatcggcctgtcatgggtattgtgcaggacacactcacagcagtgcgcaaattcaccaagagagacgtcttcctggagcggggtgaagtgatgaacctcctgatgttcctgtcgacgtgggatgggaaggtcccacagccggccatcctaaagccccggcccctgtggacaggcaagcaaatcttctccctcatcatacctggtcacatccgtactgcccgggtacgagctgatatta

SEQ ID NO: 357165 - DNA, 1681 bp, Homo sapiens
gagagcgcggccgggacggttggagaagaaggcggctccccggaagggggagagacaaactgccgtaacctctgccgttcaggaacccggttacttatttattcgttaccctttttcttcttcctcccccaaaaaccttttccttttcccttctttttttttcctttttgggagctgaaaaatttccggtaagggaaagaagggctcctttcgctccttatttcgccgcctccttccctccgccaccttcccctcctccggctttttcctcccaactcggggaggtccttcccggtggccgccctgacgaggtctgagcacctaggcggaggcggcgcaggctttttgtagtgaggtttgcgcctgcgcaggcgcctgcctccgccatgcacgggggtggccccccctcgggggacagcgcatgcccgctgcgcaccatcaagagagtccagttcggagtcctgagtccggatgaactgaagcgaatgtctgtgacggagggtggcatcaaatacccagagacgactgagggaggccgccccaagcttggggggctgatggacccgaggcagggggtgattgagcggactggccgctgccaaacatgtgcaggaaacatgacagagtgtcctggccactttggccacattgaactggccaagcctgtgtttcacgtgggcttcctggtgaagacaatgaaagttttgcgctgtgtctgcttcttctgctccaaactgcttgtggactctaacaacccaaagatcaaggatatcctggctaagtccaagggacagcccaagaagcggctcacacatgtctacgacctttgcaagggcaaaaacatatgcgagggtggggaggagatggacaacaagttcggtgtggaacaacctgagggtgacgaggatctgaccaaagaaaagggccatggtggctgtgggcggtaccagcccaggatccggcgttctggcctagagctgtatgcggaatggaagcacgttaatgaggactctcaggagaagaagatcctgctgagtccagagcgagtgcatgagatcttcaaacgcatctcagatgaggagtgttttgtgctgggcatggagccccgctatgcacggccagagtggatgattgtcacagtgctgcctgtgcccccgctctccgtgcggcctgctgttgtgatgcagggctctgcccgtaaccaggatgacctgactcacaaactggctgacatcgtgaagatcaacaatcagctgcggcgcaatgagcagaacggcgcagcggcccatgtcattgcagaggatgtgaagctcctccagttccatgtggccaccatggtggacaatgagctgcctggcttgccccgtgccatgcagaagtctgggcgtcccctcaagtccctgaagcagcggttgaagggcaaggaaggccgggtgcgagggaacctgatgggcaaaagagtggacttctcggcccgtactgtcatcacccccgaccccaacctctccattgaccaggttggcgtgccccgctccattgctgccaacatgacctttgcggagattgtcacccccttcaacattgacagacttcaagaactagtgcgcagggggaacagccaggcagctcgttgtccaccatggtggccacatggaactggaggagcttcacatcctctaca

SEQ ID NO: 357166 - DNA, 338 bp, Homo sapiens
caggtgctgtgtgtggaggggtctcatggggccggtctgctctgttcaggtggacgtgcttatggaagcagccgcacacggtgagagtgaccccatgaagggggtctctgagaatatcatgctgggccagctggctccggccggcactggctgctttgacctcctgcttgatgcagagaagtgcaagtatggcatggagatccccaccaatatccccggcctgggggctgctggacgtgagtatgaggccccagctgcggtacctgcttgcgtcggcgaggcgggggggcaggccatgggtgcaagggtgtcaccagtccatgattgctgttcttgct

SEQ ID NO: 357167 - DNA, 361 bp, Homo sapiens
gggagcacagctgggccagctggcagcagtgcatgcacctcctgtcccacacaccccacatgctgctcttcctgcccttgcacctccctccttagcccatgcctccctgtgctggatgtgtcaggagtgtccaagtagcagaagccatctctggctcaagagcaccattagacctgccaggtctggctgagcctcatgtgtattcgctacagccttccctctggatgccactgtctccagcaaaggtttcggccaattgatttccaggttggtctcacttggggattacatccggctgggctgccaaccagagccctgacagctggagcaggactcttgtctacaaggagtgggcccacac

SEQ ID NO: 357168 - DNA, 2015 bp, Homo sapiens
tttttttcagtgttacattaaaaagacgtttatgaaagcaatttataaagccctagtgggagaccgagattggtgttaatgtaactggagtaagggctgctccgattgctgcagaaattcgacattagccttcaccgcacctgcggagcagcgggagccaggtgagcagcaatttcccctcagggacttcctccgcgttctccgcattttctgtcggcggaactgaatcccaacagtagaaaaacgtggctccgcccatcacctttcctttaaaggacgcggggtgaagccccgcccactacggagagcgaaggggactcgccgcagatccgctgtacttgcgtccgctacagtatgtcaatcgcttgccccagcacagtgggctccgtggcttaagacttgaaccaagtaaacgaagttctcttactgagaagtctcagtttcaaaagagcttctcctcatcaactggggatgattacagttcttcctaaaaaagcctacttgatgtgaagacaatgaggatgaagacctttatggtgatccacttccacttaatagatggctgctctttttctaaagaggttaacactacaaactgtaaagtctgaaaatagttgcattagatgttttggtaaacacatcctgcaaaagacagcaccagcacagttgtcccctattgcttctgccccaagactctccttcctaattcatgcaaaagcctttagtaccgctgaagacacccagaatgaaggaaaaaagacaaaaaagaataaaacagcttttagtaacgttggaagaaaaattagtcagcgagttattcacttatttgatgagaagggcaatgatttgggaaacatgcaccgagcaaatgtgattagacttatggatgagcgagacctgcgactggttcaaaggaacaccagcacagaacctgcagagtatcagctcatgacaggattgcagatcctccaggagcggcagaggctgagggagatggagaaggcgaaccccaaaactggaccaaccctgagaaaggaactgattttgtcttcaaatattggacaacatgatttggacacaaagactaaacagattcagcagtggattaagaaaaaacacctagtccagattaccataaagaaaggaaaaaatgtagacgtgtcagaaaatgaaatggaggagatatttcatcaaatactccagactatgcctggaatagctacattctcatctaggccacaagctgttcaaggaggaaaagctttaatgtgtgttcttcgtgctttgagcaaaaatgaggagaaggcatataaagaaactcaagagacccaggaaagagacactttgaacaaagaccatggaaatgataaggaatcaaatgttctgcatcagtaattttaataaagaaaagcatgctctgagagaaaaaaaagctcgctccttggtctgcagtcctttaaacaaagcagtgcagttcttagccaagggtaagtactgcaactgtcgagagcatcttgtcttccacacagttgggtgactctccgttttgacacaaagataagccttgcccttgtttccttttgggagggatatatccactgagatgagaggccaaactccgtttttcacgagattttttgactttgagcttcattttcttcttgtcaggatcatgtacaacagcatgcctagtgagactttgtttcattgcaaatgttttgccacagccagcatgttcacacacaaaagggcggctttcctcatggaaggagaggatatggctttggagattaaacacagttgtataggttcttccacagccttctcttggacagcgacataatcccttctggggcatgagtttatgtgttgcttaaggaacttgcgttaaagttttccggcaacttcacatggattcctttgaatgagttcaaatgttcccatgctaagctgagtctgtgccatagcaaaccatgatatagcaagtctccagaatgtgtacgaatcaatactcc

SEQ ID NO: 357169 - DNA, 529 bp, Homo sapiens
tttttttcagtgttacattaaaaagacgtttatgaaagcaatttataaagccctagtgggagaccgagattggtgttaatgtaactggagtaagggctgctccgattgctgcagaaattcgacattagccttcaccgcacctgcggagcagcgggagccaggtgagcagcaatttcccctcagggacttcctccgcgttctccgcattttctgtcggcggaactgaatcccaacagtagaaaaacgtggctccgcccatcacctttcctttaaaggacgcggggtgaagccccgcccactacggagagcgaaggggactcgccgcagatccgctgtacttgcgtccgctacagtatgtcaatcgcttgccccagcacaggtaatgctaaatatgaggcgtgcggagcggtgcgcggaccggcatcgggagggcgtggccttagggggcgcccctgtggaggaggcacccggaaggtcagggctaccccgtcccgccggtaccgagggcggagaggctccgcaggtcctg

SEQ ID NO: 357170 - DNA, 367 bp, Homo sapiens
ggatgggagaactggcttagtttggaaggtaatcagaagaatgcgctaaggatctggcgtttcctaaaccaaggacgagagtactgtatttcaaaaaccgaatggccagtgtggcctaggcataaagaagaaactggagaggtgggaagggccttttggcctggcgaaggtgtagatctttaatctcggggcagttttatttaaggtgaggaaggtcctgggtgtagtgaccgcagtgcagtgggaactggttgccagggctcaagccgagttaggagactggcaggaatccaaacgaggtggtcgatgttttaaactgacggtggtgacagtggatacggagaggactggatggattcgagtgggg

SEQ ID NO: 357171 - DNA, 395 bp, Homo sapiens
cgcagtacgtcgctacgtcccgtctctagccctggcgctccgccggtcccgttctgcagctgtcattcttctctacagaagagcttctcctcatcaactggggatgattacagttcttcctaaaaaaggtaggataaatgctcagttctttttatttaattagcaattttcaaagtaaaaaatcaatataatagtcccatgcagttgtggcaaattatcattttcatagatttttgtatattcagtatattgaaatgaatgacagtgattatgccttactgtttaaattacaccaaaattgaccagtgggagtctcttcatgctgccaaactgtaaatgacatgtaaacaaacaaaatcataataccatcatggaaatctgaaagctaaatattt

SEQ ID NO: 357172 - DNA, 1906 bp, Homo sapiens
tttttttcagtgttacattaaaaagacgtttatgaaagcaatttataaagccctagtgggagaccgagattggtgttaatgtaactggagtaagggctgctccgattgctgcagaaattcgacattagccttcaccgcacctgcggagcagcgggagccaggtgagcagcaatttcccctcagggacttcctccgcgttctccgcattttctgtcggcggaactgaatcccaacagtagaaaaacgtggctccgcccatcacctttcctttaaaggacgcggggtgaagccccgcccactacggagagcgaaggggactcgccgcagatccgctgtacttgcgtccgctacagtatgtcaatcgcttgccccagcacagctgtcattcttctctacagaagagcttctcctcatcaactggggatgattacagttcttcctaaaaaaggatggctgctctttttctaaagaggttaacactacaaactgtaaagtctgaaaatagttgcattagatgttttggtaaacacatcctgcaaaagacagcaccagcacagttgtcccctattgcttctgccccaagactctccttcctaattcatgcaaaagcctttagtaccgctgaagacacccagaatgaaggaaaaaagacaaaaaagaataaaacagcttttagtaacgttggaagaaaaattagtcagcgagttattcacttatttgatgagaagggcaatgatttgggaaacatgcaccgagcaaatgtgattagacttatggatgagcgagacctgcgactggttcaaaggaacaccagcacagaacctgcagagtatcagctcatgacaggattgcagatcctccaggagcggcagaggctgagggagatggagaaggcgaaccccaaaactggaccaaccctgagaaaggaactgattttgtcttcaaatattggacaacatgatttggacacaaagactaaacagattcagcagtggattaagaaaaaacacctagtccagattaccataaagaaaggaaaaaatgtagacgtgtcagaaaatgaaatggaggagatatttcatcaaatactccagactatgcctggaatagctacattctcatctaggccacaagctgttcaaggaggaaaagctttaatgtgtgttcttcgtgctttgagcaaaaatgaggagaaggcatataaagaaactcaagagacccaggaaagagacactttgaacaaagaccatggaaatgataaggaatcaaatgttctgcatcagtaattttaataaagaaaagcatgctctgagagaaaaaaaagctcgctccttggtctgcagtcctttaaacaaagcagtgcagttcttagccaagggtaagtactgcaactgtcgagagcatcttgtcttccacacagttgggtgactctccgttttgacacaaagataagccttgcccttgtttccttttgggagggatatatccactgagatgagaggccaaactccgtttttcacgagattttttgactttgagcttcattttcttcttgtcaggatcatgtacaacagcatgcctagtgagactttgtttcattgcaaatgttttgccacagccagcatgttcacacacaaaagggcggctttcctcatggaaggagaggatatggctttggagattaaacacagttgtataggttcttccacagccttctcttggacagcgacataatcccttctggggcatgagtttatgtgttgcttaaggaacttgcgttaaagttttccggcaacttcacatggattcctttgaatgagttcaaatgttcccatgctaagctgagtctgtgccatagcaaaccatgatatagcaagtctccagaatgtgtacgaatcaatactcc

SEQ ID NO: 357173 - DNA, 1132 bp, Homo sapiens
aggcgaagggcgcctgcgcaggacatgctggacaaatgcgttgttcttgctgcctgctgttgcgggaggaggccttatgggggaaggtcgcgaagtgactgggattttttttctcatttgtcatttagtgggctccgtggcttaagacttgaaccaagtaaacgaagttctcttactgagaagtctcagtttcaactgtcattcttctctacagaagagcttctcctcatcaactggggatgattacagttcttcctaaaaaaggatggctgctctttttctaaagaggttaacactacaaactgtaaagtctgaaaatagttgcattagatgttttggtaaacacatcctgcaaaagacagcaccagcacagttgtcccctattgcttctgccccaagactctccttcctaattcatgcaaaagcctttagtaccgctgaagacacccagaatgaaggaaaaaagacaaaaaagaataaaacagcttttagtaacgttggaagaaaaattagtcagcgagttattcacttatttgatgagaagggcaatgatttgggaaacatgcaccgagcaaatgtgattagacttatggatgagcgagacctgcgactggttcaaaggaacaccagcacagaacctgcagagtatcagctcatgacaggattgcagatcctccaggagcggcagaggctgagggagatggagaaggcgaaccccaaaactggaccaaccctgagaaaggaactgattttgtcttcaaatattggacaacatgatttggacacaaagactaaacagattcagcagtggattaagaaaaaacacctagtccagattaccataaagaaaggaaaaaatgtagacgtgtcagaaaatgaaatggaggagatatttcatcaaatactccagactatgcctggaatagctacattctcatctaggccacaagctgttcaaggaggaaaagctttaatgtgtgttcttcgtgctttgagcaaaaatgaggagaaggcatataaagaaactcaagagacccaggaaagagacactttgaacaaagaccatggaaatgataaggaatcaaatgttctgcatcagtaattttaataaagaaaagcatgctctgagaga

SEQ ID NO: 357174 - DNA, 1748 bp, Homo sapiens
cagttaattatattagaagtttatcaattggtgtttatgaatcaccaagcattttatgtactgcatcctcataaataaacccctaagatgacactcgcttttggagttggcactacaagatgcatgagaaatacagttgatcctagaacaacacaggtttgaactgcatggggtccacatatatgtggattttcctccacctttgccacccctgagagaagaccaacccctcctcttgctcctcctcctcagcctacttgatgtgaagacaatgaggatgaagacctttatggtgatccacttccacttaatagtaaatatattttctcttctttatgattttcttaatgacatttcttttctctagcttgctgtattgtaagaatacagtatataatacatatggcatacaaaatatgtgttaatcaactgcttatgttattcataaggctttcagtcaacagtaagctattagtaagtttttgaggagtcaaagttatacacagattttcaactgcacagggggtctgtttccctaactcccaagttgttcaggggtcaactaagtagtcaaatgagatcatgtgtacagaaaaaaaaaaaaagtgaaaccaaaatgctatgtaaatctggtttattctaatagccacttgtcttggggacagtatcaccatgagttagtctggccagagtcacctgctagtccgctttatcagtgtagacttcctgtgtgtggatctgaaagtctagagaacagcatttccctcacacttgcagttacagcctccacaacctcacacacaccctgccatgtaccacaatgtcagaccaagggaataagtgattgaattttaatgaactcttcttactactttcttaggatggctgctctttttctaaagaggttaacactacaaactgtaaagtctgaaaatagttgcattagatgttttggtaaacacatcctgcaaaagacagcaccagcacagttgtcccctattgcttctgccccaagactctccttcctaattcatgcaaaagcctttagtaccgctgaagacacccagaatgaaggaaaaaagacaaaaaagaataaaacagcttttagtaacgttggaagaaaaattagtcagcgagttattcacttatttgatgagaagggcaatgatttgggaaacatgcaccgagcaaatgtgattagacttatggatgagcgagacctgcgactggttcaaaggaacaccagcacagaacctgcagagtatcagctcatgacaggattgcagatcctccaggagcggcagaggctgagggagatggagaaggcgaaccccaaaactggaccaaccctgagaaaggaactgattttgtcttcaaatattggacaacatgatttggacacaaagactaaacagattcagcagtggattaagaaaaaacacctagtccagattaccataaagaaaggaaaaaatgtagacgtgtcagaaaatgaaatggaggagatatttcatcaaatactccagactatgcctggaatagctacattctcatctaggccacaagctgttcaaggaggaaaagctttaatgtgtgttcttcgtgctttgagcaaaaatgaggagaaggcatataaagaaactcaagagacccaggaaagagacactttgaacaaagaccatggaaatgataaggaatcaaatgttctgcatcagtaattttaataaagaaaagcatgctctgagaga

SEQ ID NO: 357175 - DNA, 1203 bp, Homo sapiens
tttttttcagtgttacattaaaaagacgtttatgaaagcaatttataaagccctagtgggagaccgagattggtgttaatgtaactggagtaagggctgctccgattgctgcagaaattcgacattagccttcaccgcacctgcggagcagcgggagccaggtgagcagcaatttcccctcagggacttcctccgcgttctccgcattttctgtcggcggaactgaatcccaacagtagaaaaacgtggctccgcccatcacctttcctttaaaggacgcggggtgaagccccgcccactacggagagcgaaggggactcgccgcagatccgctgtacttgcgtccgctacagtatgtcaatcgcttgccccagcacagctgtcattcttctctacagaagagcttctcctcatcaactggggatgattacagttcttcctaaaaaaggatggctgctctttttctaaagaggttaacactacaaactgtaaagtctgaaaatagttgcattagatgttttggtaaacacatcctgcaaaagacagcaccagcacagttgtcccctattgcttctgccccaagactctccttcctaattcatgcaaaagcctttagtaccgctgaagacacccagaatgaaggaaaaaagacaaaaaagaataaaacagcttttagtaacgttggaagaaaaattagtcagcgagttattcacttatttgatgagaagggcaatgatttgggaaacatgcaccgagcaaatgtgattagacttatggatgagcgagacctgcgactggttcaaaggaacaccagcacagaacctgcagagtatcagctcatgacaggattgcagatcctccaggagcggcagaggctgagggagatggagaaggcgaaccccaaaactggaccaaccctgagaaaggaactgattttgtcttcaaatattggacaacatgatttggacacaaagactaaacagattcagcagtggattaagaaaaaacacctagtccagattaccataaagaaaggaaaaaatgtagacgtgtcagaaaatgaaatgcaaaaatgaggagaaggcatataaagaaactcaagagacccaggaaagagacactttgaacaaagaccatggaaatgataaggaatcaaatgttctgcatcagtaattttaataaagaaaagcatgctctgagaga

SEQ ID NO: 357176 - DNA, 1377 bp, Homo sapiens
tttttttcagtgttacattaaaaagacgtttatgaaagcaatttataaagccctagtgggagaccgagattggtgttaatgtaactggagtaagggctgctccgattgctgcagaaattcgacattagccttcaccgcacctgcggagcagcgggagccaggtgagcagcaatttcccctcagggacttcctccgcgttctccgcattttctgtcggcggaactgaatcccaacagtagaaaaacgtggctccgcccatcacctttcctttaaaggacgcggggtgaagccccgcccactacggagagcgaaggggactcgccgcagatccgctgtacttgcgtccgctacagtatgtcaatcgcttgccccagcacagctgtcattcttctctacagaagagcttctcctcatcaactggggatgattacagttcttcctaaaaaagcctacttgatgtgaagacaatgaggatgaagacctttatggtgatccacttccacttaatagatggctgctctttttctaaagaggttaacactacaaactgtaaagtctgaaaatagttgcattagatgttttggtaaacacatcctgcaaaagacagcaccagcacagttgtcccctattgcttctgccccaagactctccttcctaattcatgcaaaagcctttagtaccgctgaagacacccagaatgaaggaaaaaagacaaaaaagaataaaacagcttttagtaacgttggaagaaaaattagtcagcgagttattcacttatttgatgagaagggcaatgatttgggaaacatgcaccgagcaaatgtgattagacttatggatgagcgagacctgcgactggttcaaaggaacaccagcacagaacctgcagagtatcagctcatgacaggattgcagatcctccaggagcggcagaggctgagggagatggagaaggcgaaccccaaaactggaccaaccctgagaaaggaactgattttgtcttcaaatattggacaacatgatttggacacaaagactaaacagattcagcagtggattaagaaaaaacacctagtccagattaccataaagaaaggaaaaaatgtagacgtgtcagaaaatgaaatggaggagatatttcatcaaatactccagactatgcctggaatagctacattctcatctaggccacaagctgttcaaggaggaaaagctttaatgtgtgttcttcgtgctttgagcaaaaatgaggagaaggcatataaagaaactcaagagacccaggaaagagacactttgaacaaagaccatggaaatgataaggaatcaaatgttctgcatcagtaattttaataaagaaaagcatgctctgagaga

SEQ ID NO: 357177 - DNA, 1244 bp, Homo sapiens
tttttttcagtgttacattaaaaagacgtttatgaaagcaatttataaagccctagtgggagaccgagattggtgttaatgtaactggagtaagggctgctccgattgctgcagaaattcgacattagccttcaccgcacctgcggagcagcgggagccaggtgagcagcaatttcccctcagggacttcctccgcgttctccgcattttctgtcggcggaactgaatcccaacagtagaaaaacgtggctccgcccatcacctttcctttaaaggacgcggggtgaagccccgcccactacggagagcgaaggggactcgccgcagatccgctgtacttgcgtccgctacagtatgtcaatcgcttgccccagcacagaagagcttctcctcatcaactggggatgattacagttcttcctaaaaaaggatggctgctctttttctaaagaggttaacactacaaactgtaaagtctgaaaatagttgcattagatgttttggtaaacacatcctgcaaaagacagcaccagcacagttgtcccctattgcttctgccccaagactctccttcctaattcatgcaaaagcctttagtaccgctgaagacacccagaatgaaggaaaaaagacaaaaaagaataaaacagcttttagtaacgttggaagaaaaaatgcaccgagcaaatgtgattagacttatggatgagcgagacctgcgactggttcaaaggaacaccagcacagaacctgcagagtatcagctcatgacaggattgcagatcctccaggagcggcagaggctgagggagatggagaaggcgaaccccaaaactggaccaaccctgagaaaggaactgattttgtcttcaaatattggacaacatgatttggacacaaagactaaacagattcagcagtggattaagaaaaaacacctagtccagattaccataaagaaaggaaaaaatgtagacgtgtcagaaaatgaaatggaggagatatttcatcaaatactccagactatgcctggaatagctacattctcatctaggccacaagctgttcaaggaggaaaagctttaatgtgtgttcttcgtgctttgagcaaaaatgaggagaaggcatataaagaaactcaagagacccaggaaagagacactttgaacaaagaccatggaaatgataaggaatcaaatgttctgcatcagtaattttaataaagaaaagcatgctctgagaga

SEQ ID NO: 357178 - DNA, 1280 bp, Homo sapiens
cgcagtacgtcgctacgtcccgtctctagccctggcgctccgccggtcccgttctgcaggtgggcgtcgccgccgacttaccaacaaccgggtcgggggctcccggaagtgctcttgcggcttactgcctggcacagtgggctccgtggcttaagacttgaaccaagtaaacgaagttctcttactgagaagtctcagtttcaactgtcattcttctctacagaagagcttctcctcatcaactggggatgattacagttcttcctaaaaaaggatggctgctctttttctaaagaggttaacactacaaactgtaaagtctgaaaatagttgcattagatgttttggtaaacacatcctgcaaaagacagcaccagcacagttgtcccctattgcttctgccccaagactctccttcctaattcatgcaaaagcctttagtaccgctgaagacacccagaatgaaggaaaaaagacaaaaaagaataaaacagcttttagtaacgttggaagaaaaattagtcagcgagttattcacttatttgatgagaagggcaatgatttgggaaacatgcaccgagcaaatgtgattagacttatggatgagcgagacctgcgactggttcaaaggaacaccagcacagaacctgcagagtatcagctcatgacaggattgcagatcctccaggagcggcagaggctgagggagatggagaaggcgaaccccaaaactggtaggtattttgctgttggctccctgaatcctttaagagctacaaatcagcagtttaaattctagcatttgtcaaggtgcctgtgacaagagggaaatgagaaactagaaaattcatgattcaaccaccattcccagtgtctgtctttcctcctttatcctgcacttactcctgttccctttttttcactgtttttccacaataccctgcccattatctcttccctttaaacctgtgtaaaatgtgggagaaaccaggcaaacaaaccaaagtgaagagaactctttcccctgtcctgtggccttctcccaatgccgcagcaagctgtagtagccgatggggtgaaacagagtgagattaggaggggtacattcaagttccctgccctctgccgggccactcatttaacctccctccttttgtttttcttccccttcttcaactctaaagtggaggtgtttggttaattatctggaagcacctttttatttttttgagatgagtcactgcactccagcctgggtgacagagcaagactccgtctca

SEQ ID NO: 357179 - DNA, 376 bp, Homo sapiens
ctccgtggcttaagacttgaaccaagtaaacgaagttctcttactgagaagtctcagtttcaagtacgtgttgtgaaaggcctaagtcttagaaaagtagaggatggagagaagaatctgaaaatcgactactattcattctgtcaggcacaacacagtaacgaataagtccattttgttcctgcttcgtagagtttacggtctagtgatggagaacagcagtgctaagatcatcacaaaactgtaattgtaatgaatgttttaaaggaaaggtcaactggactgtagaagcattcagtgttaagctcagtaaattgggggagggatgggagaactggcttagtttggaaggtaatcagaagaatgcgctaaggat

SEQ ID NO: 357180 - DNA, 1316 bp, Homo sapiens
tttttttcagtgttacattaaaaagacgtttatgaaagcaatttataaagccctagtgggagaccgagattggtgttaatgtaactggagtaagggctgctccgattgctgcagaaattcgacattagccttcaccgcacctgcggagcagcgggagccaggtgagcagcaatttcccctcagggacttcctccgcgttctccgcattttctgtcggcggaactgaatcccaacagtagaaaaacgtggctccgcccatcacctttcctttaaaggacgcggggtgaagccccgcccactacggagagcgaaggggactcgccgcagatccgctgtacttgcgtccgctacagtatgtcaatcgcttgccccagcacagctgtcattcttctctacagaagagcttctcctcatcaactggggatgattacagttcttcctaaaaaaggatggctgctctttttctaaagaggttaacactacaaactgtaaagtctgaaaatagttgcattagatgttttggtaaacacatcctgcaaaagacagcaccagcacagttgtcccctattgcttctgccccaagactctccttcctaattcatgcaaaagcctttagtaccgctgaagacacccagaatgaaggaaaaaagacaaaaaagaataaaacagcttttagtaacgttggaagaaaaattagtcagcgagttattcacttatttgatgagaagggcaatgatttgggaaacatgcaccgagcaaatgtgattagacttatggatgagcgagacctgcgactggttcaaaggaacaccagcacagaacctgcagagtatcagctcatgacaggattgcagatcctccaggagcggcagaggctgagggagatggagaaggcgaaccccaaaactggaccaaccctgagaaaggaactgattttgtcttcaaatattggacaacatgatttggacacaaagactaaacagattcagcagtggattaagaaaaaacacctagtccagattaccataaagaaaggaaaaaatgtagacgtgtcagaaaatgaaatggaggagatatttcatcaaatactccagactatgcctggaatagctacattctcatctaggccacaagctgttcaaggaggaaaagctttaatgtgtgttcttcgtgctttgagcaaaaatgaggagaaggcatataaagaaactcaagagacccaggaaagagacactttgaacaaagaccatggaaatgataaggaatcaaatgttctgcatcagtaattttaataaagaaaagcatgctctgagaga

SEQ ID NO: 357181 - DNA, 943 bp, Homo sapiens
  misc_feature (767)..(767): n is a, c, g, or t
  misc_feature (771)..(771): n is a, c, g, or t
  misc_feature (786)..(786): n is a, c, g, or t
  misc_feature (806)..(806): n is a, c, g, or t
cgcagtacgtcgctacgtcccgtctctagccctggcgctccgccggtcccgttctgcagctgtcattcttctctacagaagagcttctcctcatcaactggggatgattacagttcttcctaaaaaaggatggctgctctttttctaaagaggttaacactacaaactgtaaagtctgaaaatagttgcattagatgttttggtaaacacatcctgcaaaagacagcaccagcacagttgtcccctattgcttctgccccaagactctccttcctaattcatgcaaaagcctttagtaccgctgaagacacccagaatgaaggaaaaaagacaaaaaagaataaaacagcttttagtaacgttggaagaaaaattagtcagcgagttattcacttatttgatgagaagggcaatgatttgggaaacatgcaccgagcaaatgtgattagacttatggatgagcgagacctgcgactggttcaaaggaacaccagcacagaacctgcagagtatcagctcatgacaggattgcagatcctccaggagcggcagaggctgagggagatggagaaggcgaaccccaaaactggaccaaccctgagaaaggaactgattttgtcttcaaatattggacaacatgatttggacacaaagactaaacagattcagcagtggattaagaaaaaacacctagtccagattaccataaagaaaggaaaaaatgtagacgtgtcagaaaatgaaatggggaatatttattcaaatantccngaattggctggatantaatttcatttaggacaagngtcagggggaaagctttagtgtgtctccgggcttgggcacaaggggagaggtttgaaaccgagacccggaaaccttgacacttgtgtggcacagttcgccgtttaaaaacgcgcgaaaaaaatcggggggcagggat

SEQ ID NO: 357182 - DNA, 1074 bp, Homo sapiens
cgcagtacgtcgctacgtcccgtctctagccctggcgctccgccggtcccgttctgcaggtgggcgtcgccgccgacttaccaacaaccgggtcgggggctcccggaagtgctcttgcggcttactgcctggcacagctgtcattcttctctacagaagagcttctcctcatcaactggggatgattacagttcttcctaaaaaaggatggctgctctttttctaaagaggttaacactacaaactgtaaagtctgaaaatagttgcattagatgttttggtaaacacatcctgcaaaagacagcaccagcacagttgtcccctattgcttctgccccaagactctccttcctaattcatgcaaaagcctttagtaccgctgaagacacccagaatgaaggaaaaaagacaaaaaagaataaaacagcttttagtaacgttggaagaaaaattagtcagcgagttattcacttatttgatgagaagggcaatgatttgggaaacatgcaccgagcaaatgtgattagacttatggatgagcgagacctgcgactggttcaaaggaacaccagcacagaacctgcagagtatcagctcatgacaggattgcagatcctccaggagcggcagaggctgagggagatggagaaggcgaaccccaaaactggaccaaccctgagaaaggaactgattttgtcttcaaatattggacaacatgatttggacacaaagactaaacagattcagcagtggattaagaaaaaacacctagtccagattaccataaagaaaggaaaaaatgtagacgtgtcagaaaatgaaatggaggagatatttcatcaaatactccagactatgcctggaatagctacattctcatctaggccacaagctgttcaaggaggaaaagctttaatgtgtgttcttcgtgctttgagcaaaaatgaggagaaggcatataaagaaactcaagagacccaggaaagagacactttgaacaaagaccatggaaatgataaggaatcaaatgttctgcatcagtaattttaataaagaaaagcatgctctgagaga

SEQ ID NO: 357183 - DNA, 996 bp, Homo sapiens
cgcagtacgtcgctacgtcccgtctctagccctggcgctccgccggtcccgttctgcagctgtcattcttctctacagaagagcttctcctcatcaactggggatgattacagttcttcctaaaaaaggatggctgctctttttctaaagaggttaacactacaaactgtaaagtctgaaaatagttgcattagatgttttggtaaacacatcctgcaaaagacagcaccagcacagttgtcccctattgcttctgccccaagactctccttcctaattcatgcaaaagcctttagtaccgctgaagacacccagaatgaaggaaaaaagacaaaaaagaataaaacagcttttagtaacgttggaagaaaaattagtcagcgagttattcacttatttgatgagaagggcaatgatttgggaaacatgcaccgagcaaatgtgattagacttatggatgagcgagacctgcgactggttcaaaggaacaccagcacagaacctgcagagtatcagctcatgacaggattgcagatcctccaggagcggcagaggctgagggagatggagaaggcgaaccccaaaactggaccaaccctgagaaaggaactgattttgtcttcaaatattggacaacatgatttggacacaaagactaaacagattcagcagtggattaagaaaaaacacctagtccagattaccataaagaaaggaaaaaatgtagacgtgtcagaaaatgaaatggaggagatatttcatcaaatactccagactatgcctggaatagctacattctcatctaggccacaagctgttcaaggaggaaaagctttaatgtgtgttcttcgtgctttgagcaaaaatgaggagaaggcatataaagaaactcaagagacccaggaaagagacactttgaacaaagaccatggaaatgataaggaatcaaatgttctgcatcagtaattttaataaagaaaagcatgctctgagaga

SEQ ID NO: 357184 - DNA, 1793 bp, Homo sapiens
tttttttcagtgttacattaaaaagacgtttatgaaagcaatttataaagccctagtgggagaccgagattggtgttaatgtaactggagtaagggctgctccgattgctgcagaaattcgacattagccttcaccgcacctgcggagcagcgggagccaggtgagcagcaatttcccctcagggacttcctccgcgttctccgcattttctgtcggcggaactgaatcccaacagtagaaaaacgtggctccgcccatcacctttcctttaaaggacgcggggtgaagccccgcccactacggagagcgaaggggactcgccgcagatccgctgtacttgcgtccgctacagtatgtcaatcgcttgccccagcacagctgtcattcttctctacagaagagcttctcctcatcaactggggatgattacagttcttcctaaaaaaggatggctgctctttttctaaagaggttaacactacaaactgtaaagtctgaaaatagttgcattagatgttttggtaaacacatcctgcaaaagacagcaccagcacagttgtcccctattgcttctgccccaagactctccttcctaattcatgcaaaagcctttagtaccgctgaagacacccagaatgaaggaaaaaagacaaaaaagaataaaacagcttttagtaacgttggaagaaaaattagtcagcgagttattcacttatttgatgagaagggcaatgatttgggaaacatgcaccgagcaaatgtgattagacttatggatgagcgagacctgcgactggttcaaaggaacaccagcacagaacctgcagagtatcagctcatgacaggattgcagatcctccaggagcggcagaggctgagggagatggagaaggcgaaccccaaaactggaccaaccctgagaaaggaactgattttgtcttcaaatattggacaacatgatttggacacaaagactaaacagattcagcagtggattaagaaaaaacacctagtccagattaccataaagaaaggaaaaaatgtagacgtgtcagaaaatgaaatgcaaaaatgaggagaaggcatataaagaaactcaagagacccaggaaagagacactttgaacaaagaccatggaaatgataaggaatcaaatgttctgcatcagtaattttaataaagaaaagcatgctctgagagaaaaaaaagctcgctccttggtctgcagtcctttaaacaaagcagtgcagttcttagccaagggtaagtactgcaactgtcgagagcatcttgtcttccacacagttgggtgactctccgttttgacacaaagataagccttgcccttgtttccttttgggagggatatatccactgagatgagaggccaaactccgtttttcacgagattttttgactttgagcttcattttcttcttgtcaggatcatgtacaacagcatgcctagtgagactttgtttcattgcaaatgttttgccacagccagcatgttcacacacaaaagggcggctttcctcatggaaggagaggatatggctttggagattaaacacagttgtataggttcttccacagccttctcttggacagcgacataatcccttctggggcatgagtttatgtgttgcttaaggaacttgcgttaaagttttccggcaacttcacatggattcctttgaatgagttcaaatgttcccatgctaagctgagtctgtgccatagcaaaccatgatatagcaagtctccagaatgtgtacgaatcaatactcc

SEQ ID NO: 357185 - DNA, 1038 bp, Homo sapiens
cgcagtacgtcgctacgtcccgtctctagccctggcgctccgccggtcccgttctgcagaagagcttctcctcatcaactggggatgattacagttcttcctaaaaaagcctacttgatgtgaagacaatgaggatgaagacctttatggtgatccacttccacttaatagatggctgctctttttctaaagaggttaacactacaaactgtaaagtctgaaaatagttgcattagatgttttggtaaacacatcctgcaaaagacagcaccagcacagttgtcccctattgcttctgccccaagactctccttcctaattcatgcaaaagcctttagtaccgctgaagacacccagaatgaaggaaaaaagacaaaaaagaataaaacagcttttagtaacgttggaagaaaaattagtcagcgagttattcacttatttgatgagaagggcaatgatttgggaaacatgcaccgagcaaatgtgattagacttatggatgagcgagacctgcgactggttcaaaggaacaccagcacagaacctgcagagtatcagctcatgacaggattgcagatcctccaggagcggcagaggctgagggagatggagaaggcgaaccccaaaactggaccaaccctgagaaaggaactgattttgtcttcaaatattggacaacatgatttggacacaaagactaaacagattcagcagtggattaagaaaaaacacctagtccagattaccataaagaaaggaaaaaatgtagacgtgtcagaaaatgaaatggaggagatatttcatcaaatactccagactatgcctggaatagctacattctcatctaggccacaagctgttcaaggaggaaaagctttaatgtgtgttcttcgtgctttgagcaaaaatgaggagaaggcatataaagaaactcaagagacccaggaaagagacactttgaacaaagaccatggaaatgataaggaatcaaatgttctgcatcagtaattttaataaagaaaagcatgctctgagaga

SEQ ID NO: 357186 - DNA, 1455 bp, Homo sapiens
tttttttcagtgttacattaaaaagacgtttatgaaagcaatttataaagccctagtgggagaccgagattggtgttaatgtaactggagtaagggctgctccgattgctgcagaaattcgacattagccttcaccgcacctgcggagcagcgggagccaggtgagcagcaatttcccctcagggacttcctccgcgttctccgcattttctgtcggcggaactgaatcccaacagtagaaaaacgtggctccgcccatcacctttcctttaaaggacgcggggtgaagccccgcccactacggagagcgaaggggactcgccgcagatccgctgtacttgcgtccgctacagtatgtcaatcgcttgccccagcacagctgtcattcttctctacagaagagcttctcctcatcaactggggatgattacagttcttcctaaaaaaggatggctgctctttttctaaagaggttaacactacaaactgtaaagtctgaaaatagttgcattagatgttttggtaaacacatcctgcaaaagacagcaccagcacagttgtcccctattgcttctgccccaagactctccttcctaattcatgcaaaagcctttagtaccgctgaagacacccagaatgaaggaaaaaagacaaaaaagaataaaacagcttttagtaacgttggaagaaaaattagtcagcgagttattcacttatttgatgagaagggcaatgatttgggaaacatgcaccgagcaaatgtgattagacttatggatgagcgagacctgcgactggttcaaaggaacaccagcacagaacctgcagagtatcagctcatgacaggattgcagatcctccaggagcggcagaggctgagggagatggagaaggcgaaccccaaaactggtaggtattttgctgttggctccctgaatcctttaagagctacaaatcagcagtttaaattctagcatttgtcaaggtgcctgtgacaagagggaaatgagaaactagaaaattcatgattcaaccaccattcccagtgtctgtctttcctcctttatcctgcacttactcctgttccctttttttcactgtttttccacaataccctgcccattatctcttccctttaaacctgtgtaaaatgtgggagaaaccaggcaaacaaaccaaagtgaagagaactctttcccctgtcctgtggccttctcccaatgccgcagcaagctgtagtagccgatggggtgaaacagagtgagattaggaggggtacattcaagttccctgccctctgccgggccactcatttaacctccctccttttgtttttcttccccttcttcaactctaaagtggaggtgtttggttaattatctggaagcacctttttatttttttgagatgagtcactgcactccagcctgggtgacagagcaagactccgtctca

SEQ ID NO: 357187 - DNA, 2898 bp, Homo sapiens
  misc_feature (21)..(21): n is a, c, g, or t
ggacagggagctgaagacgcngaggtggtggctgcggcctttgaacaagtaagtgagccaccctcggagacccccgcgctggggacgggaggccggcgagcctcgggacctctgaaagccttgaggaggcgcggggacaccatggccgagcctctgaaggaggaagacggcgaggacggctctgcggagccccccgggcccgtgaaggccgaacccgcccacaccgctgcctctgtagcggccaagaacctggccctgcttaaagcccgctccttcgatgtgacctttgacgtgggcgacgagtacgagatcatcgagaccataggcaacggggcctatggagtggtgtcctccgcccgccgccgcctcaccggccagcaggtggccatcaagaagatccctaatgctttcgatgtggtgaccaatgccaagcggaccctcagggagctgaagatcctcaagcactttaaacacgacaacatcatcgccatcaaggacatcctgaggcccaccgtgccctatggcgaattcaaatctgtctacgtggtcctggacctgatggaaagcgacctgcaccagatcatccactcctcacagcccctcacactggaacacgtgcgctacttcctgtaccaactgctgcggggcctgaagtacatgcactcggctcaggtcatccaccgtgacctgaagccctccaacctattggtgaatgagaactgtgagctcaagattggtgactttggtatggctcgtggcctgtgcacctcgcccgctgaacatcagtacttcatgactgagtatgtggccacgcgctggtaccgtgcgcccgagctcatgctctctttgcatgagtatacacaggctattgacctctggtctgtgggctgcatctttggtgagatgctggcccggcgccagctcttcccaggcaaaaactatgtacaccagctacagctcatcatgatggtgctgggtaccccatcaccagccgtgattcaggctgtgggggctgagagggtgcgggcctatatccagagcttgccaccacgccagcctgtgccctgggagacagtgtacccaggtgccgaccgccaggccctatcactgctgggtcgcatgctgcgttttgagcccagcgctcgcatctcagcagctgctgcccttcgccaccctttcctggccaagtaccatgatcctgatgatgagcctgactgtgccccgccctttgactttgcctttgaccgcgaagccctcactcgggagcgcattaaggaggccattgtggctgaaattgaggacttccatgcaaggcgtgagggcatccgccaacagatccgcttccagccttctctacagcctgtggctagtgagcctggctgtccagatgttgaaatgcccagtccctgggctcccagtggggactgtgccatggagtctccaccaccagccccgccaccatgccccggccctgcacctgacaccattgatctgaccctgcagccacctccaccagtcagtgagcctgccccaccaaagaaagatggtgccatctcagacaatactaaggctgcccttaaagctgccctgctcaagtctttgaggagccggctcagagatggccccagcgcacccctggaggctcctgagcctcggaagccggtgacagcccaggagcgccagcgggagcgggaggagaagcggcggaggcggcaagaacgagccaaggagcgggagaaacggcggcaggagcgggagcgaaaggaacggggggctggggcctctgggggcccctccactgaccccttggctggactagtgctcagtgacaatgacagaagcctgttggaacgctggactcgaatggcccggcccgcagccccagccctcacctctgtgccggcccctgccccagcgccaacgccaaccccaaccccagtccaacctaccagtcctcctcctggccctgtagcccagcccactggcccgcaaccacaatctgcgggctctacctctggccctgtaccccagcctgcctgcccaccccctggccctgcaccccaccccactggccctcctgggcccatccctgtccccgcgccaccccagattgccacctccaccagcctcctggctgcccagtcacttgtgccaccccctgggctgcctggctccagcaccccaggagttttgccttacttcccacctggcctgccgcccccagacgccgggggagcccctcagtcttccatgtcagagtcacctgatgtcaaccttgtgacccagcagctatctaagtcacaggtggaggaccccctgccccctgtgttctcaggcacaccaaagggcagtggggctggctacggtgttggctttgacctggaggaattcttaaaccagtctttcgacatgggcgtggctgatgggccacaggatggccaggcagattcagcctctctctcagcctccctgcttgctgactggctcgaaggccatggcatgaaccctgccgatattgagtccctgcagcgtgagatccagatggactccccaatgctgctggctgacctgcctgacctccaggacccctgaggcccccagcctgtgccttgctgccacagtagacctagttccaggatccatgggagcattctcaaaggctttagccctggacccagcaggtgaggctcggcttggattattctgcaggttcatctcagacccacctttcagccttaagcagccacctgagccaccaccgagccatggcaggatcgggagaccccaactccccctgaacaatccttttcagtattatatttttattattattatgttattattacactgtctttttgccatcaaaatgaggcctgtgaaatacaaggttcccttctg

SEQ ID NO: 357188 - DNA, 4668 bp, Homo sapiens
gagttttatggtatgttattaaaagttgtttaaaagtgagggacccctccagttattgatatggaatgatcttcaggaaaagagcataatatgctacatttttgtacaccaaaggggaggtaggtacgaatatgcatacatattgcttttttctagaagccgcctaggagtgaaaccaaaattcttcacttcttttcggccctacctcgagctccctttagaaaacctttccttccagctcacagtatccaccatgtccaccttcgcctcccggcactgagccttagaggggcggtgctccataaacatttgctacatgaatgaacgaatcaactatcggattttggggtgggtcgggacagctcggttccagcgagggctccgcccacccgcgggctccgcagaggagcagaggttgggcggccgcctcggttaactccgctgcagcccaaagcacgggaatcgcgggacagacaaacgagcggagggaagatacctagaagccaggaaaccgcgagctgcagtccaacttggccggaagctgcggagaggctcagccaccggaagtcagtggagggttcggccggacgctctagaatcccggaggaccgggatctctgtggttggccgtgacgggcaccctctaccggggatgacacattcccagagctcctgggaccaagcaaatggcggacacaattccctgggcggaaggggacttcgggagccagtagccaagacaccatggccgagcctctgaaggaggaagacggcgaggacggctctgcggagccccccgggcccgtgaaggccgaacccgcccacaccgctgcctctgtagcggccaagaacctggccctgcttaaagcccgctccttcgatgtgacctttgacgtgggcgacgagtacgagatcatcgagaccataggcaacggggcctatggagtggtgtcctccgcccgccgccgcctcaccggccagcaggtggccatcaagaagatccctaatgctttcgatgtggtgaccaatgccaagcggaccctcagggagctgaagatcctcaagcactttaaacacgacaacatcatcgccatcaaggacatcctgaggcccaccgtgccctatggcgaattcaaatctgtctacgtggtcctggacctgatggaaagcgacctgcaccagatcatccactcctcacagcccctcacactggaacacgtgcgctacttcctgtaccaactgctgcggggcctgaagtacatgcactcggctcaggtcatccaccgtgacctgaagccctccaacctattggtgaatgagaactgtgagctcaagattggtgactttggtatggctcgtggcctgtgcacctcgcccgctgaacatcagtacttcatgactgagtatgtggccacgcgctggtaccgtgcgcccgagctcatgctctctttgcatgagtatacacaggctattgacctctggtctgtgggctgcatctttggtgagatgctggcccggcgccagctcttcccaggcaaaaactatgtacaccagctacagctcatcatgatggtgctgggtaccccatcaccagccgtgattcaggctgtgggggctgagagggtgcgggcctatatccagagcttgccaccacgccagcctgtgccctgggagacagtgtacccaggtgccgaccgccaggccctatcactgctgggtcgcatgctgcgttttgagcccagcgctcgcatctcagcagctgctgcccttcgccaccctttcctggccaagtaccatgatcctgatgatgagcctgactgtgccccgccctttgactttgcctttgaccgcgaagccctcactcgggagcgcattaaggaggccattgtggctgaaattgaggacttccatgcaaggcgtgagggcatccgccaacagatccgcttccagccttctctacagcctgtggctagtgagcctggctgtccagatgttgaaatgcccagtccctgggctcccagtggggactgtgccatggagtctccaccaccagccccgccaccatgccccggccctgcacctgacaccattgatctgaccctgcagccacctccaccagtcagtgagcctgccccaccaaagaaagatggtgccatctcagacaatactaaggctgcccttaaagctgccctgctcaagtctttgaggagccggctcagagatggccccagcgcacccctggaggctcctgagcctcggaagccggtgacagcccaggagcgccagcgggagcgggaggagaagcggcggaggcggcaagaacgagccaaggagcgggagaaacggcggcaggagcgggagcgaaaggaacggggggctggggcctctgggggcccctccactgaccccttggctggactagtgctcagtgacaatgacagaagcctgttggaacgctggactcgaatggcccggcccgcagccccagccctcacctctgtgccggcccctgccccagcgccaacgccaaccccaaccccagtccaacctaccagtcctcctcctggccctgtagcccagcccactggcccgcaaccacaatctgcgggctctacctctggccctgtaccccagcctgcctgcccaccccctggccctgcaccccaccccactggccctcctgggcccatccctgtccccgcgccaccccagattgccacctccaccagcctcctggctgcccagtcacttgtgccaccccctgggctgcctggctccagcaccccaggagttttgccttacttcccacctggcctgccgcccccagacgccgggggagcccctcagtcttccatgtcagagtcacctgatgtcaaccttgtgacccagcagctatctaagtcacaggtggaggaccccctgccccctgtgttctcaggcacaccaaagggcagtggggctggctacggtgttggctttgacctggaggaattcttaaaccagtctttcgacatgggcgtggctgatgggccacaggatggccaggcagattcagcctctctctcagcctccctgcttgctgactggctcgaaggccatggcatgaaccctgccgatattgagtccctgcagcgtgagatccagatggactccccaatgctgctggctgacctgcctgacctccaggacccctgaggcccccagcctgtgccttgctgccacagtagacctagttccaggatccatgggagcattctcaaaggctttagccctggacccagcaggtgaggctcggcttggattattctgcaggttcatctcagacccacctttcagccttaagcagccacctgagccaccaccgagccatggcaggatcgggagaccccaactccccctgaacaatccttttcagtattatatttttattattattatgttattattacactgtctttttgccatcaaaatgaggcctgtgaaatacaaggttcccttctgcacctgactccaggtgtaatttttggagttcggggtaggacaccatcagcaggggagcaaggaggagccaggtgcctacatttgggggataaacaaatatgtttgtgtgtatgaagccagttcattcaggttctgaaggtttattgagaccttcagtccctacccactcccagccctgcagagattgtcctctgctccctcatgtggctaaacctctcaacacccagagggtatggggaagacctcatatgcatgcctaccttggctgtggctgtttcagggtggtgtgcggtagctgtgttcttggcatagagcttcaggggctgggatgggccatcaggggaagctgagtatgatagtgaggtgggctggggttccacggtactcaccacaggggagtaagttggtgggagggatgctgaagatgggacatggtttgagagcagcccagaggagtgctgggctgtggcctagaatacaccatgggccctgttcacactgcactgctcagcttagcacactagggtggcccagacaggggtccacagtgaggaagcaggacaagatggaccacaaaggcctgcagctgggagagtggctcctggctgtcagctgttgggacagggtggaggcaactcattctcatggagcccagccaggtccaggctagaaccatgtgcctctcggaagaggcctggggaactgctggcagtgtaacttcaggtgtaggggagccgggtctggcttaggaatggatgccctgggtgtgtgacagggatgtggcatggctgagagccacaaggcccccttgtaaggagttggtgctcgggaatcagcagaagcatgcatcaggggcagcagagggagcactcatggagaccatgggtgtccaggggaggaaaggtgcctgagggggccagcccttcaggcccggcggattttcatctcagtgcgtttgagggagtagtagaagcccttccactgggcccagttgatgccattggcataagagaggtgggagccacctaggtagaagccattgaggttggcaaagtggcagctgcggaaccagaaggctcctgaggagagagctgcgcagttctgcacaaagaggtcctggtcccggtcgaaggtagagaacttctggccactgtggtaggacaggga

SEQ ID NO: 357189 - DNA, 3574 bp, Homo sapiens
  misc_feature (21)..(21): n is a, c, g, or t
ggacagggagctgaagacgcngaggtggtggctgcggcctttgaacaactacgtggtcctggacctgatggaaagcgacctgcaccagatcatccactcctcacagcccctcacactggaacacgtgcgctacttcctgtaccaactgctgcggggcctgaagtacatgcactcggctcaggtcatccaccgtgacctgaagccctccaacctattggtgaatgagaactgtgagctcaagattggtgactttggtatggctcgtggcctgtgcacctcgcccgctgaacatcagtacttcatgactgagtatgtggccacgcgctggtaccgtgcgcccgagctcatgctctctttgcatgagtatacacaggctattgacctctggtctgtgggctgcatctttggtgagatgctggcccggcgccagctcttcccaggcaaaaactatgtacaccagctacagctcatcatgatggtgctgggtaccccatcaccagccgtgattcaggctgtgggggctgagagggtgcgggcctatatccagagcttgccaccacgccagcctgtgccctgggagacagtgtacccaggtgccgaccgccaggccctatcactgctgggtcgcatgctgcgttttgagcccagcgctcgcatctcagcagctgctgcccttcgccaccctttcctggccaagtaccatgatcctgatgatgagcctgactgtgccccgccctttgactttgcctttgaccgcgaagccctcactcgggagcgcattaaggaggccattgtggctgaaattgaggacttccatgcaaggcgtgagggcatccgccaacagatccgcttccagccttctctacagcctgtggctagtgagcctggctgtccagatgttgaaatgcccagtccctgggctcccagtggggactgtgccatggagtctccaccaccagccccgccaccatgccccggccctgcacctgacaccattgatctgaccctgcagccacctccaccagtcagtgagcctgccccaccaaagaaagatggtgccatctcagacaatactaaggctgcccttaaagctgccctgctcaagtctttgaggagccggctcagagatggccccagcgcacccctggaggctcctgagcctcggaagccggtgacagcccaggagcgccagcgggagcgggaggagaagcggcggaggcggcaagaacgagccaaggagcgggagaaacggcggcaggagcgggagcgaaaggaacggggggctggggcctctgggggcccctccactgaccccttggctggactagtgctcagtgacaatgacagaagcctgttggaacgctggactcgaatggcccggcccgcagccccagccctcacctctgtgccggcccctgccccagcgccaacgccaaccccaaccccagtccaacctaccagtcctcctcctggccctgtagcccagcccactggcccgcaaccacaatctgcgggctctacctctggccctgtaccccagcctgcctgcccaccccctggccctgcaccccaccccactggccctcctgggcccatccctgtccccgcgccaccccagattgccacctccaccagcctcctggctgcccagtcacttgtgccaccccctgggctgcctggctccagcaccccaggagttttgccttacttcccacctggcctgccgcccccagacgccgggggagcccctcagtcttccatgtcagagtcacctgatgtcaaccttgtgacccagcagctatctaagtcacaggtggaggaccccctgccccctgtgttctcaggcacaccaaagggcagtggggctggctacggtgttggctttgacctggaggaattcttaaaccagtctttcgacatgggcgtggctgatgggccacaggatggccaggcagattcagcctctctctcagcctccctgcttgctgactggctcgaaggccatggcatgaaccctgccgatattgagtccctgcagcgtgagatccagatggactccccaatgctgctggctgacctgcctgacctccaggacccctgaggcccccagcctgtgccttgctgccacagtagacctagttccaggatccatgggagcattctcaaaggctttagccctggacccagcaggtgaggctcggcttggattattctgcaggttcatctcagacccacctttcagccttaagcagccacctgagccaccaccgagccatggcaggatcgggagaccccaactccccctgaacaatccttttcagtattatatttttattattattatgttattattacactgtctttttgccatcaaaatgaggcctgtgaaatacaaggttcccttctgcacctgactccaggtgtaatttttggagttcggggtaggacaccatcagcaggggagcaaggaggagccaggtgcctacatttgggggataaacaaatatgtttgtgtgtatgaagccagttcattcaggttctgaaggtttattgagaccttcagtccctacccactcccagccctgcagagattgtcctctgctccctcatgtggctaaacctctcaacacccagagggtatggggaagacctcatatgcatgcctaccttggctgtggctgtttcagggtggtgtgcggtagctgtgttcttggcatagagcttcaggggctgggatgggccatcaggggaagctgagtatgatagtgaggtgggctggggttccacggtactcaccacaggggagtaagttggtgggagggatgctgaagatgggacatggtttgagagcagcccagaggagtgctgggctgtggcctagaatacaccatgggccctgttcacactgcactgctcagcttagcacactagggtggcccagacaggggtccacagtgaggaagcaggacaagatggaccacaaaggcctgcagctgggagagtggctcctggctgtcagctgttgggacagggtggaggcaactcattctcatggagcccagccaggtccaggctagaaccatgtgcctctcggaagaggcctggggaactgctggcagtgtaacttcaggtgtaggggagccgggtctggcttaggaatggatgccctgggtgtgtgacagggatgtggcatggctgagagccacaaggcccccttgtaaggagttggtgctcgggaatcagcagaagcatgcatcaggggcagcagagggagcactcatggagaccatgggtgtccaggggaggaaaggtgcctgagggggccagcccttcaggcccggcggattttcatctcagtgcgtttgagggagtagtagaagcccttccactgggcccagttgatgccattggcataagagaggtgggagccacctaggtagaagccattgaggttggcaaagtggcagctgcggaaccagaaggctcctgaggagagagctgcgcagttctgcacaaagaggtcctggtcccggtcgaaggtagagaacttctggccactgtggtaggacaggga

SEQ ID NO: 357190 - DNA, 2929 bp, Homo sapiens
  misc_feature (21)..(21): n is a, c, g, or t
  misc_feature (2899)..(2899): n is a, c, g, or t
ggacagggagctgaagacgcngaggtggtggctgcggcctttgaacaagtaagtgagccaccctcggagacccccgcgctggggacgggaggccggcgagcctcgggacctctgaaagccttgaggaggcgcggggacaccatggccgagcctctgaaggaggaagacggcgaggacggctctgcggagccccccgggcccgtgaaggccgaacccgcccacaccgctgcctctgtagcggccaagaacctggccctgcttaaagcccgctccttcgatgtgacctttgacgtgggcgacgagtacgagatcatcgagaccataggcaacggggcctatggagtggtgtcctccgcccgccgccgcctcaccggccagcaggtggccatcaagaagatccctaatgctttcgatgtggtgaccaatgccaagcggaccctcagggagctgaagatcctcaagcactttaaacacgacaacatcatcgccatcaaggacatcctgaggcccaccgtgccctatggcgaattcaaatctgtctacgtggtcctggacctgatggaaagcgacctgcaccagatcatccactcctcacagcccctcacactggaacacgtgcgctacttcctgtaccaactgctgcggggcctgaagtacatgcactcggctcaggtcatccaccgtgacctgaagccctccaacctattggtgaatgagaactgtgagctcaagattggtgactttggtatggctcgtggcctgtgcacctcgcccgctgaacatcagtacttcatgactgagtatgtggccacgcgctggtaccgtgcgcccgagctcatgctctctttgcatgagtatacacaggctattgacctctggtctgtgggctgcatctttggtgagatgctggcccggcgccagctcttcccaggcaaaaactatgtacaccagctacagctcatcatgatggtgctgggtaccccatcaccagccgtgattcaggctgtgggggctgagagggtgcgggcctatatccagagcttgccaccacgccagcctgtgccctgggagacagtgtacccaggtgccgaccgccaggccctatcactgctgggtcgcatgctgcgttttgagcccagcgctcgcatctcagcagctgctgcccttcgccaccctttcctggccaagtaccatgatcctgatgatgagcctgactgtgccccgccctttgactttgcctttgaccgcgaagccctcactcgggagcgcattaaggaggccattgtggctgaaattgaggacttccatgcaaggcgtgagggcatccgccaacagatccgcttccagccttctctacagcctgtggctagtgagcctggctgtccagatgttgaaatgcccagtccctgggctcccagtggggactgtgccatggagtctccaccaccagccccgccaccatgccccggccctgcacctgacaccattgatctgaccctgcagccacctccaccagtcagtgagcctgccccaccaaagaaagatggtgccatctcagacaatactaaggctgcccttaaagctgccctgctcaagtctttgaggagccggctcagagatggccccagcgcacccctggaggctcctgagcctcggaagccggtgacagcccaggagcgccagcgggagcgggaggagaagcggcggaggcggcaagaacgagccaaggagcgggagaaacggcggcaggagcgggagcgaaaggaacggggggctggggcctctgggggcccctccactgaccccttggctggactagtgctcagtgacaatgacagaagcctgttggaacgctggactcgaatggcccggcccgcagccccagccctcacctctgtgccggcccctgccccagcgccaacgccaaccccaaccccagtccaacctaccagtcctcctcctggccctgtagcccagcccactggcccgcaaccacaatctgcgggctctacctctggccctgtaccccagcctgcctgcccaccccctggccctgcaccccaccccactggccctcctgggcccatccctgtccccgcgccaccccagattgccacctccaccagcctcctggctgcccagtcacttgtgccaccccctgggctgcctggctccagcaccccaggagttttgccttacttcccacctggcctgccgcccccagacgccgggggagcccctcagtcttccatgtcagagtcacctgatgtcaaccttgtgacccagcagctatctaagtcacaggtggaggaccccctgccccctgtgttctcaggcacaccaaagggcagtggggctggctacggtgttggctttgacctggaggaattcttaaaccagtctttcgacatgggcgtggctgatgggccacaggatggccaggcagattcagcctctctctcagcctccctgcttgctgactggctcgaaggccatggcatgaaccctgccgatattgagtccctgcagcgtgagatccagatggactccccaatgctgctggctgacctgcctgacctccaggacccctgaggcccccagcctgtgccttgctgccacagtagacctagttccaggatccatgggagcattctcaaaggctttagccctggacccagcaggtgaggctcggcttggattattctgcaggttcatctcagacccacctttcagccttaagcagccacctgagccaccaccgagccatggcaggatcgggagaccccaactccccctgaacaatccttttcagtattatatttttattattattatgttattattacactgtctttttgccatcaaaatgaggcctgtgaaatacaaggttcccttctgnaaaaaaaaaaaaaaaaacaagaaaaaaaaa

SEQ ID NO: 357191 - DNA, 751 bp, Homo sapiens
cctatatccagagcttgccaccacgccagcctgtgccctgggagacagtgtacccaggtgccgaccgccaggccctatcactgctgggtcgcatgctgcgttttgagcccagcgctcgcatctcagcagctgctgcccttcgccaccctttcctggccaagtaccatgatcctgatgatgagcctgactgtgccccgccctttgactttgcctttgaccgcgaagccctcactcgggagcgcattaaggaggccattgtggctgaaattgaggacttccatgcaaggcgtgagggcatccgccaacagatccgcttccagccttctctacagcctgtggctagtgagcctggctgtccagatgttgaaatgcccagtccctgggctcccagtggggactgtgccatggagtctccaccaccagccccgccaccatgccccggccctgcacctgacaccattgatctgaccctgcagccacctccaccagtcagtgagcctgccccaccaaagaaagatggtgccatctcagacaatactaaggctgcccttaaagctgccctgctcaagtctttgaggagccggctcagaggtgccttgtgggcaggtcgggtgggcagaggggagacttggacttggacaaggcttcaggcttttaccttctcccctgcccaacttccccgcagatggccccagcgcacccctggaggctcctgagcctcggaagccggtgacagcccaggagcgccagc

SEQ ID NO: 357192 - DNA, 3098 bp, Homo sapiens
gagttttatggtatgttattaaaagttgtttaaaagtgagggacccctccagttattgatatggaatgatcttcaggaaaagagcataatatgctacatttttgtacaccaaaggggaggtaggtacgaatatgcatacatattgcttttttctagaagccgcctaggagtgaaaccaaaattcttcacttcttttcggccctacctcgagctccctttagaaaacctttccttccagctcacagtatccaccatgtccaccttcgcctcccggcactgagccttagaggggcggtgctccataaacatttgctacatgaatgaacgaatcaactatcggattttggggtgggtcgggacagctcggttccagcgagggctccgcccacccgcgggctccgcagaggagcagaggttgggcggccgcctcggttaactccgctgcagcccaaagcacgggaatcgcgggacagacaaacgagcggagggaagatacctagaagccaggaaaccgcgagctgcagtccaacttggccggaagctgcggagaggctcagccaccggaagtcagtggagggttcggccggacgctctagaatcccggaggaccgggatctctgtggttggccgtgacgggcaccctctaccggggatgacacattcccagagctcctgggaccaagcaaatggcggacacaattccctgggcggaaggggacttcgggagccagtagccaagctacgtggtcctggacctgatggaaagcgacctgcaccagatcatccactcctcacagcccctcacactggaacacgtgcgctacttcctgtaccaactgctgcggggcctgaagtacatgcactcggctcaggtcatccaccgtgacctgaagccctccaacctattggtgaatgagaactgtgagctcaagattggtgactttggtatggctcgtggcctgtgcacctcgcccgctgaacatcagtacttcatgactgagtatgtggccacgcgctggtaccgtgcgcccgagctcatgctctctttgcatgagtatacacaggctattgacctctggtctgtgggctgcatctttggtgagatgctggcccggcgccagctcttcccaggcaaaaactatgtacaccagctacagctcatcatgatggtgctgggtaccccatcaccagccgtgattcaggctgtgggggctgagagggtgcgggcctatatccagagcttgccaccacgccagcctgtgccctgggagacagtgtacccaggtgccgaccgccaggccctatcactgctgggtcgcatgctgcgttttgagcccagcgctcgcatctcagcagctgctgcccttcgccaccctttcctggccaagtaccatgatcctgatgatgagcctgactgtgccccgccctttgactttgcctttgaccgcgaagccctcactcgggagcgcattaaggaggccattgtggctgaaattgaggacttccatgcaaggcgtgagggcatccgccaacagatccgcttccagccttctctacagcctgtggctagtgagcctggctgtccagatgttgaaatgcccagtccctgggctcccagtggggactgtgccatggagtctccaccaccagccccgccaccatgccccggccctgcacctgacaccattgatctgaccctgcagccacctccaccagtcagtgagcctgccccaccaaagaaagatggtgccatctcagacaatactaaggctgcccttaaagctgccctgctcaagtctttgaggagccggctcagagatggccccagcgcacccctggaggctcctgagcctcggaagccggtgacagcccaggagcgccagcgggagcgggaggagaagcggcggaggcggcaagaacgagccaaggagcgggagaaacggcggcaggagcgggagcgaaaggaacggggggctggggcctctgggggcccctccactgaccccttggctggactagtgctcagtgacaatgacagaagcctgttggaacgctggactcgaatggcccggcccgcagccccagccctcacctctgtgccggcccctgccccagcgccaacgccaaccccaaccccagtccaacctaccagtcctcctcctggccctgtagcccagcccactggcccgcaaccacaatctgcgggctctacctctggccctgtaccccagcctgcctgcccaccccctggccctgcaccccaccccactggccctcctgggcccatccctgtccccgcgccaccccagattgccacctccaccagcctcctggctgcccagtcacttgtgccaccccctgggctgcctggctccagcaccccaggagttttgccttacttcccacctggcctgccgcccccagacgccgggggagcccctcagtcttccatgtcagagtcacctgatgtcaaccttgtgacccagcagctatctaagtcacaggtggaggaccccctgccccctgtgttctcaggcacaccaaagggcagtggggctggctacggtgttggctttgacctggaggaattcttaaaccagtctttcgacatgggcgtggctgatgggccacaggatggccaggcagattcagcctctctctcagcctccctgcttgctgactggctcgaaggccatggcatgaaccctgccgatattgagtccctgcagcgtgagatccagatggactccccaatgctgctggctgacctgcctgacctccaggacccctgaggcccccagcctgtgccttgctgccacagtagacctagttccaggatccatgggagcattctcaaaggctttagccctggacccagcaggtgaggctcggcttggattattctgcaggttcatctcagacccacctttcagccttaagcagccacctgagccaccaccgagccatggcaggatcgggagaccccaactccccctgaacaatccttttcagtattatatttttattattattatgttattattacactgtctttttgccatcaaaatgaggcctgtgaaatacaaggttcccttctg

SEQ ID NO: 357193 - DNA, 2810 bp, Homo sapiens
  misc_feature (21)..(21): n is a, c, g, or t
ggacagggagctgaagacgcngaggtggtggctgcggcctttgaacaaacaccatggccgagcctctgaaggaggaagacggcgaggacggctctgcggagccccccgggcccgtgaaggccgaacccgcccacaccgctgcctctgtagcggccaagaacctggccctgcttaaagcccgctccttcgatgtgacctttgacgtgggcgacgagtacgagatcatcgagaccataggcaacggggcctatggagtggtgtcctccgcccgccgccgcctcaccggccagcaggtggccatcaagaagatccctaatgctttcgatgtggtgaccaatgccaagcggaccctcagggagctgaagatcctcaagcactttaaacacgacaacatcatcgccatcaaggacatcctgaggcccaccgtgccctatggcgaattcaaatctgtctacgtggtcctggacctgatggaaagcgacctgcaccagatcatccactcctcacagcccctcacactggaacacgtgcgctacttcctgtaccaactgctgcggggcctgaagtacatgcactcggctcaggtcatccaccgtgacctgaagccctccaacctattggtgaatgagaactgtgagctcaagattggtgactttggtatggctcgtggcctgtgcacctcgcccgctgaacatcagtacttcatgactgagtatgtggccacgcgctggtaccgtgcgcccgagctcatgctctctttgcatgagtatacacaggctattgacctctggtctgtgggctgcatctttggtgagatgctggcccggcgccagctcttcccaggcaaaaactatgtacaccagctacagctcatcatgatggtgctgggtaccccatcaccagccgtgattcaggctgtgggggctgagagggtgcgggcctatatccagagcttgccaccacgccagcctgtgccctgggagacagtgtacccaggtgccgaccgccaggccctatcactgctgggtcgcatgctgcgttttgagcccagcgctcgcatctcagcagctgctgcccttcgccaccctttcctggccaagtaccatgatcctgatgatgagcctgactgtgccccgccctttgactttgcctttgaccgcgaagccctcactcgggagcgcattaaggaggccattgtggctgaaattgaggacttccatgcaaggcgtgagggcatccgccaacagatccgcttccagccttctctacagcctgtggctagtgagcctggctgtccagatgttgaaatgcccagtccctgggctcccagtggggactgtgccatggagtctccaccaccagccccgccaccatgccccggccctgcacctgacaccattgatctgaccctgcagccacctccaccagtcagtgagcctgccccaccaaagaaagatggtgccatctcagacaatactaaggctgcccttaaagctgccctgctcaagtctttgaggagccggctcagagatggccccagcgcacccctggaggctcctgagcctcggaagccggtgacagcccaggagcgccagcgggagcgggaggagaagcggcggaggcggcaagaacgagccaaggagcgggagaaacggcggcaggagcgggagcgaaaggaacggggggctggggcctctgggggcccctccactgaccccttggctggactagtgctcagtgacaatgacagaagcctgttggaacgctggactcgaatggcccggcccgcagccccagccctcacctctgtgccggcccctgccccagcgccaacgccaaccccaaccccagtccaacctaccagtcctcctcctggccctgtagcccagcccactggcccgcaaccacaatctgcgggctctacctctggccctgtaccccagcctgcctgcccaccccctggccctgcaccccaccccactggccctcctgggcccatccctgtccccgcgccaccccagattgccacctccaccagcctcctggctgcccagtcacttgtgccaccccctgggctgcctggctccagcaccccaggagttttgccttacttcccacctggcctgccgcccccagacgccgggggagcccctcagtcttccatgtcagagtcacctgatgtcaaccttgtgacccagcagctatctaagtcacaggtggaggaccccctgccccctgtgttctcaggcacaccaaagggcagtggggctggctacggtgttggctttgacctggaggaattcttaaaccagtctttcgacatgggcgtggctgatgggccacaggatggccaggcagattcagcctctctctcagcctccctgcttgctgactggctcgaaggccatggcatgaaccctgccgatattgagtccctgcagcgtgagatccagatggactccccaatgctgctggctgacctgcctgacctccaggacccctgaggcccccagcctgtgccttgctgccacagtagacctagttccaggatccatgggagcattctcaaaggctttagccctggacccagcaggtgaggctcggcttggattattctgcaggttcatctcagacccacctttcagccttaagcagccacctgagccaccaccgagccatggcaggatcgggagaccccaactccccctgaacaatccttttcagtattatatttttattattattatgttattattacactgtctttttgccatcaaaatgaggcctgtgaaatacaaggttcccttctg

SEQ ID NO: 357194 - DNA, 4009 bp, Homo sapiens
ctggaaaggcagctgaatctaatctgaagcaggctgggaaaattcccgcagttctaggaccagttctttagagttttgccagggacaactgttattcctcaagaagtgtacagatgattttacagttttatagaatcttagtatataggatgtcaaatgtaggacattcctactatgaccacaccctcctattcccatagcagacttcactaatcaatcacagaacactttcctacagacagtggacaagcctggtcaattttcatcatagttcttcaagctgccactaccaaacaatggagatagccccaaaaggaaacctattggccagccctggtgtagtccaaccccatcttttatctgatggggaaactaggtctggagacaaaagtgatttaaccaagttcatggaaaagtcgtagagaatctaaaacgtgatgctcttcttccataccatgccgtcagcccctatggggtcccaggctacgtggtcctggacctgatggaaagcgacctgcaccagatcatccactcctcacagcccctcacactggaacacgtgcgctacttcctgtaccaactgctgcggggcctgaagtacatgcactcggctcaggtcatccaccgtgacctgaagccctccaacctattggtgaatgagaactgtgagctcaagattggtgactttggtatggctcgtggcctgtgcacctcgcccgctgaacatcagtacttcatgactgagtatgtggccacgcgctggtaccgtgcgcccgagctcatgctctctttgcatgagtatacacaggctattgacctctggtctgtgggctgcatctttggtgagatgctggcccggcgccagctcttcccaggcaaaaactatgtacaccagctacagctcatcatgatggtgctgggtaccccatcaccagccgtgattcaggctgtgggggctgagagggtgcgggcctatatccagagcttgccaccacgccagcctgtgccctgggagacagtgtacccaggtgccgaccgccaggccctatcactgctgggtcgcatgctgcgttttgagcccagcgctcgcatctcagcagctgctgcccttcgccaccctttcctggccaagtaccatgatcctgatgatgagcctgactgtgccccgccctttgactttgcctttgaccgcgaagccctcactcgggagcgcattaaggaggccattgtggctgaaattgaggacttccatgcaaggcgtgagggcatccgccaacagatccgcttccagccttctctacagcctgtggctagtgagcctggctgtccagatgttgaaatgcccagtccctgggctcccagtggggactgtgccatggagtctccaccaccagccccgccaccatgccccggccctgcacctgacaccattgatctgaccctgcagccacctccaccagtcagtgagcctgccccaccaaagaaagatggtgccatctcagacaatactaaggctgcccttaaagctgccctgctcaagtctttgaggagccggctcagagatggccccagcgcacccctggaggctcctgagcctcggaagccggtgacagcccaggagcgccagcgggagcgggaggagaagcggcggaggcggcaagaacgagccaaggagcgggagaaacggcggcaggagcgggagcgaaaggaacggggggctggggcctctgggggcccctccactgaccccttggctggactagtgctcagtgacaatgacagaagcctgttggaacgctggactcgaatggcccggcccgcagccccagccctcacctctgtgccggcccctgccccagcgccaacgccaaccccaaccccagtccaacctaccagtcctcctcctggccctgtagcccagcccactggcccgcaaccacaatctgcgggctctacctctggccctgtaccccagcctgcctgcccaccccctggccctgcaccccaccccactggccctcctgggcccatccctgtccccgcgccaccccagattgccacctccaccagcctcctggctgcccagtcacttgtgccaccccctgggctgcctggctccagcaccccaggagttttgccttacttcccacctggcctgccgcccccagacgccgggggagcccctcagtcttccatgtcagagtcacctgatgtcaaccttgtgacccagcagctatctaagtcacaggtggaggaccccctgccccctgtgttctcaggcacaccaaagggcagtggggctggctacggtgttggctttgacctggaggaattcttaaaccagtctttcgacatgggcgtggctgatgggccacaggatggccaggcagattcagcctctctctcagcctccctgcttgctgactggctcgaaggccatggcatgaaccctgccgatattgagtccctgcagcgtgagatccagatggactccccaatgctgctggctgacctgcctgacctccaggacccctgaggcccccagcctgtgccttgctgccacagtagacctagttccaggatccatgggagcattctcaaaggctttagccctggacccagcaggtgaggctcggcttggattattctgcaggttcatctcagacccacctttcagccttaagcagccacctgagccaccaccgagccatggcaggatcgggagaccccaactccccctgaacaatccttttcagtattatatttttattattattatgttattattacactgtctttttgccatcaaaatgaggcctgtgaaatacaaggttcccttctgcacctgactccaggtgtaatttttggagttcggggtaggacaccatcagcaggggagcaaggaggagccaggtgcctacatttgggggataaacaaatatgtttgtgtgtatgaagccagttcattcaggttctgaaggtttattgagaccttcagtccctacccactcccagccctgcagagattgtcctctgctccctcatgtggctaaacctctcaacacccagagggtatggggaagacctcatatgcatgcctaccttggctgtggctgtttcagggtggtgtgcggtagctgtgttcttggcatagagcttcaggggctgggatgggccatcaggggaagctgagtatgatagtgaggtgggctggggttccacggtactcaccacaggggagtaagttggtgggagggatgctgaagatgggacatggtttgagagcagcccagaggagtgctgggctgtggcctagaatacaccatgggccctgttcacactgcactgctcagcttagcacactagggtggcccagacaggggtccacagtgaggaagcaggacaagatggaccacaaaggcctgcagctgggagagtggctcctggctgtcagctgttgggacagggtggaggcaactcattctcatggagcccagccaggtccaggctagaaccatgtgcctctcggaagaggcctggggaactgctggcagtgtaacttcaggtgtaggggagccgggtctggcttaggaatggatgccctgggtgtgtgacagggatgtggcatggctgagagccacaaggcccccttgtaaggagttggtgctcgggaatcagcagaagcatgcatcaggggcagcagagggagcactcatggagaccatgggtgtccaggggaggaaaggtgcctgagggggccagcccttcaggcccggcggattttcatctcagtgcgtttgagggagtagtagaagcccttccactgggcccagttgatgccattggcataagagaggtgggagccacctaggtagaagccattgaggttggcaaagtggcagctgcggaaccagaaggctcctgaggagagagctgcgcagttctgcacaaagaggtcctggtcccggtcgaaggtagagaacttctggccactgtggtaggacaggga

SEQ ID NO: 357195 - DNA, 486 bp, Homo sapiens
gtacacaaatgtgtgcatgcacatacacacacacacacatacacacacacacacacattcccctttttaattaaaatgaggaaaacacacttggagagccataatttcattttataagccaagaagctaggactaaattgtggtttttttcacccttctaagttgactttttttcctgcttctctcatgacatagtagtcattttttacttaacgaaaatctgatgtaatgaaatgacattttacaagctttaaatgaagcaaatgtttgaattctctttaagtggccttgttcttttgctttcaaaagtaaaatatgttttgttttgtgttatttagcactgggcgtttcaagtttttaatagctttattgagattttgagagagaattcacatgacatacaagtcacccatttaaattggacaattcaatgattgttagtatattcacaacattgtgcagtcattactactcaattttggagca

SEQ ID NO: 357196 - DNA, 1061 bp, Homo sapiens
tgccatagcaaaataaccctcaggcatctgagcatttggagaaacagcagagcttggattgtagtatttaaatgtcaagggatatgcaagcaaagaaaacataggtctctaagggagtatactgtcatattttaaattcattgcataagcatccaaacatagctctagattttattggtgatcttcatgattttttttataattttgagaataaaaaatatggatactttttttaaaatttagggaataaaaaaatataaggatcctagttctagctgaacattcctcctacccttaaccacctcccatacacactgcaagtggagggctgcccagcttctcgattttcaccctgtgtcagtggggtgaggtgcactcttgacgttggacaaggaagaaatcatgggaccgggggaaccaggaaggaagcttgttcatccgtgggaagattaaactttcattctgagcatatgactgcatcacagctttttgtttctgttcttcttgcagttaagatccttctattctacgtaatattttatggctgcctggctggcatcttcatcggaaccatccaagtgatgctgctcaccatcagtgaatttaagcccacatatcaggaccgagtggccccgccaggtaaaatccacatgaatagcttcatttccttcagagatagcatgggtgtcactttttctattgagaaaaaattctttggaaaattactctataatgtagttttaaagcaaccatgaaaagggaaaagagaaacttctctcggctgcagccagatgtcctacccgcattgcaggcagagctcccacgggttgcagacatcttatttgcccagttctagagtgagggtgaagcgtcctggttcttggccagcctgctacccaccagctatgtgactgtgaacagattgagttctgatgggggcctctgtcttctcatttttcatattctagggtttggttagtgggatcctttccagaccttttcaactctaacagacatttttttacttcttgaggggggctatgactcaggtaaattctttt

SEQ ID NO: 357197 - DNA, 283 bp, Homo sapiens
caagcttttctccagaggagacccccttaggcagtcctgcagtgctgctctgcagcatcgcttctcatctgttgacgcagcaattagctatgctggagagggctgagcaggcacaggcacgcacacccacgtgcatgcccacggacatgcaagcgtgcacacacacgcatgctcatggatatacacacacactcaggctaccaagccctggccctgatttgaccctgcttgccttgctgcctgcccagtggtgtaatggaaaagtctcttcttcacatccgcc

SEQ ID NO: 357198 - DNA, 3006 bp, Homo sapiens
ctcgaggctccgggcgacccaggtgcggatcccccagccacggaaggggcggttcacgcccagccgggagctgggagggggctgcgcggcgctgcctgcgcgtccctcaccgccgcccccgcctcctcctcgccccgcgcccaacgccccgcgcccagcgatccaagcggcccctctagccccggcggctcctttgtgccggccccgaacccgccctctcgggccgagtccctgcccctggcgccggcgattggccaccgggccgctagagggcggggcgcacggccgccggggcgcggtatatagtaaaggtagggcgggcgcagcggaattcctcggctcctggcgggagtgccggtggcgccccgcagtccgcttgtccgtccttccctctctgactctcctaccccgggcctgtctctgcagaggtcaggggaggcgggggcccagcacacgtccccagtggcagcgggagcggcagctacgggttcgcggagcccccgaccccccaagggctagaggagcgctcggcggaccaaagaaagcccgcgagcggctgcgcgcccaccaataggtgcggggctcggagccgcgcagcctgcgccgtccctccctccggccccgccccgccgccgccgccgccgccgcctccccctcctcctgctcctgccttggctcctccgccgcgcgtctcgcactccgagagccgcagcggcagcggcgcgtcctgcctgcagagagccaggccggagaagccgagcggcgcagaggacgccagggcgcgcgccgcagccacccaccctccggaccgcggcagctgctgacccgccatcgccatggcccgcgggaaagccaaggaggagggcagctggaagaaattcatctggaactcagagaagaaggagtttctgggcaggaccggtggcagttggtttaagatccttctattctacgtaatattttatggctgcctggctggcatcttcatcggaaccatccaagtgatgctgctcaccatcagtgaatttaagcccacatatcaggaccgagtggccccgccaggattaacacagattcctcagatccagaagactgaaatttcctttcgtcctaatgatcccaagagctatgaggcatatgtactgaacatagttaggttcctggaaaagtacaaagattcagcccagagggatgacatgatttttgaagattgtggcgatgtgcccagtgaaccgaaagaacgaggagactttaatcatgaacgaggagagcgaaaggtctgcagattcaagcttgaatggctgggaaattgctctggattaaatgatgaaacttatggctacaaagagggcaaaccgtgcattattataaagctcaaccgagttctaggcttcaaacctaagcctcccaagaatgagtccttggagacttacccagtgatgaagtataacccaaatgtccttcccgttcagtgcactggcaagcgagatgaagataaggataaagttggaaatgtggagtattttggactgggcaactcccctggttttcctctgcagtattatccgtactatggcaaactcctgcagcccaaatacctgcagcccctgctggccgtacagttcaccaatcttaccatggacactgaaattcgcatagagtgtaaggcgtacggtgagaacattgggtacagtgagaaagaccgttttcagggacgttttgatgtaaaaattgaagttaagagctgatcacaagcacaaatctttcccactagccatttaataagttaaaaaaagatacaaaaacaaaaacctactagtcttgaacaaactgtcatacgtatgggacctacacttaatctatatgctttacactagctttctgcatttaataggttagaatgtaaattaaagtgtagcaatagcaacaaaatatttattctactgtaaatgacaaaagaaaaagaaaaattgagccttgggacgtgcccatttttactgtaaattatgattccgtaactgacttgtagtaagcagtgtttctggcccctaagtattgctgccttgtgtattttatttagtgtacagtactacaggtgcatactctggtcatttttcaagccatgttttattgtatctgttttctactttatgtgagcaaggtttgctgtccaaggtgtaaatattcaacgggaataaaactggcatggtaatttttttttttgtttgttttttgttttttggctctttcaaaggtaatggcccatcgatgagcatttttaacatactccatagtcttttcctgtggtgttaggtctttatttttatttttttcctgggggctggggtgggggtttgtcatgggggaactgccctttaaattttaagtgacactacagaaaaacacaaaaaggtgatgggttgtgttatgcttgtattgaatgctgtcttgacatctcttgccttgtcctccggtatgttctaaagctgtgtctgagatctggatctgcccatcactttggctagtgacagggctaattaatttgctttatacattttcttttactttccttttttcctttctggaggcatcacatgctggtgctgtgtctttatgaatgttttaaccattttcatggtggaagaattttatatttatgcagttgtacaattttatttttttctgcaagaaaaagtgtaatgtatgaaataaaccaaagtcacttgtttgaaaataaatctttattttgaactttataaaaagcaatgcagtaccccatagactggtgttaaatgttgtctacagtgcaaaatccatgttctaacatatgtaataattgccaggagtacagtgctcttgttgatcttgtattcagtcaggttaaaacaacggacaataaaagaatgaacacaaaaaaaaaaaaaaaaaaaaaaaaaaaaaaaaaaaaaaaaaaaaaaaaaaaaaaaaaaaaaaaaaaacacacgaacacacaaaaagagagggggg

SEQ ID NO: 357199 - DNA, 3076 bp, Homo sapiens
ctcgaggctccgggcgacccaggtgcggatcccccagccacggaaggggcggttcacgcccagccgggagctgggagggggctgcgcggcgctgcctgcgcgtccctcaccgccgcccccgcctcctcctcgccccgcgcccaacgccccgcgcccagcgatccaagcggcccctctagccccggcggctcctttgtgccggccccgaacccgccctctcgggccgagtccctgcccctggcgccggcgattggccaccgggccgctagagggcggggcgcacggccgccggggcgcggtatatagtaaaggtagggcgggcgcagcggaattcctcggctcctggcgggagtgccggtggcgccccgcagtccgcttgtccgtccttccctctctgactctcctaccccgggcctgtctctgcagaggtcaggggaggcgggggcccagcacacgtccccagtggcagcgggagcggcagctacgggttcgcggagcccccgaccccccaagggctagaggagcgctcggcggaccaaagaaagcccgcgagcggctgcgcgcccaccaataggtgcggggctcggagccgcgcagcctgcgccgtccctccctccggccccgccccgccgccgccgccgccgccgcctccccctcctcctgctcctgccttggctcctccgccgcgcgtctcgcactccgagagccgcagcggcagcggcgcgtcctgcctgcagagagccaggccggagaagccgagcggcgcagaggacgccagggcgcgcgccgcagccacccaccctccggaccgcggcagctgctgacccgccatcgccatggcccgcgggaaagccaaggaggagggcagctggaagaaattcatctggaactcagagaagaaggagtttctgggcaggaccggtggcagttggtttaagatccttctattctacgtaatattttatggctgcctggctggcatcttcatcggaaccatccaagtgatgctgctcaccatcagtgaatttaagcccacatatcaggaccgagtggccccgccaggattaacacagattcctcagatccagaagactgaaatttcctttcgtcctaatgatcccaagagctatgaggcatatgtactgaacatagttaggttcctggaaaagtacaaagattcagcccagagggatgacatgatttttgaagattgtggcgatgtgcccagtgaaccgaaagaacgaggagactttaatcatgaacgaggagagcgaaaggtctgcagattcaagcttgaatggctgggaaattgctctggattaaatgatgaaacttatggctacaaagagggcaaaccgtgcattattataaagctcaaccgagttctaggcttcaaacctaagcctcccaagaatgagtccttggagacttacccagtgatgaagtataacccaaatgtccttcccgttcagtgcactggcaagcgagatgaagataaggataaagttggaaatgtggagtattttggactgggcaactcccctggttttcctctgcagtattatccgtactatggcaaactcctgcagcccaaatacctgcagcccctgctggccgtacagttcaccaatcttaccatggacactgaaattcgcatagagtgtaaggcgtacggtgagaacattgggtacagtgagaaagaccgttttcagggacgttttgatgtaaaaattgaagttaagagctgatcacaagcacaaatctttcccactagccatttaataagttaaaaaaagatacaaaaacaaaaacctactagtcttgaacaaactgtcatacgtatgggacctacacttaatctatatgctttacactagctttctgcatttaataggttagaatgtaaattaaagtgtagcaatagcaacaaaatatttattctactgtaaatgacaaaagaaaaagaaaaattgagccttgggacgtgcccatttttactgtaaattatgattccgtaactgacttgtagtaagcagtgtttctggcccctaagtattgctgccttgtgtattttatttagtgtacagtactacaggtgcatactctggtcatttttcaagccatgttttattgtatctgttttctactttatgtgagcaaggtttgctgtccaaggtgtaaatattcaacgggaataaaactggcatggtaatttttttttttgtttgttttttgttttttggctctttcaaaggtaatggcccatcgatgagcatttttaacatactccatagtcttttcctgtggtgttaggtctttatttttatttttttcctgggggctggggtgggggtttgtcatgggggaactgccctttaaattttaagtgacactacagaaaaacacaaaaaggtgatgggttgtgttatgcttgtattgaatgctgtcttgacatctcttgccttgtcctccggtatgttctaaagctgtgtctgagatctggatctgcccatcactttggctagtgacagggctaattaatttgctttatacattttcttttactttccttttttcctttctggaggcatcacatgctggtgctgtgtctttatgaatgttttaaccattttcatggtggaagaattttatatttatgcagttgtacaattttatttttttctgcaagaaaaagtgtaatgtatgaaataaaccaaagtcacttgtttgaaaataaatctttattttgaactttataaaaagcaatgcagtaccccatagactggtgttaaatgttgtctacagtgcaaaatccatgttctaacatatgtaataattgccaggagtacagtgctcttgttgatcttgtattcagtcaggttaaaacaacggacaataaaagaatgaacacattcctcgtgtgtgattcactcttgtctaaatgtcccaacctgtgacttctttactttccacaccactaattatccaagatcttgaagaagtattaaggaacagagattcttctttagtttgcctagattcacttgtgagaaattggagattgtgccgtctaggc

SEQ ID NO: 357200 - DNA, 3050 bp, Homo sapiens
ctcgaggctccgggcgacccaggtgcggatcccccagccacggaaggggcggttcacgcccagccgggagctgggagggggctgcgcggcgctgcctgcgcgtccctcaccgccgcccccgcctcctcctcgccccgcgcccaacgccccgcgcccagcgatccaagcggcccctctagccccggcggctcctttgtgccggccccgaacccgccctctcgggccgagtccctgcccctggcgccggcgattggccaccgggccgctagagggcggggcgcacggccgccggggcgcggtatatagtaaaggtagggcgggcgcagcggaattcctcggctcctggcgggagtgccggtggcgccccgcagtccgcttgtccgtccttccctctctgactctcctaccccgggcctgtctctgcagaggtcaggggaggcgggggcccagcacacgtccccagtggcagcgggagcggcagctacgggttcgcggagcccccgaccccccaagggctagaggagcgctcggcggaccaaagaaagcccgcgagcggctgcgcgcccaccaataggtgcggggctcggagccgcgcagcctgcgccgtccctccctccggccccgccccgccgccgccgccgccgccgcctccccctcctcctgctcctgccttggctcctccgccgcgcgtctcgcactccgagagccgcagcggcagcggcgcgtcctgcctgcagagagccaggccggagaagccgagcggcgcagaggacgccagggcgcgcgccgcagccacccaccctccggaccgcggcagctgctgacccgccatcgccatggcccgcgggaaagccaaggaggagggcagctggaagaaattcatctggaactcagagaagaaggagtttctgggcaggaccggtggcagttggtttaagatccttctattctacgtaatattttatggctgcctggctggcatcttcatcggaaccatccaagtgatgctgctcaccatcagtgaatttaagcccacatatcaggaccgagtggccccgccaggattaacacagattcctcagatccagaagactgaaatttcctttcgtcctaatgatcccaagagctatgaggcatatgtactgaacatagttaggttcctggaaaagtacaaagattcagcccagagggatgacatgatttttgaagattgtggcgatgtgcccagtgaaccgaaagaacgaggagactttaatcatgaacgaggagagcgaaaggtctgcagattcaagcttgaatggctgggaaattgctctggattaaatgatgaaacttatggctacaaagagggcaaaccgtgcattattataaagctcaaccgagttctaggcttcaaacctaagcctcccaagaatgagtccttggagacttacccagtgatgaagtataacccaaatgtccttcccgttcagtgcactggcaagcgagatgaagataaggataaagttggaaatgtggagtattttggactgggcaactcccctggttttcctctgcagtattatccgtactatggcaaactcctgcagcccaaatacctgcagcccctgctggccgtacagttcaccaatcttaccatggacactgaaattcgcatagagtgtaaggcgtacggtgagaacattgggtacagtgagaaagaccgttttcagggacgttttgatgtaaaaattgaagttaagagctgatcacaagcacaaatctttcccactagccatttaataagttaaaaaaagatacaaaaacaaaaacctactagtcttgaacaaactgtcatacgtatgggacctacacttaatctatatgctttacactagctttctgcatttaataggttagaatgtaaattaaagtgtagcaatagcaacaaaatatttattctactgtaaatgacaaaagaaaaagaaaaattgagccttgggacgtgcccatttttactgtaaattatgattccgtaactgacttgtagtaagcagtgtttctggcccctaagtattgctgccttgtgtattttatttagtgtacagtactacaggtgcatactctggtcatttttcaagccatgttttattgtatctgttttctactttatgtgagcaaggtttgctgtccaaggtgtaaatattcaacgggaataaaactggcatggtaatttttttttttgtttgttttttgttttttggctctttcaaaggtaatggcccatcgatgagcatttttaacatactccatagtcttttcctgtggtgttaggtctttatttttatttttttcctgggggctggggtgggggtttgtcatgggggaactgccctttaaattttaagtgacactacagaaaaacacaaaaaggtgatgggttgtgttatgcttgtattgaatgctgtcttgacatctcttgccttgtcctccggtatgttctaaagctgtgtctgagatctggatctgcccatcactttggctagtgacagggctaattaatttgctttatacattttcttttactttccttttttcctttctggaggcatcacatgctggtgctgtgtctttatgaatgttttaaccattttcatggtggaagaattttatatttatgcagttgtacaattttatttttttctgcaagaaaaagtgtaatgtatgaaataaaccaaagtcacttgtttgaaaataaatctttattttgaactttataaaaagcaatgcagtaccccatagactggtgttaaatgttgtctacagtgcaaaatccatgttctaacatatgtaataattgccaggagtacagtgctcttgttgatcttgtattcagtcaggttaaaacaacggacaataaaagaatgaacacattcctcgtgtgtgattcactcttgtctaaatgtcccaacctgtgacttctttactttccacaccactaattatccaagatcttgaagaagtattaaaaagccctcttctttctgtattacggtgtatacactatacta

SEQ ID NO: 357201 - DNA, 3465 bp, Homo sapiens
ctcgaggctccgggcgacccaggtgcggatcccccagccacggaaggggcggttcacgcccagccgggagctgggagggggctgcgcggcgctgcctgcgcgtccctcaccgccgcccccgcctcctcctcgccccgcgcccaacgccccgcgcccagcgatccaagcggcccctctagccccggcggctcctttgtgccggccccgaacccgccctctcgggccgagtccctgcccctggcgccggcgattggccaccgggccgctagagggcggggcgcacggccgccggggcgcggtatatagtaaaggtagggcgggcgcagcggaattcctcggctcctggcgggagtgccggtggcgccccgcagtccgcttgtccgtccttccctctctgactctcctaccccgggcctgtctctgcagaggtcaggggaggcgggggcccagcacacgtccccagtggcagcgggagcggcagctacgggttcgcggagcccccgaccccccaagggctagaggagcgctcggcggaccaaagaaagcccgcgagcggctgcgcgcccaccaataggtgcggggctcggagccgcgcagcctgcgccgtccctccctccggccccgccccgccgccgccgccgccgccgcctccccctcctcctgctcctgccttggctcctccgccgcgcgtctcgcactccgagagccgcagcggcagcggcgcgtcctgcctgcagagagccaggccggagaagccgagcggcgcagaggacgccagggcgcgcgccgcagccacccaccctccggaccgcggcagctgctgacccgccatcgccatggcccgcgggaaagccaaggaggagggcagctggaagaaattcatctggaactcagagaagaaggagtttctgggcaggaccggtggcagttggtttaagatccttctattctacgtaatattttatggctgcctggctggcatcttcatcggaaccatccaagtgatgctgctcaccatcagtgaatttaagcccacatatcaggaccgagtggccccgccaggattaacacagattcctcagatccagaagactgaaatttcctttcgtcctaatgatcccaagagctatgaggcatatgtactgaacatagttaggttcctggaaaagtacaaagattcagcccagagggatgacatgatttttgaagattgtggcgatgtgcccagtgaaccgaaagaacgaggagactttaatcatgaacgaggagagcgaaaggtctgcagattcaagcttgaatggctgggaaattgctctggattaaatgatgaaacttatggctacaaagagggcaaaccgtgcattattataaagctcaaccgagttctaggcttcaaacctaagcctcccaagaatgagtccttggagacttacccagtgatgaagtataacccaaatgtccttcccgttcagtgcactggcaagcgagatgaagataaggataaagttggaaatgtggagtattttggactgggcaactcccctggttttcctctgcagtattatccgtactatggcaaactcctgcagcccaaatacctgcagcccctgctggccgtacagttcaccaatcttaccatggacactgaaattcgcatagagtgtaaggcgtacggtgagaacattgggtacagtgagaaagaccgttttcagggacgttttgatgtaaaaattgaagttaagagctgatcacaagcacaaatctttcccactagccatttaataagttaaaaaaagatacaaaaacaaaaacctactagtcttgaacaaactgtcatacgtatgggacctacacttaatctatatgctttacactagctttctgcatttaataggttagaatgtaaattaaagtgtagcaatagcaacaaaatatttattctactgtaaatgacaaaagaaaaagaaaaattgagccttgggacgtgcccatttttactgtaaattatgattccgtaactgacttgtagtaagcagtgtttctggcccctaagtattgctgccttgtgtattttatttagtgtacagtactacaggtgcatactctggtcatttttcaagccatgttttattgtatctgttttctactttatgtgagcaaggtttgctgtccaaggtgtaaatattcaacgggaataaaactggcatggtaatttttttttttgtttgttttttgttttttggctctttcaaaggtaatggcccatcgatgagcatttttaacatactccatagtcttttcctgtggtgttaggtctttatttttatttttttcctgggggctggggtgggggtttgtcatgggggaactgccctttaaattttaagtgacactacagaaaaacacaaaaaggtgatgggttgtgttatgcttgtattgaatgctgtcttgacatctcttgccttgtcctccggtatgttctaaagctgtgtctgagatctggatctgcccatcactttggctagtgacagggctaattaatttgctttatacattttcttttactttccttttttcctttctggaggcatcacatgctggtgctgtgtctttatgaatgttttaaccattttcatggtggaagaattttatatttatgcagttgtacaattttatttttttctgcaagaaaaagtgtaatgtatgaaataaaccaaagtcacttgtttgaaaataaatctttattttgaactttataaaaagcaatgcagtaccccatagactggtgttaaatgttgtctacagtgcaaaatccatgttctaacatattacagtgctcttgttgatcttgtattcagtcaggttaaaacaacggacaataaaagaatgaacacattcctcgtgtgtgattcaccaacctgtgacttctttactttccacaccactaattatccaagatcttgaagaagtattaacctgaaacggagaaacacataatttcttagttcagacaaattttggtcttttccacttaacagagtccaagaggttggtcaggacttcagacactggcataccccttcccaaagacactaaaagttaatcaatcaatcagaggcagagaatcgatgaagctccagtttgaagttccatttaaaaaaatcatcttgcagtgctactgctacttcactcagtttagaaaacatgaagtgttggttcctgctattgcttcactagacatatgtgttaaaaaaaaaagttgttagcacttcagtttttaaaaaatgaggttaggtttgtggttcagtaaattaaggttcataccttgctttttggttcagggattggcctaagtccttatttagctgtatttaaaaattagccttagtgtgaaagaagataaaaaagctttccaaaaaacattttccagctataattattaaagatttagtatcacttaactaa

SEQ ID NO: 357202 - DNA, 2913 bp, Homo sapiens
  misc_feature (2553)..(2553): n is a, c, g, or t
  misc_feature (2576)..(2576): n is a, c, g, or t
ctcgaggctccgggcgacccaggtgcggatcccccagccacggaaggggcggttcacgcccagccgggagctgggagggggctgcgcggcgctgcctgcgcgtccctcaccgccgcccccgcctcctcctcgccccgcgcccaacgccccgcgcccagcgatccaagcggcccctctagccccggcggctcctttgtgccggccccgaacccgccctctcgggccgagtccctgcccctggcgccggcgattggccaccgggccgctagagggcggggcgcacggccgccggggcgcggtatatagtaaaggtagggcgggcgcagcggaattcctcggctcctggcgggagtgccggtggcgccccgcagtccgcttgtccgtccttccctctctgactctcctaccccgggcctgtctctgcagaggtcaggggaggcgggggcccagcacacgtccccagtggcagcgggagcggcagctacgggttcgcggagcccccgaccccccaagggctagaggagcgctcggcggaccaaagaaagcccgcgagcggctgcgcgcccaccaataggtgcggggctcggagccgcgcagcctgcgccgtccctccctccggccccgccccgccgccgccgccgccgccgcctccccctcctcctgctcctgccttggctcctccgccgcgcgtctcgcactccgagagccgcagcggcagcggcgcgtcctgcctgcagagagccaggccggagaagccgagcggcgcagaggacgccagggcgcgcgccgcagccacccaccctccggaccgcggcagctgctgacccgccatcgccatggcccgcgggaaagccaaggaggagggcagctggaagaaattcatctggaactcagagaagaaggagtttctgggcaggaccggtggcagttggtttaagatccttctattctacgtaatattttatggctgcctggctggcatcttcatcggaaccatccaagtgatgctgctcaccatcagtgaatttaagcccacatatcaggaccgagtggccccgccaggattaacacagattcctcagatccagaagactgaaatttcctttcgtcctaatgatcccaagagctatgaggcatatgtactgaacatagttaggttcctggaaaagtacaaagattcagcccagagggatgacatgatttttgaagattgtggcgatgtgcccagtgaaccgaaagaacgaggagactttaatcatgaacgaggagagcgaaaggtctgcagattcaagcttgaatggctgggaaattgctctggattaaatgatgaaacttatggctacaaagagggcaaaccgtgcattattataaagctcaaccgagttctaggcttcaaacctaagcctcccaagaatgagtccttggagacttacccagtgatgaagtataacccaaatgtccttcccgttcagtgcactggcaagcgagatgaagataaggataaagttggaaatgtggagtattttggactgggcaactcccctggttttcctctgcagtattatccgtactatggcaaactcctgcagcccaaatacctgcagcccctgctggccgtacagttcaccaatcttaccatggacactgaaattcgcatagagtgtaaggcgtacggtgagaacattgggtacagtgagaaagaccgttttcagggacgttttgatgtaaaaattgaagttaagagctgatcacaagcacaaatctttcccactagccatttaataagttaaaaaaagatacaaaaacaaaaacctactagtcttgaacaaactgtcatacgtatgggacctacacttaatctatatgctttacactagctttctgcatttaataggttagaatgtaaattaaagtgtagcaatagcaacaaaatatttattctactgtaaatgacaaaagaaaaagaaaaattgagccttgggacgtgcccatttttactgtaaattatgattccgtaactgacttgtagtaagcagtgtttctggcccctaagtattgctgccttgtgtattttatttagtgtacagtactacaggtgcatactctggtcatttttcaagccatgttttattgtatctgttttctactttatgtgagcaaggtttgctgtccaaggtgtaaatattcaacgggaataaaactggcatggtaatttttttttttgtgggttttgggggcctttttcaagggttagagtggcccaatgcggagtgagagctttttaaacaatactctccaatagctcttttcccggggggtggtaaggctctttaatttttaatttttttccctgtgggggcccgggtggggggtttgtgccagtgggggaaacgtgccctttataaattttaaggagggcacacttccaggaaaacccacaaaagggggtgagtgggctgtgggttaagtgcctgtgatattgagaatgtgggtgctcttgtgacaattctctcgtggcccgtggggccccctcgcgggataagtgtcctatanaacgctgtgggtgttccgtgaanatctcgtgggattcgtggcccattacacctgtgggggcctagtgtgacccggggggccctacattttaccgtgggggcgcttataatatccattttgtgcctcttaagctttccctcttgttttcccctttcgcgtgaggaggggcctctacaactgtgccgtgggaggacgggggggatcctctatagtgaaactgtggttttcttaaaccccattttttcccggggggggggagaaagcaaacttcttaatatttttaattgcccggttgttcaccaacttttaattttctttcgcgtgccaagcaaaacacgttggttacgtgtctgttgaaac

SEQ ID NO: 357203 - DNA, 2297 bp, Homo sapiens
gaattcatgctaaattgctggaaggctgcgtctctgctgtggtgtcagttccggatgcctcatcgccagggcgcgcgccgcagccacccaccctccggaccgcggcagctgctgacccgccatcgccatggcccgcgggaaagccaaggaggagggcagctggaagaaattcatctggaactcagagaagaaggagtttctgggcaggaccggtggcagttggtttaagatccttctattctacgtaatattttatggctgcctggctggcatcttcatcggaaccatccaagtgatgctgctcaccatcagtgaatttaagcccacatatcaggaccgagtggccccgccaggattaacacagattcctcagatccagaagactgaaatttcctttcgtcctaatgatcccaagagctatgaggcatatgtactgaacatagttaggttcctggaaaagtacaaagattcagcccagagggatgacatgatttttgaagattgtggcgatgtgcccagtgaaccgaaagaacgaggagactttaatcatgaacgaggagagcgaaaggtctgcagattcaagcttgaatggctgggaaattgctctggattaaatgatgaaacttatggctacaaagagggcaaaccgtgcattattataaagctcaaccgagttctaggcttcaaacctaagcctcccaagaatgagtccttggagacttacccagtgatgaagtataacccaaatgtccttcccgttcagtgcactggcaagcgagatgaagataaggataaagttggaaatgtggagtattttggactgggcaactcccctggttttcctctgcagtattatccgtactatggcaaactcctgcagcccaaatacctgcagcccctgctggccgtacagttcaccaatcttaccatggacactgaaattcgcatagagtgtaaggcgtacggtgagaacattgggtacagtgagaaagaccgttttcagggacgttttgatgtaaaaattgaagttaagagctgatcacaagcacaaatctttcccactagccatttaataagttaaaaaaagatacaaaaacaaaaacctactagtcttgaacaaactgtcatacgtatgggacctacacttaatctatatgctttacactagctttctgcatttaataggttagaatgtaaattaaagtgtagcaatagcaacaaaatatttattctactgtaaatgacaaaagaaaaagaaaaattgagccttgggacgtgcccatttttactgtaaattatgattccgtaactgacttgtagtaagcagtgtttctggcccctaagtattgctgccttgtgtattttatttagtgtacagtactacaggtgcatactctggtcatttttcaagccatgttttattgtatctgttttctactttatgtgagcaaggtttgctgtccaaggtgtaaatattcaacgggaataaaactggcatggtaatttttttttttgtttgttttttgttttttggctctttcaaaggtaatggcccatcgatgagcatttttaacatactccatagtcttttcctgtggtgttaggtctttatttttatttttttcctgggggctggggtgggggtttgtcatgggggaactgccctttaaattttaagtgacactacagaaaaacacaaaaaggtgatgggttgtgttatgcttgtattgaatgctgtcttgacatctcttgccttgtcctccggtatgttctaaagctgtgtctgagatctggatctgcccatcactttggctagtgacagggctaattaatttgctttatacattttcttttactttccttttttcctttctggaggcatcacatgctggtgctgtgtctttatgaatgttttaaccattttcatggtggaagaattttatatttatgcagttgtacaattttatttttttctgcaagaaaaagtgtaatgtatgaaataaaccaaagtcacttgtttgaaaataaatctttattttgaactttataaaaagcaatgcagtaccccatagactggtgttaaatgttgtctacagtgcaaaatccatgttctaacatatgtaataattgccaggagtacagtgctcttgttgatcttgtattcagtcaggttaaaacaacggacaataaaagaatgaacacaaaaaaaaaaaaaaaaaaaaaaaaaaaaaaaaaaaaaaaaaaaaaaaaaaaaaaaaaaaaaaaaaaacacacgaacacacaaaaagagagggggg

SEQ ID NO: 357204 - DNA, 2224 bp, Homo sapiens
ctcgaggctccgggcgacccaggtgcggatcccccagccacggaaggggcggttcacgcccagccgggagctgggagggggctgcgcggcgctgcctgcgcgtccctcaccgccgcccccgcctcctcctcgccccgcgcccaacgccccgcgcccagcgatccaagcggcccctctagccccggcggctcctttgtgccggccccgaacccgccctctcgggccgagtccctgcccctggcgccggcgattggccaccgggccgctagagggcggggcgcacggccgccggggcgcggtatatagtaaaggtagggcgggcgcagcggaattcctcggctcctggcgggagtgccggtggcgccccgcagtccgcttgtccgtccttccctctctgactctcctaccccgggcctgtctctgcagaggtcaggggaggcgggggcccagcacacgtccccagtggcagcgggagcggcagctacgggttcgcggagcccccgaccccccaagggctagaggagcgctcggcggaccaaagaaagcccgcgagcggctgcgcgcccaccaataggtgcggggctcggagccgcgcagcctgcgccgtccctccctccggccccgccccgccgccgccgccgccgccgcctccccctcctcctgctcctgccttggctcctccgccgcgcgtctcgcactccgagagccgcagcggcagcggcgcgtcctgcctgcagagagccaggccggagaagccgagcggcgcagaggacgccagggcgcgcgccgcagccacccaccctccggaccgcggcagctgctgacccgccatcgccatggcccgcgggaaagccaaggaggagggcagctggaagaaattcatctggaactcagagaagaaggagtttctgggcaggaccggtggcagttggtttaagatccttctattctacgtaatattttatggctgcctggctggcatcttcatcggaaccatccaagtgatgctgctcaccatcagtgaatttaagcccacatatcaggaccgagtggccccgccaggattaacacagattcctcagatccagaagactgaaatttcctttcgtcctaatgatcccaagagctatgaggcatatgtactgaacatagttaggttcctggaaaagtacaaagattcagcccagagggatgacatgatttttgaagattgtggcgatgtgcccagtgaaccgaaagaacgaggagactttaatcatgaacgaggagagcgaaaggtctgcagattcaagcttgaatggctgggaaattgctctggattaaatgatgaaacttatggctacaaagagggcaaaccgtgcattattataaagctcaaccgagttctaggcttcaaacctaagcctcccaagaatgagtccttggagacttacccagtgatgaagtataacccaaatgtccttcccgttcagtgcactggcaagcgagatgaagataaggataaagttggaaatgtggagtattttggactgggcaactcccctggttttcctctgcagtattatccgtactatggcaaactcctgcagcccaaatacctgcagcccctgctggccgtacagttcaccaatcttaccatggacactgaaattcgcatagagtgtaaggcgtacggtgagaacattgggtacagtgagaaagaccgttttcagggacgttttgatgtaaaaattgaagttaagagctgatcacaagcacaaatctttcccactagccatttaataagttaaaaaaagatacaaaaacaaaaacctactagtcttgaacaaactgtcatacgtatgggacctacacttaatctatatgctttacactagctttctgcatttaataggttagaatgtaaattaaagtgtagcaatagcaacaaaatatttattctactgtaaatgacaaaagaaaaagaaaaattgagccttgggacgtgcccatttttactgtaaattatgattccgtaactgacttgtagtaagcagtgtttctggcccctaagtattgctgccttgtgtattttatttagtgtacagtactacaggtgcatactctggtcatttttcaagccatgttttattgtatctgttttctactttatgtgagcaaggtttgctgtccaaggtgtaaatattcaacggtctatgctgctgggtaccggctcgattcgtat

SEQ ID NO: 357205 - DNA, 2231 bp, Homo sapiens
ctcgaggctccgggcgacccaggtgcggatcccccagccacggaaggggcggttcacgcccagccgggagctgggagggggctgcgcggcgctgcctgcgcgtccctcaccgccgcccccgcctcctcctcgccccgcgcccaacgccccgcgcccagcgatccaagcggcccctctagccccggcggctcctttgtgccggccccgaacccgccctctcgggccgagtccctgcccctggcgccggcgattggccaccgggccgctagagggcggggcgcacggccgccggggcgcggtatatagtaaaggtagggcgggcgcagcggaattcctcggctcctggcgggagtgccggtggcgccccgcagtccgcttgtccgtccttccctctctgactctcctaccccgggcctgtctctgcagaggtcaggggaggcgggggcccagcacacgtccccagtggcagcgggagcggcagctacgggttcgcggagcccccgaccccccaagggctagaggagcgctcggcggaccaaagaaagcccgcgagcggctgcgcgcccaccaataggtgcggggctcggagccgcgcagcctgcgccgtccctccctccggccccgccccgccgccgccgccgccgccgcctccccctcctcctgctcctgccttggctcctccgccgcgcgtctcgcactccgagagccgcagcggcagcggcgcgtcctgcctgcagagagccaggccggagaagccgagcggcgcagaggacgccagggcgcgcgccgcagccacccaccctccggaccgcggcagctgctgacccgccatcgccatggcccgcgggaaagccaaggaggagggcagctggaagaaattcatctggaactcagagaagaaggagtttctgggcaggaccggtggcagttggtttaagatccttctattctacgtaatattttatggctgcctggctggcatcttcatcggaaccatccaagtgatgctgctcaccatcagtgaatttaagcccacatatcaggaccgagtggccccgccaggattaacacagattcctcagatccagaagactgaaatttcctttcgtcctaatgatcccaagagctatgaggcatatgtactgaacatagttaggttcctggaaaagtacaaagattcagcccagagggatgacatgatttttgaagattgtggcgatgtgcccagtgaaccgaaagaacgaggagactttaatcatgaacgaggagagcgaaaggtctgcagattcaagcttgaatggctgggaaattgctctggattaaatgatgaaacttatggctacaaagagggcaaaccgtgcattattataaagctcaaccgagttctaggcttcaaacctaagcctcccaagaatgagtccttggagacttacccagtgatgaagtataacccaaatgtccttcccgttcagtgcactggcaagcgagatgaagataaggataaagttggaaatgtggagtattttggactgggcaactcccctggttttcctctgcagtattatccgtactatggcaaactcctgcagcccaaatacctgcagcccctgctggccgtacagttcaccaatcttaccatggacactgaaattcgcatagagtgtaaggcgtacggtgagaacattgggtacagtgagaaagaccgttttcagggacgttttgatgtaaaaattgaagttaagagctgatcacaagcacaaatctttcccactagccatttaataagttaaaaaaagatacaaaaacaaaaacctactagtcttgaacaaactgtcatacgtatgggacctacacttaatctatatgctttacactagctttctgcatttaataggttagaatgtaaattaaagtgtagcaatagcaacaaaatatttattctactgtaaatgacaaaagaaaaagaaaaattgagccttgggacgtgcccatttttactgtaaattatgattccgtaactgacttgtagtaagcagtgtttctggcccctaagtattgctgccttgtgtattttatttagtgtacagtactacaggtgcatactctggtcatttttcaagccatgttttattgtatctgttttctactttatgtgagcaaggtttgctgtccaaggtgtaaatattcaacggcgagaagcggcgaagacgagaaccggcgaagggtcgagc

SEQ ID NO: 357206 - DNA, 2073 bp, Homo sapiens
  misc_feature (2013)..(2014): n is a, c, g, or t
ctcgaggctccgggcgacccaggtgcggatcccccagccacggaaggggcggttcacgcccagccgggagctgggagggggctgcgcggcgctgcctgcgcgtccctcaccgccgcccccgcctcctcctcgccccgcgcccaacgccccgcgcccagcgatccaagcggcccctctagccccggcggctcctttgtgccggccccgaacccgccctctcgggccgagtccctgcccctggcgccggcgattggccaccgggccgctagagggcggggcgcacggccgccggggcgcggtatatagtaaaggtagggcgggcgcagcggaattcctcggctcctggcgggagtgccggtggcgccccgcagtccgcttgtccgtccttccctctctgactctcctaccccgggcctgtctctgcagaggtcaggggaggcgggggcccagcacacgtccccagtggcagcgggagcggcagctacgggttcgcggagcccccgaccccccaagggctagaggagcgctcggcggaccaaagaaagcccgcgagcggctgcgcgcccaccaataggtgcggggctcggagccgcgcagcctgcgccgtccctccctccggccccgccccgccgccgccgccgccgccgcctccccctcctcctgctcctgccttggctcctccgccgcgcgtctcgcactccgagagccgcagcggcagcggcgcgtcctgcctgcagagagccaggccggagaagccgagcggcgcagaggacgccagggcgcgcgccgcagccacccaccctccggaccgcggcagctgctgacccgccatcgccatggcccgcgggaaagccaaggaggagggcagctggaagaaattcatctggaactcagagaagaaggagtttctgggcaggaccggtggcagttggtttaagatccttctattctacgtaatattttatggctgcctggctggcatcttcatcggaaccatccaagtgatgctgctcaccatcagtgaatttaagcccacatatcaggaccgagtggccccgccaggattaacacagattcctcagatccagaagactgaaatttcctttcgtcctaatgatcccaagagctatgaggcatatgtactgaacatagttaggttcctggaaaagtacaaagattcagcccagagggatgacatgatttttgaagattgtggcgatgtgcccagtgaaccgaaagaacgaggagactttaatcatgaacgaggagagcgaaaggtctgcagattcaagcttgaatggctgggaaattgctctggattaaatgatgaaacttatggctacaaagagggcaaaccgtgcattattataaagctcaaccgagttctaggcttcaaacctaagcctcccaagaatgagtccttggagacttacccagtgatgaagtataacccaaatgtccttcccgttcagtgcactggcaagcgagatgaagataaggataaagttggaaatgtggagtattttggactgggcaactcccctggttttcctctgcagtattatccgtactatggcaaactcctgcagcccaaatacctgcagcccctgctggccgtacagttcaccaatcttaccatggacactgaaattcgcatagagtgtaaggcgtacggtgagaacattgggtacagtgagaaagaccgttttcagggacgttttgatgtaaaaattgaagttaagagctgatcacaagcacaaatctttcccactagccatttaataagttaaaaaaagatacaaaaacaaaaacctactagtcttgaacaaactgtcatacgtatgggacctacacttaatctatatgctttacactagctttctgcatttaataggttagaatgtaaattaaagtgtagcaatagcaacaaaatatttattctactgtaaatgacaaaagaaaaagaaaaattgagccttgggacgtgcccatttttactgtaaattatgatcnnatgattgtgttaagcggttctggcctaagtataggggctgggtttaatcaggggagcaa

SEQ ID NO: 357207 - DNA, 3055 bp, Homo sapiens
ctcgaggctccgggcgacccaggtgcggatcccccagccacggaaggggcggttcacgcccagccgggagctgggagggggctgcgcggcgctgcctgcgcgtccctcaccgccgcccccgcctcctcctcgccccgcgcccaacgccccgcgcccagcgatccaagcggcccctctagccccggcggctcctttgtgccggccccgaacccgccctctcgggccgagtccctgcccctggcgccggcgattggccaccgggccgctagagggcggggcgcacggccgccggggcgcggtatatagtaaaggtagggcgggcgcagcggaattcctcggctcctggcgggagtgccggtggcgccccgcagtccgcttgtccgtccttccctctctgactctcctaccccgggcctgtctctgcagaggtcaggggaggcgggggcccagcacacgtccccagtggcagcgggagcggcagctacgggttcgcggagcccccgaccccccaagggctagaggagcgctcggcggaccaaagaaagcccgcgagcggctgcgcgcccaccaataggtgcggggctcggagccgcgcagcctgcgccgtccctccctccggccccgccccgccgccgccgccgccgccgcctccccctcctcctgctcctgccttggctcctccgccgcgcgtctcgcactccgagagccgcagcggcagcggcgcgtcctgcctgcagagagccaggccggagaagccgagcggcgcagaggacgccagggcgcgcgccgcagccacccaccctccggaccgcggcagctgctgacccgccatcgccatggcccgcgggaaagccaaggaggagggcagctggaagaaattcatctggaactcagagaagaaggagtttctgggcaggaccggtggcagttggtttaagatccttctattctacgtaatattttatggctgcctggctggcatcttcatcggaaccatccaagtgatgctgctcaccatcagtgaatttaagcccacatatcaggaccgagtggccccgccaggattaacacagattcctcagatccagaagactgaaatttcctttcgtcctaatgatcccaagagctatgaggcatatgtactgaacatagttaggttcctggaaaagtacaaagattcagcccagagggatgacatgatttttgaagattgtggcgatgtgcccagtgaaccgaaagaacgaggagactttaatcatgaacgaggagagcgaaaggtctgcagattcaagcttgaatggctgggaaattgctctggattaaatgatgaaacttatggctacaaagagggcaaaccgtgcattattataaagctcaaccgagttctaggcttcaaacctaagcctcccaagaatgagtccttggagacttacccagtgatgaagtataacccaaatgtccttcccgttcagtgcactggcaagcgagatgaagataaggataaagttggaaatgtggagtattttggactgggcaactcccctggttttcctctgcagtattatccgtactatggcaaactcctgcagcccaaatacctgcagcccctgctggccgtactatggcaaactcctgcagcccaaatacctgcagcccctgctggccgtacagttcaccaatcttaccatggacactgaaattcgcatagagtgtaaggcgtacggtgagaacattgggtacagtgagaaagaccgttttcagggacgttttgatgtaaaaattgaagttaagagctgatcacaagcacaaatctttcccactagccatttaataagttaaaaaaagatacaaaaacaaaaacctactagtcttgaacaaactgtcatacgtatgggacctacacttaatctatatgctttacactagctttctgcatttaataggttagaatgtaaattaaagtgtagcaatagcaacaaaatatttattctactgtaaatgacaaaagaaaaagaaaaattgagccttgggacgtgcccatttttactgtaaattatgattccgtaactgacttgtagtaagcagtgtttctggcccctaagtattgctgccttgtgtattttatttagtgtacagtactacaggtgcatactctggtcatttttcaagccatgttttattgtatctgttttctactttatgtgagcaaggtttgctgtccaaggtgtaaatattcaacgggaataaaactggcatggtaatttttttttttgtttgttttttgttttttggctctttcaaaggtaatggcccatcgatgagcatttttaacatactccatagtcttttcctgtggtgttaggtctttatttttatttttttcctgggggctggggtgggggtttgtcatgggggaactgccctttaaattttaagtgacactacagaaaaacacaaaaaggtgatgggttgtgttatgcttgtattgaatgctgtcttgacatctcttgccttgtcctccggtatgttctaaagctgtgtctgagatctggatctgcccatcactttggctagtgacagggctaattaatttgctttatacattttcttttactttccttttttcctttctggaggcatcacatgctggtgctgtgtctttatgaatgttttaaccattttcatggtggaagaattttatatttatgcagttgtacaattttatttttttctgcaagaaaaagtgtaatgtatgaaataaaccaaagtcacttgtttgaaaataaatctttattttgaactttataaaaagcaatgcagtaccccatagactggtgttaaatgttgtctacagtgcaaaatccatgttctaacatatgtaataattgccaggagtacagtgctcttgttgatcttgtattcagtcaggttaaaacaacggacaataaaagaatgaacacaaaaaaaaaaaaaaaaaaaaaaaaaaaaaaaaaaaaaaaaaaaaaaaaaaaaaaaaaaaaaaaaaaacacacgaacacacaaaaagagagggggg

SEQ ID NO: 357208 - DNA, 2731 bp, Homo sapiens
  misc_feature (2307)..(2310): n is a, c, g, or t
  misc_feature (2314)..(2323): n is a, c, g, or t
  misc_feature (2359)..(2359): n is a, c, g, or t
  misc_feature (2363)..(2363): n is a, c, g, or t
  misc_feature (2371)..(2371): n is a, c, g, or t
  misc_feature (2398)..(2398): n is a, c, g, or t
  misc_feature (2406)..(2406): n is a, c, g, or t
  misc_feature (2408)..(2408): n is a, c, g, or t
  misc_feature (2413)..(2413): n is a, c, g, or t
  misc_feature (2415)..(2415): n is a, c, g, or t
  misc_feature (2429)..(2429): n is a, c, g, or t
  misc_feature (2431)..(2431): n is a, c, g, or t
  misc_feature (2436)..(2437): n is a, c, g, or t
  misc_feature (2469)..(2469): n is a, c, g, or t
  misc_feature (2485)..(2485): n is a, c, g, or t
  misc_feature (2496)..(2496): n is a, c, g, or t
  misc_feature (2499)..(2499): n is a, c, g, or t
  misc_feature (2548)..(2549): n is a, c, g, or t
  misc_feature (2563)..(2564): n is a, c, g, or t
  misc_feature (2572)..(2572): n is a, c, g, or t
  misc_feature (2594)..(2594): n is a, c, g, or t
  misc_feature (2596)..(2596): n is a, c, g, or t
  misc_feature (2600)..(2600): n is a, c, g, or t
  misc_feature (2602)..(2602): n is a, c, g, or t
  misc_feature (2610)..(2610): n is a, c, g, or t
  misc_feature (2614)..(2614): n is a, c, g, or t
  misc_feature (2620)..(2620): n is a, c, g, or t
  misc_feature (2626)..(2626): n is a, c, g, or t
  misc_feature (2629)..(2629): n is a, c, g, or t
  misc_feature (2635)..(2635): n is a, c, g, or t
  misc_feature (2715)..(2715): n is a, c, g, or t
ctcgaggctccgggcgacccaggtgcggatcccccagccacggaaggggcggttcacgcccagccgggagctgggagggggctgcgcggcgctgcctgcgcgtccctcaccgccgcccccgcctcctcctcgccccgcgcccaacgccccgcgcccagcgatccaagcggcccctctagccccggcggctcctttgtgccggccccgaacccgccctctcgggccgagtccctgcccctggcgccggcgattggccaccgggccgctagagggcggggcgcacggccgccggggcgcggtatatagtaaaggtagggcgggcgcagcggaattcctcggctcctggcgggagtgccggtggcgccccgcagtccgcttgtccgtccttccctctctgactctcctaccccgggcctgtctctgcagaggtcaggggaggcgggggcccagcacacgtccccagtggcagcgggagcggcagctacgggttcgcggagcccccgaccccccaagggctagaggagcgctcggcggaccaaagaaagcccgcgagcggctgcgcgcccaccaataggtgcggggctcggagccgcgcagcctgcgccgtccctccctccggccccgccccgccgccgccgccgccgccgcctccccctcctcctgctcctgccttggctcctccgccgcgcgtctcgcactccgagagccgcagcggcagcggcgcgtcctgcctgcagagagccaggccggagaagccgagcggcgcagaggacgccagggcgcgcgccgcagccacccaccctccggaccgcggcagctgctgacccgccatcgccatggcccgcgggaaagccaaggaggagggcagctggaagaaattcatctggaactcagagaagaaggagtttctgggcaggaccggtggcagttggtttaagatccttctattctacgtaatattttatggctgcctggctggcatcttcatcggaaccatccaagtgatgctgctcaccatcagtgaatttaagcccacatatcaggaccgagtggccccgccaggattaacacagattcctcagatccagaagactgaaatttcctttcgtcctaatgatcccaagagctatgaggcatatgtactgaacatagttaggttcctggaaaagtacaaagattcagcccagagggatgacatgatttttgaagattgtggcgatgtgcccagtgaaccgaaagaacgaggagactttaatcatgaacgaggagagcgaaaggtctgcagattcaagcttgaatggctgggaaattgctctggattaaatgatgaaacttatggctacaaagagggcaaaccgtgcattattataaagctcaaccgagttctaggcttcaaacctaagcctcccaagaatgagtccttggagacttacccagtgatgaagtataacccaaatgtccttcccgttcagtgcactggcaagcgagatgaagataaggataaagttggaaatgtggagtattttggactgggcaactcccctggttttcctctgcagtattatccgtactatggcaaactcctgcagcccaaatacctgcagcccctgctggccgtacagttcaccaatcttaccatggacactgaaattcgcatagagtgtaaggcgtacggtgagaacattgggtacagtgagaaagaccgttttcagggacgttttgatgtaaaaattgggggaactgccctttaaattttaagtgacactacagaaaaacacaaaaaggtgatgggttgtgttatgcttgtattgaatgctgtcttgacatctcttgccttgtcctccggtatgttctaaagctgtgtctgagatctggatctgcccatcactttggctagtgacagggctaattaatttgctttatacattttcttttactttccttttttcctttctggaggcatcacatgctggtgctgtgtctttatgaatgttttaaccattttcatggtggaagaattttatatttatgcagttgtacaattttatttttttctgcaagaaaaagtgtaatgtatgaaataaaccaaagtcacttgtttgaaaataaatctttattttgaactttataaaaagcaatgcagtaccccatagactggtgttaaatgttgtctacagtgcaaaatccatgttctaacatatgtaataattgccaggagtacagtgctcttgttgatcttgtattcagtcaggttaaaacaacggacaataaaagaatgaacacaaaaaaaaaaaaaaaaaaaaaaannnncccnnnnnnnnnnccccccccccccccccaaaaaaaaaaaaaaaaaaantaantaaaaatnttttttttttttttttttttttttttnttttattntntaatntntttttttttttttntntattnnttttataataataatatttatttataatatanatttatttattttaantatatattaanaanaatatttattatatttttttataaaatttaaattttttaattgtatatnnaaaaaaaatatatnnttatttantaaattttatttatatattttntnaatntnaattattntttntttttntataanatntttatntttattatatttttatttatataaaaattttatttttttttttttttttattttttttttaatttttatattttttattntataattttatatttt

SEQ ID NO: 357209 - DNA, 2965 bp, Homo sapiens
ctcgaggctccgggcgacccaggtgcggatcccccagccacggaaggggcggttcacgcccagccgggagctgggagggggctgcgcggcgctgcctgcgcgtccctcaccgccgcccccgcctcctcctcgccccgcgcccaacgccccgcgcccagcgatccaagcggcccctctagccccggcggctcctttgtgccggccccgaacccgccctctcgggccgagtccctgcccctggcgccggcgattggccaccgggccgctagagggcggggcgcacggccgccggggcgcggtatatagtaaaggtagggcgggcgcagcggaattcctcggctcctggcgggagtgccggtggcgccccgcagtccgcttgtccgtccttccctctctgactctcctaccccgggcctgtctctgcagaggtcaggggaggcgggggcccagcacacgtccccagtggcagcgggagcggcagctacgggttcgcggagcccccgaccccccaagggctagaggagcgctcggcggaccaaagaaagcccgcgagcggctgcgcgcccaccaataggtgcggggctcggagccgcgcagcctgcgccgtccctccctccggccccgccccgccgccgccgccgccgccgcctccccctcctcctgctcctgccttggctcctccgccgcgcgtctcgcactccgagagccgcagcggcagcggcgcgtcctgcctgcagagagccaggccggagaagccgagcggcgcagaggacgccagggcgcgcgccgcagccacccaccctccggaccgcggcagctgctgacccgccatcgccatggcccgcgggaaagccaaggaggagggcagctggaagaaattcatctggaactcagagaagaaggagtttctgggcaggaccggtggcagttggtttaagatccttctattctacgtaatattttatggctgcctggctggcatcttcatcggaaccatccaagtgatgctgctcaccatcagtgaatttaagcccacatatcaggaccgagtggccccgccaggattaacacagattcctcagatccagaagactgaaatttcctttcgtcctaatgatcccaagagctatgaggcatatgtactgaacatagttaggttcctggaaaagtacaaagattcagcccagagggatgacatgatttttgaagattgtggcgatgtgcccagtgaaccgaaagaacgaggagactttaatcatgaacgaggagagcgaaaggtctgcagattcaagcttgaatggctgggaaattgctctggattaaatgatgaaacttatggctacaaagagggcaaaccgtgcattattataaagctcaaccgagttctaggcttcaaacctaagcctcccaagaatgagtccttggagacttacccagtgatgaagtataacccaaatgtccttcccgttcagtgcactggcaagtggactgggcaactcccctggttttcctctgcagtattatccgtactatggcaaactcctgcagcccaaatacctgcagcccctgctggccgtacagttcaccaatcttaccatggacactgaaattcgcatagagtgtaaggcgtacggtgagaacattgggtacagtgagaaagaccgttttcagggacgttttgatgtaaaaattgaagttaagagctgatcacaagcacaaatctttcccactagccatttaataagttaaaaaaagatacaaaaacaaaaacctactagtcttgaacaaactgtcatacgtatgggacctacacttaatctatatgctttacactagctttctgcatttaataggttagaatgtaaattaaagtgtagcaatagcaacaaaatatttattctactgtaaatgacaaaagaaaaagaaaaattgagccttgggacgtgcccatttttactgtaaattatgattccgtaactgacttgtagtaagcagtgtttctggcccctaagtattgctgccttgtgtattttatttagtgtacagtactacaggtgcatactctggtcatttttcaagccatgttttattgtatctgttttctactttatgtgagcaaggtttgctgtccaaggtgtaaatattcaacgggaataaaactggcatggtaatttttttttttgtttgttttttgttttttggctctttcaaaggtaatggcccatcgatgagcatttttaacatactccatagtcttttcctgtggtgttaggtctttatttttatttttttcctgggggctggggtgggggtttgtcatgggggaactgccctttaaattttaagtgacactacagaaaaacacaaaaaggtgatgggttgtgttatgcttgtattgaatgctgtcttgacatctcttgccttgtcctccggtatgttctaaagctgtgtctgagatctggatctgcccatcactttggctagtgacagggctaattaatttgctttatacattttcttttactttccttttttcctttctggaggcatcacatgctggtgctgtgtctttatgaatgttttaaccattttcatggtggaagaattttatatttatgcagttgtacaattttatttttttctgcaagaaaaagtgtaatgtatgaaataaaccaaagtcacttgtttgaaaataaatctttattttgaactttataaaaagcaatgcagtaccccatagactggtgttaaatgttgtctacagtgcaaaatccatgttctaacatatgtaataattgccaggagtacagtgctcttgttgatcttgtattcagtcaggttaaaacaacggacaataaaagaatgaacacaaaaaaaaaaaaaaaaaaaaaaaaaaaaaaaaaaaaaaaaaaaaaaaaaaaaaaaaaaaaaaaaaaacacacgaacacacaaaaagagagggggg

SEQ ID NO: 357210 - DNA, 1890 bp, Homo sapiens
ctcgaggctccgggcgacccaggtgcggatcccccagccacggaaggggcggttcacgcccagccgggagctgggagggggctgcgcggcgctgcctgcgcgtccctcaccgccgcccccgcctcctcctcgccccgcgcccaacgccccgcgcccagcgatccaagcggcccctctagccccggcggctcctttgtgccggccccgaacccgccctctcgggccgagtccctgcccctggcgccggcgattggccaccgggccgctagagggcggggcgcacggccgccggggcgcggtatatagtaaaggtagggcgggcgcagcggaattcctcggctcctggcgggagtgccggtggcgccccgcagtccgcttgtccgtccttccctctctgactctcctaccccgggcctgtctctgcagaggtcaggggaggcgggggcccagcacacgtccccagtggcagcgggagcggcagctacgggttcgcggagcccccgaccccccaagggctagaggagcgctcggcggaccaaagaaagcccgcgagcggctgcgcgcccaccaataggtgcggggctcggagccgcgcagcctgcgccgtccctccctccggccccgccccgccgccgccgccgccgccgcctccccctcctcctgctcctgccttggctcctccgccgcgcgtctcgcactccgagagccgcagcggcagcggcgcgtcctgcctgcagagagccaggccggagaagccgagcggcgcagaggacgccagggcgcgcgccgcagccacccaccctccggaccgcggcagctgctgacccgccatcgccatggcccgcgggaaagccaaggaggagggcagctggaagaaattcatctggaactcagagaagaaggagtttctgggcaggaccggtggcagttggtttaagatccttctattctacgtaatattttatggctgcctggctggcatcttcatcggaaccatccaagtgatgctgctcaccatcagtgaatttaagcccacatatcaggaccgagtggccccgccaggattaacacagattcctcagatccagaagactgaaatttcctttcgtcctaatgatcccaagagctatgaggcatatgtactgaacatagttaggttcctggaaaagtacaaagattcagcccagagggatgacatgatttttgaagattgtggcgatgtgcccagtgaaccgaaagaacgaggagactttaatcatgaacgaggagagcgaaaggtctgcagattcaagcttgaatggctgggaaattgctctggattaaatgatgaaacttatggctacaaagagggcaaaccgtgcattattataaagctcaaccgagttctaggcttcaaacctaagcctcccaagaatgagtccttggagacttacccagtgatgaagtataacccaaatgtccttcccgttcagtgcactggcaagcgagatgaagataaggataaagttggaaatgtggagtattttggactgggcaactcccctggttttcctctgcagtattatccgtactatggcaaactcctgcagcccaaatacctgcagcccctgctggccgtacagttcaccaatcttaccatggacactgaaattcgcatagagtgtaaggcgtacggtgagaacattgggtacagtgagaaagaccgttttcagggacgttttgatgtaaaaattgaagttaagagctgatcacaagcacaaatctttcccactagccatttaataagttaaaaaagttcaaaaaaaactatagttgaaaaatgcatagttggactaaatatctaatgttaattagttgctttaaggtaatggattaaggggcatgcacaat

SEQ ID NO: 357211 - DNA, 1517 bp, Homo sapiens
  misc_feature (1492)..(1492): n is a, c, g, or t
ctcgaggctccgggcgacccaggtgcggatcccccagccacggaaggggcggttcacgcccagccgggagctgggagggggctgcgcggcgctgcctgcgcgtccctcaccgccgcccccgcctcctcctcgccccgcgcccaacgccccgcgcccagcgatccaagcggcccctctagccccggcggctcctttgtgccggccccgaacccgccctctcgggccgagtccctgcccctggcgccggcgattggccaccgggccgctagagggcggggcgcacggccgccggggcgcggtatatagtaaaggtagggcgggcgcagcggaattcctcggctcctggcgggagtgccggtggcgccccgcagtccgcttgtccgtccttccctctctgactctcctaccccgggcctgtctctgcagaggtcaggggaggcgggggcccagcacacgtccccagtggcagcgggagcggcagctacgggttcgcggagcccccgaccccccaagggctagaggagcgctcggcggaccaaagaaagcccgcgagcggctgcgcgcccaccaataggtgcggggctcggagccgcgcagcctgcgccgtccctccctccggccccgccccgccgccgccgccgccgccgcctccccctcctcctgctcctgccttggctcctccgccgcgcgtctcgcactccgagagccgcagcggcagcggcgcgtcctgcctgcagagagccaggccggagaagccgagcggcgcagaggacgccagggcgcgcgccgcagccacccaccctccggaccgcggcagctgctgacccgccatcgccatggcccgcgggaaagccaaggaggagggcagctggaagaaattcatctggaactcagagaagaaggagtttctgggcaggaccggtggcagttggtttaagatccttctattctacgtaatattttatggctgcctggctggcatcttcatcggaaccatccaagtgatgctgctcaccatcagtgaatttaagcccacatatcaggaccgagtggccccgccaggattaacacagattcctcagatccagaagactgaaatttcctttcgtcctaatgatcccaagagctatgaggcatatgtactgaacatagttaggttcctggaaaagtacaaagattcagcccagagggatgacatgatttttgaagattgtggcgatgtgcccagtgaaccgaaagaacgaggagactttaatcatgaacgaggagagcgaaaggtctgcagattcaagcttgaatggctgggaaattgctctggattaaatgatgaaacttatggctacaaagagggcaaaccgtgcattattataaagctcaaccgagttctaggcttcaaacctaagcctcccaagaatgagtccttggagacttacccagtgatgaagtataacccaaatgtccttcccgttcagtgcactggcaagactttcgnattcggtaccgagctcgattcgata

SEQ ID NO: 357212 - DNA, 1469 bp, Homo sapiens
ctcgaggctccgggcgacccaggtgcggatcccccagccacggaaggggcggttcacgcccagccgggagctgggagggggctgcgcggcgctgcctgcgcgtccctcaccgccgcccccgcctcctcctcgccccgcgcccaacgccccgcgcccagcgatccaagcggcccctctagccccggcggctcctttgtgccggccccgaacccgccctctcgggccgagtccctgcccctggcgccggcgattggccaccgggccgctagagggcggggcgcacggccgccggggcgcggtatatagtaaaggtagggcgggcgcagcggaattcctcggctcctggcgggagtgccggtggcgccccgcagtccgcttgtccgtccttccctctctgactctcctaccccgggcctgtctctgcagaggtcaggggaggcgggggcccagcacacgtccccagtggcagcgggagcggcagctacgggttcgcggagcccccgaccccccaagggctagaggagcgctcggcggaccaaagaaagcccgcgagcggctgcgcgcccaccaataggtgcggggctcggagccgcgcagcctgcgccgtccctccctccggccccgccccgccgccgccgccgccgccgcctccccctcctcctgctcctgccttggctcctccgccgcgcgtctcgcactccgagagccgcagcggcagcggcgcgtcctgcctgcagagagccaggccggagaagccgagcggcgcagaggacgccagggcgcgcgccgcagccacccaccctccggaccgcggcagctgctgacccgccatcgccatggcccgcgggaaagccaaggaggagggcagctggaagaaattcatctggaactcagagaagaaggagtttctgggcaggaccggtggcagttggtttaagatccttctattctacgtaatattttatggctgcctggctggcatcttcatcggaaccatccaagtgatgctgctcaccatcagtgaatttaagcccacatatcaggaccgagtggccccgccaggattaacacagattcctcagatccagaagactgaaatttcctttcgtcctaatgatcccaagagctatgaggcatatgtactgaacatagttaggttcctggaaaagtacaaagattcagcccagagggatgacatgatttttgaagattgtggcgatgtgcccagtgaaccgaaagaacgaggagactttaatcatgaacgaggagagcgaaaggtctgcagattcaagcttgaatggctgggaaattgctctggattaaatgatgaaacttatggctacaaagagggcaaaccgtgcattattataaagctcaaccgagttctaggcttcaaacctaaggcaagtaatattttaaatgatagatttagatgagtcatttacactaagtacttaattgatctgaga

SEQ ID NO: 357213 - DNA, 1484 bp, Homo sapiens
ctcgaggctccgggcgacccaggtgcggatcccccagccacggaaggggcggttcacgcccagccgggagctgggagggggctgcgcggcgctgcctgcgcgtccctcaccgccgcccccgcctcctcctcgccccgcgcccaacgccccgcgcccagcgatccaagcggcccctctagccccggcggctcctttgtgccggccccgaacccgccctctcgggccgagtccctgcccctggcgccggcgattggccaccgggccgctagagggcggggcgcacggccgccggggcgcggtatatagtaaaggtagggcgggcgcagcggaattcctcggctcctggcgggagtgccggtggcgccccgcagtccgcttgtccgtccttccctctctgactctcctaccccgggcctgtctctgcagaggtcaggggaggcgggggcccagcacacgtccccagtggcagcgggagcggcagctacgggttcgcggagcccccgaccccccaagggctagaggagcgctcggcggaccaaagaaagcccgcgagcggctgcgcgcccaccaataggtgcggggctcggagccgcgcagcctgcgccgtccctccctccggccccgccccgccgccgccgccgccgccgcctccccctcctcctgctcctgccttggctcctccgccgcgcgtctcgcactccgagagccgcagcggcagcggcgcgtcctgcctgcagagagccaggccggagaagccgagcggcgcagaggacgccagggcgcgcgccgcagccacccaccctccggaccgcggcagctgctgacccgccatcgccatggcccgcgggaaagccaaggaggagggcagctggaagaaattcatctggaactcagagaagaaggagtttctgggcaggaccggtggcagttggtttaagatccttctattctacgtaatattttatggctgcctggctggcatcttcatcggaaccatccaagtgatgctgctcaccatcagtgaatttaagcccacatatcaggaccgagtggccccgccaggtaaaatccacatgaatagcttcatttccttcagagatagcatgggtgtcactttttctattgagaaaaaattctttggaaaattactctataatgtagttttaaagcaaccatgaaaagggaaaagagaaacttctctcggctgcagccagatgtcctacccgcattgcaggcagagctcccacgggttgcagacatcttatttgcccagttctagagtgagggtgaagcgtcctggttcttggccagcctgctacccaccagctatgtgactgtgaacagattgagttctgatgggggcctctgtcttctcatttttcatattctagggtttggttagtgggatcctttccagaccttttcaactctaacagacatttttttacttcttgaggggggctatgactcaggtaaattctttt

SEQ ID NO: 357214 - DNA, 977 bp, Homo sapiens
  misc_feature (24)..(24): n is a, c, g, or t
  misc_feature (191)..(191): n is a, c, g, or t
  misc_feature (197)..(198): n is a, c, g, or t
aggctgtgaagagcgactgggtgncagcagcacctgaagagcctgtgtgaacgtactgtccttgggccgcctggcagttagccatagcccgcttcatgaaagcttcctgggttgccttcttgtttgcagccttgccaccccaggcagccaatgcactggcctggagggctcttccatatgaaaacgcttangctctnncgaattcggcacgagaaaatctttattttgaactttataaaaagcaatgcagtaccccatagactggtgttaaatgttgtctacagtgcaaaatccatgttctaacatatgtaataattgccaggagtacagtgctcttgttgatcttgtattcagtcaggttaaaacaacggacaataaaagaatgaacacattcctcgtgtgtgattcactcttgtctaaatgtcccaacctgtgacttctttactttccacaccactaattatccaagatcttgaagaagtattaacctgaaacggagaaacacataatttcttagttcagacaaattttggtcttttccacttaacagagtccaagaggttggtcaggacttcagacactggcataccccttcccaaagacactaaaagttaatcaatcaatcagaggcagagaatcgatgaagctccagtttgaagttccatttaaaaaaatcatcttgcagtgctactgctacttcactcagtttagaaaacatgaagtgttggttcctgctattgcttcactagacatatgtgttaaaaaaaaaagttgttagcacttcagtttttaaaaaatgaggttaggtttgtggttcagtaaattaaggttcataccttgctttttggttcagggattggcctaagtccttatttagctgtatttaaaaattagccttagtgtgaaagaagataaaaaagctttccaaaaaacattttccagctataattattaaagatttagtatcacttaactaa

SEQ ID NO: 357215 - DNA, 340 bp, Homo sapiens
atgatagatttagatgagtcatttacactaagtacttaattgatctgagaagacaatgtaagatagttttaaagtatactcagtgctgactttgaaacgtagccagtagagtaacaccaaaaacttctgtatccaccctgcaattcttgtagttaggacattaatctcattttctaaagttaaaggaattctgagaggcaaagctgcattctgaagtgagtctgtggcccttttcttaatactcctgctcagtatccagataacagtttctataacataaactctttaaaaaagtaaaaatggaaaaatatattttttccctggtggtctagtggttaga

SEQ ID NO: 357216 - DNA, 231 bp, Homo sapiens
cagaagactgaaatttcctttcgtcctaatgatcccaagagctatgaggcatatgtactgaacatagttaggttcctggaaaagtacaaagattcagcccagagggatgacatgatttttgaagattgtggcggtaagtagactcattgtagatgtctgtggctagttttctttctctttaactcttatttcccacttctattttttgtttaatgatcgagagataatcct

SEQ ID NO: 357217 - DNA, 411 bp, Homo sapiens
acatgcaagcgtgcacacacacgcatgctcatggatatacacacacactcaggctaccaagccctggccctgatttgaccctgcttgccttgctgcctgcccagtggtgtaatggaaaagtctcttcttcacatccgccattgcccttcccccacctcaggctcacttagcaacagtggagtgaaatgaaggtcactgtgtgtcaatcggtgggtccgggagattcccagctggcttgcttcctggtaggcaggtatgaatgtatgctgctgttctctcttttaaggttgtgggtggctgtttgtttagctctgaagtatagacggctcagtgctagcagacacattttcaaagggtcatattcttggcttgttggtaatcagaatcgggcaggagaagtggggtggatgc

SEQ ID NO: 357218 - DNA, 1015 bp, Homo sapiens
ctcgaggctccgggcgacccaggtgcggatcccccagccacggaaggggcggttcacgcccagccgggagctgggagggggctgcgcggcgctgcctgcgcgtccctcaccgccgcccccgcctcctcctcgccccgcgcccaacgccccgcgcccagcgatccaagcggcccctctagccccggcggctcctttgtgccggccccgaacccgccctctcgggccgagtccctgcccctggcgccggcgattggccaccgggccgctagagggcggggcgcacggccgccggggcgcggtatatagtaaaggtagggcgggcgcagcggaattcctcggctcctggcgggagtgccggtggcgccccgcagtccgcttgtccgtccttccctctctgactctcctaccccgggcctgtctctgcagaggtcaggggaggcgggggcccagcacacgtccccagtggcagcgggagcggcagctacgggttcgcggagcccccgaccccccaagggctagaggagcgctcggcggaccaaagaaagcccgcgagcggctgcgcgcccaccaataggtgcggggctcggagccgcgcagcctgcgccgtccctccctcggaggactactcccatacccgagcgtgccgagatctcgggcgcgagaccggacccttccccctcatcctgctgccccagctctggcgcgccctgcccattgagggcaccacacgactcccagcatcccccaccaccaccccacttagcactcgcccacaacccaaggtgaaagcctcgactgacaaccccaacaacccgccctctaccggaagcctttctccgccggaccactcccaattctactcctggacactgccctcgcaccacctctgcctcctccctcacgtaccatgtctcggcggcaccacagcacctgcgcgctgctgctcccggacccacgtgccgcgcgataccatgatgtcctcccccctctgcactccgactaccctctgcagcca

SEQ ID NO: 357219 - DNA, 3359 bp, Homo sapiens
  misc_feature (2935)..(2938): n is a, c, g, or t
  misc_feature (2942)..(2951): n is a, c, g, or t
  misc_feature (2987)..(2987): n is a, c, g, or t
  misc_feature (2991)..(2991): n is a, c, g, or t
  misc_feature (2999)..(2999): n is a, c, g, or t
  misc_feature (3026)..(3026): n is a, c, g, or t
  misc_feature (3034)..(3034): n is a, c, g, or t
  misc_feature (3036)..(3036): n is a, c, g, or t
  misc_feature (3041)..(3041): n is a, c, g, or t
  misc_feature (3043)..(3043): n is a, c, g, or t
  misc_feature (3057)..(3057): n is a, c, g, or t
  misc_feature (3059)..(3059): n is a, c, g, or t
  misc_feature (3064)..(3065): n is a, c, g, or t
  misc_feature (3097)..(3097): n is a, c, g, or t
  misc_feature (3113)..(3113): n is a, c, g, or t
  misc_feature (3124)..(3124): n is a, c, g, or t
  misc_feature (3127)..(3127): n is a, c, g, or t
  misc_feature (3176)..(3177): n is a, c, g, or t
  misc_feature (3191)..(3192): n is a, c, g, or t
  misc_feature (3200)..(3200): n is a, c, g, or t
  misc_feature (3222)..(3222): n is a, c, g, or t
  misc_feature (3224)..(3224): n is a, c, g, or t
  misc_feature (3228)..(3228): n is a, c, g, or t
  misc_feature (3230)..(3230): n is a, c, g, or t
  misc_feature (3238)..(3238): n is a, c, g, or t
  misc_feature (3242)..(3242): n is a, c, g, or t
  misc_feature (3248)..(3248): n is a, c, g, or t
  misc_feature (3254)..(3254): n is a, c, g, or t
  misc_feature (3257)..(3257): n is a, c, g, or t
  misc_feature (3263)..(3263): n is a, c, g, or t
  misc_feature (3343)..(3343): n is a, c, g, or t
ctcgaggctccgggcgacccaggtgcggatcccccagccacggaaggggcggttcacgcccagccgggagctgggagggggctgcgcggcgctgcctgcgcgtccctcaccgccgcccccgcctcctcctcgccccgcgcccaacgccccgcgcccagcgatccaagcggcccctctagccccggcggctcctttgtgccggccccgaacccgccctctcgggccgagtccctgcccctggcgccggcgattggccaccgggccgctagagggcggggcgcacggccgccggggcgcggtatatagtaaaggtagggcgggcgcagcggaattcctcggctcctggcgggagtgccggtggcgccccgcagtccgcttgtccgtccttccctctctgactctcctaccccgggcctgtctctgcagaggtcaggggaggcgggggcccagcacacgtccccagtggcagcgggagcggcagctacgggttcgcggagcccccgaccccccaagggctagaggagcgctcggcggaccaaagaaagcccgcgagcggctgcgcgcccaccaataggtgcggggctcggagccgcgcagcctgcgccgtccctccctccggccccgccccgccgccgccgccgccgccgcctccccctcctcctgctcctgccttggctcctccgccgcgcgtctcgcactccgagagccgcagcggcagcggcgcgtcctgcctgcagagagccaggccggagaagccgagcggcgcagaggacgccagggcgcgcgccgcagccacccaccctccggaccgcggcagctgctgacccgccatcgccatggcccgcgggaaagccaaggaggagggcagctggaagaaattcatctggaactcagagaagaaggagtttctgggcaggaccggtggcagttggtttaagatccttctattctacgtaatattttatggctgcctggctggcatcttcatcggaaccatccaagtgatgctgctcaccatcagtgaatttaagcccacatatcaggaccgagtggccccgccaggattaacacagattcctcagatccagaagactgaaatttcctttcgtcctaatgatcccaagagctatgaggcatatgtactgaacatagttaggttcctggaaaagtacaaagattcagcccagagggatgacatgatttttgaagattgtggcgatgtgcccagtgaaccgaaagaacgaggagactttaatcatgaacgaggagagcgaaaggtctgcagattcaagcttgaatggctgggaaattgctctggattaaatgatgaaacttatggctacaaagagggcaaaccgtgcattattataaagctcaaccgagttctaggcttcaaacctaagcctcccaagaatgagtccttggagacttacccagtgatgaagtataacccaaatgtccttcccgttcagtgcactggcaagcgagatgaagataaggataaagttggaaatgtggagtattttggactgggcaactcccctggttttcctctgcagtattatccgtactatggcaaactcctgcagcccaaatacctgcagcccctgctggccgtacagttcaccaatcttaccatggacactgaaattcgcatagagtgtaaggcgtacggtgagaacattgggtacagtgagaaagaccgttttcagggacgttttgatgtaaaaattgaagttaagagctgatcacaagcacaaatctttcccactagccatttaataagttaaaaaaagatacaaaaacaaaaacctactagtcttgaacaaactgtcatacgtatgggacctacacttaatctatatgctttacactagctttctgcatttaataggttagaatgtaaattaaagtgtagcaatagcaacaaaatatttattctactgtaaatgacaaaagaaaaagaaaaattgagccttgggacgtgcccatttttactgtaaattatgattccgtaactgacttgtagtaagcagtgtttctggcccctaagtattgctgccttgtgtattttatttagtgtacagtactacaggtgcatactctggtcatttttcaagccatgttttattgtatctgttttctactttatgtgagcaaggtttgctgtccaaggtgtaaatattcaacgggaataaaactggcatggtaatttttttttttgtttgttttttgttttttggctctttcaaaggtaatggcccatcgatgagcatttttaacatactccatagtcttttcctgtggtgttaggtctttatttttatttttttcctgggggctggggtgggggtttgtcatgggggaactgccctttaaattttaagtgacactacagaaaaacacaaaaaggtgatgggttgtgttatgcttgtattgaatgctgtcttgacatctcttgccttgtcctccggtatgttctaaagctgtgtctgagatctggatctgcccatcactttggctagtgacagggctaattaatttgctttatacattttcttttactttccttttttcctttctggaggcatcacatgctggtgctgtgtctttatgaatgttttaaccattttcatggtggaagaattttatatttatgcagttgtacaattttatttttttctgcaagaaaaagtgtaatgtatgaaataaaccaaagtcacttgtttgaaaataaatctttattttgaactttataaaaagcaatgcagtaccccatagactggtgttaaatgttgtctacagtgcaaaatccatgttctaacatatgtaataattgccaggagtacagtgctcttgttgatcttgtattcagtcaggttaaaacaacggacaataaaagaatgaacacaaaaaaaaaaaaaaaaaaaaaaannnncccnnnnnnnnnnccccccccccccccccaaaaaaaaaaaaaaaaaaantaantaaaaatnttttttttttttttttttttttttttnttttattntntaatntntttttttttttttntntattnnttttataataataatatttatttataatatanatttatttattttaantatatattaanaanaatatttattatatttttttataaaatttaaattttttaattgtatatnnaaaaaaaatatatnnttatttantaaattttatttatatattttntnaatntnaattattntttntttttntataanatntttatntttattatatttttatttatataaaaattttatttttttttttttttttattttttttttaatttttatattttttattntataattttatatttt

SEQ ID NO: 357220 - DNA, 3498 bp, Homo sapiens
ctcgaggctccgggcgacccaggtgcggatcccccagccacggaaggggcggttcacgcccagccgggagctgggagggggctgcgcggcgctgcctgcgcgtccctcaccgccgcccccgcctcctcctcgccccgcgcccaacgccccgcgcccagcgatccaagcggcccctctagccccggcggctcctttgtgccggccccgaacccgccctctcgggccgagtccctgcccctggcgccggcgattggccaccgggccgctagagggcggggcgcacggccgccggggcgcggtatatagtaaaggtagggcgggcgcagcggaattcctcggctcctggcgggagtgccggtggcgccccgcagtccgcttgtccgtccttccctctctgactctcctaccccgggcctgtctctgcagaggtcaggggaggcgggggcccagcacacgtccccagtggcagcgggagcggcagctacgggttcgcggagcccccgaccccccaagggctagaggagcgctcggcggaccaaagaaagcccgcgagcggctgcgcgcccaccaataggtgcggggctcggagccgcgcagcctgcgccgtccctccctccggccccgccccgccgccgccgccgccgccgcctccccctcctcctgctcctgccttggctcctccgccgcgcgtctcgcactccgagagccgcagcggcagcggcgcgtcctgcctgcagagagccaggccggagaagccgagcggcgcagaggacgccagggcgcgcgccgcagccacccaccctccggaccgcggcagctgctgacccgccatcgccatggcccgcgggaaagccaaggaggagggcagctggaagaaattcatctggaactcagagaagaaggagtttctgggcaggaccggtggcagttggtttaagatccttctattctacgtaatattttatggctgcctggctggcatcttcatcggaaccatccaagtgatgctgctcaccatcagtgaatttaagcccacatatcaggaccgagtggccccgccaggattaacacagattcctcagatccagaagactgaaatttcctttcgtcctaatgatcccaagagctatgaggcatatgtactgaacatagttaggttcctggaaaagtacaaagattcagcccagagggatgacatgatttttgaagattgtggcgatgtgcccagtgaaccgaaagaacgaggagactttaatcatgaacgaggagagcgaaaggtctgcagattcaagcttgaatggctgggaaattgctctggattaaatgatgaaacttatggctacaaagagggcaaaccgtgcattattataaagctcaaccgagttctaggcttcaaacctaagcctcccaagaatgagtccttggagacttacccagtgatgaagtataacccaaatgtccttcccgttcagtgcactggcaagcgagatgaagataaggataaagttggaaatgtggagtattttggactgggcaactcccctggttttcctctgcagtattatccgtactatggcaaactcctgcagcccaaatacctgcagcccctgctggccgtacagttcaccaatcttaccatggacactgaaattcgcatagagtgtaaggcgtacggtgagaacattgggtacagtgagaaagaccgttttcagggacgttttgatgtaaaaattgaagttaagagctgatcacaagcacaaatctttcccactagccatttaataagttaaaaaaagatacaaaaacaaaaacctactagtcttgaacaaactgtcatacgtatgggacctacacttaatctatatgctttacactagctttctgcatttaataggttagaatgtaaattaaagtgtagcaatagcaacaaaatatttattctactgtaaatgacaaaagaaaaagaaaaattgagccttgggacgtgcccatttttactgtaaattatgattccgtaactgacttgtagtaagcagtgtttctggcccctaagtattgctgccttgtgtattttatttagtgtacagtactacaggtgcatactctggtcatttttcaagccatgttttattgtatctgttttctactttatgtgagcaaggtttgctgtccaaggtgtaaatattcaacgggaataaaactggcatggtaatttttttttttgtttgttttttgttttttggctctttcaaaggtaatggcccatcgatgagcatttttaacatactccatagtcttttcctgtggtgttaggtctttatttttatttttttcctgggggctggggtgggggtttgtcatgggggaactgccctttaaattttaagtgacactacagaaaaacacaaaaaggtgatgggttgtgttatgcttgtattgaatgctgtcttgacatctcttgccttgtcctccggtatgttctaaagctgtgtctgagatctggatctgcccatcactttggctagtgacagggctaattaatttgctttatacattttcttttactttccttttttcctttctggaggcatcacatgctggtgctgtgtctttatgaatgttttaaccattttcatggtggaagaattttatatttatgcagttgtacaattttatttttttctgcaagaaaaagtgtaatgtatgaaataaaccaaagtcacttgtttgaaaataaatctttattttgaactttataaaaagcaatgcagtaccccatagactggtgttaaatgttgtctacagtgcaaaatccatgttctaacatatgtaataattgccaggagtacagtgctcttgttgatcttgtattcagtcaggttaaaacaacggacaataaaagaatgaacacattcctcgtgtgtgattcactcttgtctaaatgtcccaacctgtgacttctttactttccacaccactaattatccaagatcttgaagaagtattaacctgaaacggagaaacacataatttcttagttcagacaaattttggtcttttccacttaacagagtccaagaggttggtcaggacttcagacactggcataccccttcccaaagacactaaaagttaatcaatcaatcagaggcagagaatcgatgaagctccagtttgaagttccatttaaaaaaatcatcttgcagtgctactgctacttcactcagtttagaaaacatgaagtgttggttcctgctattgcttcactagacatatgtgttaaaaaaaaaagttgttagcacttcagtttttaaaaaatgaggttaggtttgtggttcagtaaattaaggttcataccttgctttttggttcagggattggcctaagtccttatttagctgtatttaaaaattagccttagtgtgaaagaagataaaaaagctttccaaaaaacattttccagctataattattaaagatttagtatcacttaactaa

SEQ ID NO: 357221 - DNA, 3051 bp, Homo sapiens
ctcgaggctccgggcgacccaggtgcggatcccccagccacggaaggggcggttcacgcccagccgggagctgggagggggctgcgcggcgctgcctgcgcgtccctcaccgccgcccccgcctcctcctcgccccgcgcccaacgccccgcgcccagcgatccaagcggcccctctagccccggcggctcctttgtgccggccccgaacccgccctctcgggccgagtccctgcccctggcgccggcgattggccaccgggccgctagagggcggggcgcacggccgccggggcgcggtatatagtaaaggtagggcgggcgcagcggaattcctcggctcctggcgggagtgccggtggcgccccgcagtccgcttgtccgtccttccctctctgactctcctaccccgggcctgtctctgcagaggtcaggggaggcgggggcccagcacacgtccccagtggcagcgggagcggcagctacgggttcgcggagcccccgaccccccaagggctagaggagcgctcggcggaccaaagaaagcccgcgagcggctgcgcgcccaccaataggtgcggggctcggagccgcgcagcctgcgccgtccctccctccggccccgccccgccgccgccgccgccgccgcctccccctcctcctgctcctgccttggctcctccgccgcgcgtctcgcactccgagagccgcagcggcagcggcgcgtcctgcctgcagagagccaggccggagaagccgagcggcgcagaggacgccagggcgcgcgccgcagccacccaccctccggaccgcggcagctgctgacccgccatcgccatggcccgcgggaaagccaaggaggagggcagctggaagaaattcatctggaactcagagaagaaggagtttctgggcaggaccggtggcagttggtttaagatccttctattctacgtaatattttatggctgcctggctggcatcttcatcggaaccatccaagtgatgctgctcaccatcagtgaatttaagcccacatatcaggaccgagtggccccgccaggattaacacagattcctcagatccagaagactgaaatttcctttcgtcctaatgatcccaagagctatgaggcatatgtactgaacatagttaggttcctggaaaagtacaaagattcagcccagagggatgacatgatttttgaagattgtggcgatgtgcccagtgaaccgaaagaacgaggagactttaatcatgaacgaggagagcgaaaggtctgcagattcaagcttgaatggctgggaaattgctctggattaaatgatgaaacttatggctacaaagagggcaaaccgtgcattattataaagctcaaccgagttctaggcttcaaacctaagcctcccaagaatgagtccttggagacttacccagtgatgaagtataacccaaatgtccttcccgttcagtgcactggcaagcgagatgaagataaggataaagttggaaatgtggagtattttggactgggcaactcccctggttttcctctgcagtattatccgtactatggcaaactcctgcagcccaaatacctgcagcccctgctggccgtacagttcaccaatcttaccatggacactgaaattcgcatagagtgtaaggcgtacggtgagaacattgggtacagtgagaaagaccgttttcagggacgttttgatgtaaaaattgaagttaagagctgatcacaagcacaaatctttcccactagccatttaataagttaaaaaaagatacaaaaacaaaaacctactagtcttgaacaaactgtcatacgtatgggacctacacttaatctatatgctttacactagctttctgcatttaataggttagaatgtaaattaaagtgtagcaatagcaacaaaatatttattctactgtaaatgacaaaagaaaaagaaaaattgagccttgggacgtgcccatttttactgtaaattatgattccgtaactgacttgtagtaagcagtgtttctggcccctaagtattgctgccttgtgtattttatttagtgtacagtactacaggtgcatactctggtcatttttcaagccatgttttattgtatctgttttctactttatgtgagcaaggtttgctgtccaaggtgtaaatattcaacgggaataaaactggcatggtaatttttttttttgtttgttttttgttttttggctctttcaaaggtaatggcccatcgatgagcatttttaacatactccatagtcttttcctgtggtgttaggtctttatttttatttttttcctgggggctggggtgggggtttgtcatgggggaactgccctttaaattttaagtgacactacagaaaaacacaaaaaggtgatgggttgtgttatgcttgtattgaatgctgtcttgacatctcttgccttgtcctccggtatgttctaaagctgtgtctgagatctggatctgcccatcactttggctagtgacagggctaattaatttgctttatacattttcttttactttccttttttcctttctggaggcatcacatgctggtgctgtgtctttatgaatgttttaaccattttcatggtggaagaattttatatttatgcagttgtacaattttatttttttctgcaagaaaaagtgtaatgtatgaaataaaccaaagtcacttgtttgaaaataaatctttattttgaactttataaaaagcaatgcagtaccccatagactggtgttaaatgttgtctacagtgcaaaatccatgttctaacatatgtaataattgccaggagtacagtgctcttgttgatcttgtattcagtcaggttaaaacaacggacaataaaagaatgaacacattcctcgtgtgtgattcactcttgtctaaatgtcccaacctgtgacttctttactttccacaccactaattatccaagatcttgaagaagtattaacaacaagcctctctttttttaattacgtgcatattgttgtgat

SEQ ID NO: 357222 - DNA, 3066 bp, Homo sapiens
ctcgaggctccgggcgacccaggtgcggatcccccagccacggaaggggcggttcacgcccagccgggagctgggagggggctgcgcggcgctgcctgcgcgtccctcaccgccgcccccgcctcctcctcgccccgcgcccaacgccccgcgcccagcgatccaagcggcccctctagccccggcggctcctttgtgccggccccgaacccgccctctcgggccgagtccctgcccctggcgccggcgattggccaccgggccgctagagggcggggcgcacggccgccggggcgcggtatatagtaaaggtagggcgggcgcagcggaattcctcggctcctggcgggagtgccggtggcgccccgcagtccgcttgtccgtccttccctctctgactctcctaccccgggcctgtctctgcagaggtcaggggaggcgggggcccagcacacgtccccagtggcagcgggagcggcagctacgggttcgcggagcccccgaccccccaagggctagaggagcgctcggcggaccaaagaaagcccgcgagcggctgcgcgcccaccaataggtgcggggctcggagccgcgcagcctgcgccgtccctccctccggccccgccccgccgccgccgccgccgccgcctccccctcctcctgctcctgccttggctcctccgccgcgcgtctcgcactccgagagccgcagcggcagcggcgcgtcctgcctgcagagagccaggccggagaagccgagcggcgcagaggacgccagggcgcgcgccgcagccacccaccctccggaccgcggcagctgctgacccgccatcgccatggcccgcgggaaagccaaggaggagggcagctggaagaaattcatctggaactcagagaagaaggagtttctgggcaggaccggtggcagttggtttaagatccttctattctacgtaatattttatggctgcctggctggcatcttcatcggaaccatccaagtgatgctgctcaccatcagtgaatttaagcccacatatcaggaccgagtggccccgccaggattaacacagattcctcagatccagaagactgaaatttcctttcgtcctaatgatcccaagagctatgaggcatatgtactgaacatagttaggttcctggaaaagtacaaagattcagcccagagggatgacatgatttttgaagattgtggcgatgtgcccagtgaaccgaaagaacgaggagactttaatcatgaacgaggagagcgaaaggtctgcagattcaagcttgaatggctgggaaattgctctggattaaatgatgaaacttatggctacaaagagggcaaaccgtgcattattataaagctcaaccgagttctaggcttcaaacctaagcctcccaagaatgagtccttggagacttacccagtgatgaagtataacccaaatgtccttcccgttcagtgcactggcaagcgagatgaagataaggataaagttggaaatgtggagtattttggactgggcaactcccctggttttcctctgcagtattatccgtactatggcaaactcctgcagcccaaatacctgcagcccctgctggccgtacagttcaccaatcttaccatggacactgaaattcgcatagagtgtaaggcgtacggtgagaacattgggtacagtgagaaagaccgttttcagggacgttttgatgtaaaaattgaagttaagagctgatcacaagcacaaatctttcccactagccatttaataagttaaaaaaagatacaaaaacaaaaacctactagtcttgaacaaactgtcatacgtatgggacctacacttaatctatatgctttacactagctttctgcatttaataggttagaatgtaaattaaagtgtagcaatagcaacaaaatatttattctactgtaaatgacaaaagaaaaagaaaaattgagccttgggacgtgcccatttttactgtaaattatgattccgtaactgacttgtagtaagcagtgtttctggcccctaagtattgctgccttgtgtattttatttagtgtacagtactacaggtgcatactctggtcatttttcaagccatgttttattgtatctgttttctactttatgtgagcaaggtttgctgtccaaggtgtaaatattcaacgggaataaaactggcatggtaatttttttttttgtttgttttttgttttttggctctttcaaaggtaatggcccatcgatgagcatttttaacatactccatagtcttttcctgtggtgttaggtctttatttttatttttttcctgggggctggggtgggggtttgtcatgggggaactgccctttaaattttaagtgacactacagaaaaacacaaaaaggtgatgggttgtgttatgcttgtattgaatgctgtcttgacatctcttgccttgtcctccggtatgttctaaagctgtgtctgagatctggatctgcccatcactttggctagtgacagggctaattaatttgctttatacattttcttttactttccttttttcctttctggaggcatcacatgctggtgctgtgtctttatgaatgttttaaccattttcatggtggaagaattttatatttatgcagttgtacaattttatttttttctgcaagaaaaagtgtaatgtatgaaataaaccaaagtcacttgtttgaaaataaatctttattttgaactttataaaaagcaatgcagtaccccatagactggtgttaaatgttgtctacagtgcaaaatccatgttctaacatatgtaataattgccaggagtacagtgctcttgttgatcttgtattcagtcaggttaaaacaacggacaataaaagaatgaacacattcctcgtgtgtgattcactcttgtctaaatgtcccaacctgtgacttctttactttccacaccactaattatccaagatcttgaagaagtattaataaagccccctctttcttcccctctcttctcgcttcgtcgctcctatcactaatcttc

SEQ ID NO: 357223 - DNA, 3053 bp, Homo sapiens
ctcgaggctccgggcgacccaggtgcggatcccccagccacggaaggggcggttcacgcccagccgggagctgggagggggctgcgcggcgctgcctgcgcgtccctcaccgccgcccccgcctcctcctcgccccgcgcccaacgccccgcgcccagcgatccaagcggcccctctagccccggcggctcctttgtgccggccccgaacccgccctctcgggccgagtccctgcccctggcgccggcgattggccaccgggccgctagagggcggggcgcacggccgccggggcgcggtatatagtaaaggtagggcgggcgcagcggaattcctcggctcctggcgggagtgccggtggcgccccgcagtccgcttgtccgtccttccctctctgactctcctaccccgggcctgtctctgcagaggtcaggggaggcgggggcccagcacacgtccccagtggcagcgggagcggcagctacgggttcgcggagcccccgaccccccaagggctagaggagcgctcggcggaccaaagaaagcccgcgagcggctgcgcgcccaccaataggtgcggggctcggagccgcgcagcctgcgccgtccctccctccggccccgccccgccgccgccgccgccgccgcctccccctcctcctgctcctgccttggctcctccgccgcgcgtctcgcactccgagagccgcagcggcagcggcgcgtcctgcctgcagagagccaggccggagaagccgagcggcgcagaggacgccagggcgcgcgccgcagccacccaccctccggaccgcggcagctgctgacccgccatcgccatggcccgcgggaaagccaaggaggagggcagctggaagaaattcatctggaactcagagaagaaggagtttctgggcaggaccggtggcagttggtttaagatccttctattctacgtaatattttatggctgcctggctggcatcttcatcggaaccatccaagtgatgctgctcaccatcagtgaatttaagcccacatatcaggaccgagtggccccgccaggattaacacagattcctcagatccagaagactgaaatttcctttcgtcctaatgatcccaagagctatgaggcatatgtactgaacatagttaggttcctggaaaagtacaaagattcagcccagagggatgacatgatttttgaagattgtggcgatgtgcccagtgaaccgaaagaacgaggagactttaatcatgaacgaggagagcgaaaggtctgcagattcaagcttgaatggctgggaaattgctctggattaaatgatgaaacttatggctacaaagagggcaaaccgtgcattattataaagctcaaccgagttctaggcttcaaacctaagcctcccaagaatgagtccttggagacttacccagtgatgaagtataacccaaatgtccttcccgttcagtgcactggcaagcgagatgaagataaggataaagttggaaatgtggagtattttggactgggcaactcccctggttttcctctgcagtattatccgtactatggcaaactcctgcagcccaaatacctgcagcccctgctggccgtacagttcaccaatcttaccatggacactgaaattcgcatagagtgtaaggcgtacggtgagaacattgggtacagtgagaaagaccgttttcagggacgttttgatgtaaaaattgaagttaagagctgatcacaagcacaaatctttcccactagccatttaataagttaaaaaaagatacaaaaacaaaaacctactagtcttgaacaaactgtcatacgtatgggacctacacttaatctatatgctttacactagctttctgcatttaataggttagaatgtaaattaaagtgtagcaatagcaacaaaatatttattctactgtaaatgacaaaagaaaaagaaaaattgagccttgggacgtgcccatttttactgtaaattatgattccgtaactgacttgtagtaagcagtgtttctggcccctaagtattgctgccttgtgtattttatttagtgtacagtactacaggtgcatactctggtcatttttcaagccatgttttattgtatctgttttctactttatgtgagcaaggtttgctgtccaaggtgtaaatattcaacgggaataaaactggcatggtaatttttttttttgtttgttttttgttttttggctctttcaaaggtaatggcccatcgatgagcatttttaacatactccatagtcttttcctgtggtgttaggtctttatttttatttttttcctgggggctggggtgggggtttgtcatgggggaactgccctttaaattttaagtgacactacagaaaaacacaaaaaggtgatgggttgtgttatgcttgtattgaatgctgtcttgacatctcttgccttgtcctccggtatgttctaaagctgtgtctgagatctggatctgcccatcactttggctagtgacagggctaattaatttgctttatacattttcttttactttccttttttcctttctggaggcatcacatgctggtgctgtgtctttatgaatgttttaaccattttcatggtggaagaattttatatttatgcagttgtacaattttatttttttctgcaagaaaaagtgtaatgtatgaaataaaccaaagtcacttgtttgaaaataaatctttattttgaactttataaaaagcaatgcagtaccccatagactggtgttaaatgttgtctacagtgcaaaatccatgttctaacatatgtaataattgccaggagtacagtgctcttgttgatcttgtattcagtcaggttaaaacaacggacaataaaagaatgaacacattcctcgtgtgtgattcactcttgtctaaatgtcccaacctgtgacttctttactttccacaccactaattatccaagatcttgaagaagtattaatagaccccttctctgcccataaatagtcgaccaggtttcatatca

SEQ ID NO: 357224 - DNA, 3466 bp, Homo sapiens
ctcgaggctccgggcgacccaggtgcggatcccccagccacggaaggggcggttcacgcccagccgggagctgggagggggctgcgcggcgctgcctgcgcgtccctcaccgccgcccccgcctcctcctcgccccgcgcccaacgccccgcgcccagcgatccaagcggcccctctagccccggcggctcctttgtgccggccccgaacccgccctctcgggccgagtccctgcccctggcgccggcgattggccaccgggccgctagagggcggggcgcacggccgccggggcgcggtatatagtaaaggtagggcgggcgcagcggaattcctcggctcctggcgggagtgccggtggcgccccgcagtccgcttgtccgtccttccctctctgactctcctaccccgggcctgtctctgcagaggtcaggggaggcgggggcccagcacacgtccccagtggcagcgggagcggcagctacgggttcgcggagcccccgaccccccaagggctagaggagcgctcggcggaccaaagaaagcccgcgagcggctgcgcgcccaccaataggtgcggggctcggagccgcgcagcctgcgccgtccctccctccggccccgccccgccgccgccgccgccgccgcctccccctcctcctgctcctgccttggctcctccgccgcgcgtctcgcactccgagagccgcagcggcagcggcgcgtcctgcctgcagagagccaggccggagaagccgagcggcgcagaggacgccagggcgcgcgccgcagccacccaccctccggaccgcggcagctgctgacccgccatcgccatggcccgcgggaaagccaaggaggagggcagctggaagaaattcatctggaactcagagaagaaggagtttctgggcaggaccggtggcagttggtttaagatccttctattctacgtaatattttatggctgcctggctggcatcttcatcggaaccatccaagtgatgctgctcaccatcagtgaatttaagcccacatatcaggaccgagtggccccgccaggattaacacagattcctcagatccagaagactgaaatttcctttcgtcctaatgatcccaagagctatgaggcatatgtactgaacatagttaggttcctggaaaagtacaaagattcagcccagagggatgacatgatttttgaagattgtggcgatgtgcccagtgaaccgaaagaacgaggagactttaatcatgaacgaggagagcgaaaggtctgcagattcaagcttgaatggctgggaaattgctctggattaaatgatgaaacttatggctacaaagagggcaaaccgtgcattattataaagctcaaccgagttctaggcttcaaacctaagcctcccaagaatgagtccttggagacttacccagtgatgaagtataacccaaatgtccttcccgttcagtgcactggcaagcgagatgaagataaggataaagttggaaatgtggagtattttggactgggcaactcccctggttttcctctgcagtattatccgtactatggcaaactcctgcagcccaaatacctgcagcccctgctggccgtacagttcaccaatcttaccatggacactgaaattcgcatagagtgtaaggcgtacggtgagaacattgggtacagtgagaaagaccgttttcagggacgttttgatgtaaaaattgaagttaagagctgatcacaagcacaaatctttcccactagccatttaataagttaaaaaaagatacaaaaacaaaaacctactagtcttgaacaaactgtcatacgtatgggacctacacttaatctatatgctttacactagctttctgcatttaataggttagaatgtaaattaaagtgtagcaatagcaacaaaatatttattctactgtaaatgacaaaagaaaaagaaaaattgagccttgggacgtgcccatttttactgtaaattatgattccgtaactgacttgtagtaagcagtgtttctggcccctaagtattgctgccttgtgtattttatttagtgtacagtactacaggtgcatactctggtcatttttcaagccatgttttattgtatctgttttctactttatgtgagcaaggtttgctgtccaaggtgtaaatattcaacgggaataaaactggcatggtaatttttttttttgtttgttttttgttttttggctctttcaaaggtaatggcccatcgatgagcatttttaacatactccatagtcttttcctgtggtgttaggtctttatttttatttttttcctgggggctggggtgggggtttgtcatgggggaactgccctttaaattttaagtgacactacagaaaaacacaaaaaggtgatgggttgtgttatgcttgtattgaatgctgtcttgacatctcttgccttgtcctccggtatgttctaaagctgtgtctgagatctggatctgcccatcactttggctagtgacagggctaattaatttgctttatacattttcttttactttccttttttcctttctggaggcatcacatgctggtgctgtgtctttatgaatgttttaaccattttcatggtggaagaattttatatttatgcagttgtacaattttatttttttctgcaagaaaaagtgtaatgtatgaaataaaccaaagtcacttgtttgaaaataaatctttattttgaactttataaaaagcaatgcagtaccccatagactggtagtgcaaaatccatgttctaacatatgtaataattgccaggagtacagtgctcttgttgatcttgtattcagtcaggttaaaaaatgaacacattcctcgtgtgtgattcactcttgtctaaatgtcccaacctgtgacttctttactttccacaccactaattatccaagatcttgaagaagtattaacctgaaacggagaaacacataatttcttagttcagacaaattttggtcttttccacttaacagagtccaagaggttggtcaggacttcagacactggcataccccttcccaaagacactaaaagttaatcaatcaatcagaggcagagaatcgatgaagctccagtttgaagttccatttaaaaaaatcatcttgcagtgctactgctacttcactcagtttagaaaacatgaagtgttggttcctgctattgcttcactagacatatgtgttaaaaaaaaaagttgttagcacttcagtttttaaaaaatgaggttaggtttgtggttcagtaaattaaggttcataccttgctttttggttcagggattggcctaagtccttatttagctgtatttaaaaattagccttagtgtgaaagaagataaaaaagctttccaaaaaacattttccagctataattattaaagatttagtatcacttaactaa

SEQ ID NO: 357225 - DNA, 2541 bp, Homo sapiens
  misc_feature (2234)..(2235): n is a, c, g, or t
  misc_feature (2240)..(2242): n is a, c, g, or t
  misc_feature (2249)..(2249): n is a, c, g, or t
  misc_feature (2253)..(2253): n is a, c, g, or t
  misc_feature (2256)..(2256): n is a, c, g, or t
  misc_feature (2262)..(2263): n is a, c, g, or t
  misc_feature (2270)..(2270): n is a, c, g, or t
ctcgaggctccgggcgacccaggtgcggatcccccagccacggaaggggcggttcacgcccagccgggagctgggagggggctgcgcggcgctgcctgcgcgtccctcaccgccgcccccgcctcctcctcgccccgcgcccaacgccccgcgcccagcgatccaagcggcccctctagccccggcggctcctttgtgccggccccgaacccgccctctcgggccgagtccctgcccctggcgccggcgattggccaccgggccgctagagggcggggcgcacggccgccggggcgcggtatatagtaaaggtagggcgggcgcagcggaattcctcggctcctggcgggagtgccggtggcgccccgcagtccgcttgtccgtccttccctctctgactctcctaccccgggcctgtctctgcagaggtcaggggaggcgggggcccagcacacgtccccagtggcagcgggagcggcagctacgggttcgcggagcccccgaccccccaagggctagaggagcgctcggcggaccaaagaaagcccgcgagcggctgcgcgcccaccaataggtgcggggctcggagccgcgcagcctgcgccgtccctccctccggccccgccccgccgccgccgccgccgccgcctccccctcctcctgctcctgccttggctcctccgccgcgcgtctcgcactccgagagccgcagcggcagcggcgcgtcctgcctgcagagagccaggccggagaagccgagcggcgcagaggacgccagggcgcgcgccgcagccacccaccctccggaccgcggcagctgctgacccgccatcgccatggcccgcgggaaagccaaggaggagggcagctggaagaaattcatctggaactcagagaagaaggagtttctgggcaggaccggtggcagttggtttaagatccttctattctacgtaatattttatggctgcctggctggcatcttcatcggaaccatccaagtgatgctgctcaccatcagtgaatttaagcccacatatcaggaccgagtggccccgccaggattaacacagattcctcagatccagaagactgaaatttcctttcgtcctaatgatcccaagagctatgaggcatatgtactgaacatagttaggttcctggaaaagtacaaagattcagcccagagggatgacatgatttttgaagattgtggcgatgtgcccagtgaaccgaaagaacgaggagactttaatcatgaacgaggagagcgaaaggtctgcagattcaagcttgaatggctgggaaattgctctggattaaatgatgaaacttatggctacaaagagggcaaaccgtgcattattataaagctcaaccgagttctaggcttcaaacctaagcctcccaagaatgagtccttggagacttacccagtgatgaagtataacccaaatgtccttcccgttcagtgcactggcaagcgagatgaagataaggataaagttggaaatgtggagtattttggactgggcaactcccctggttttcctctgcagtattatccgtactatggcaaactcctgcagcccaaatacctgcagcccctgctggccgtacagttcaccaatcttaccatggacactgaaattcgcatagagtgtaaggcgtacggtgagaacattgggtacagtgagaaagaccgttttcagggacgttttgatgtaaaaattgaagttaagagctgatcacaagcacaaatctttcccactagccatttaataagttaaaaaaagatacaaaaacaaaaacctactagtcttgaacaaactgtcatacgtatgggacctacacttaatctatatgctttacactagctttctgcatttaataggttagaatgtaaattaaagtgtagcaatagcaacaaaatatttattctactgtaaatgacaaaagaaaaagaaaaattgagccttgggacgtgcccatttttactgtaaattatgattccgtaactgacttgtagtaagcagtgtttctggcccctaagtattgctgccttgtgtattttatttagtgtacagtactacaggtgcatactctggtcatttttcaagccatgttttattgtatctgttttctactttatgtgagcaaggtttgctgtccaaggtgtaaatattcaacgggaataaaactggcatggtaatttttttttttgtaaaaagggnnggggnnnttcaaanggtnatnggcccnngatgaanctttttaaaatcaccaaaggactttgaccggggggaagggctacaattaaattaacccgcggggccggggggagggttgaaggggaagcccttacattagtggacctcagaaaccacaaagggggtgtatgttgtctggatgggtggaatgtggggccgatttaaacgggtgaacggtgccaccatggagaagcaaaggtaaacataaactattggagaagggttagagacatggaattggcctttcactgaacgtattaagagtcttcat

SEQ ID NO: 357226 - DNA, 2417 bp, Homo sapiens
ctcgaggctccgggcgacccaggtgcggatcccccagccacggaaggggcggttcacgcccagccgggagctgggagggggctgcgcggcgctgcctgcgcgtccctcaccgccgcccccgcctcctcctcgccccgcgcccaacgccccgcgcccagcgatccaagcggcccctctagccccggcggctcctttgtgccggccccgaacccgccctctcgggccgagtccctgcccctggcgccggcgattggccaccgggccgctagagggcggggcgcacggccgccggggcgcggtatatagtaaaggtagggcgggcgcagcggaattcctcggctcctggcgggagtgccggtggcgccccgcagtccgcttgtccgtccttccctctctgactctcctaccccgggcctgtctctgcagaggtcaggggaggcgggggcccagcacacgtccccagtggcagcgggagcggcagctacgggttcgcggagcccccgaccccccaagggctagaggagcgctcggcggaccaaagaaagcccgcgagcggctgcgcgcccaccaataggtgcggggctcggagccgcgcagcctgcgccgtccctccctccggccccgccccgccgccgccgccgccgccgcctccccctcctcctgctcctgccttggctcctccgccgcgcgtctcgcactccgagagccgcagcggcagcggcgcgtcctgcctgcagagagccaggccggagaagccgagcggcgcagaggacgccagggcgcgcgccgcagccacccaccctccggaccgcggcagctgctgacccgccatcgccatggcccgcgggaaagccaaggaggagggcagctggaagaaattcatctggaactcagagaagaaggagtttctgggcaggaccggtggcagttggtttaagatccttctattctacgtaatattttatggctgcctggctggcatcttcatcggaaccatccaagtgatgctgctcaccatcagtgaatttaagcccacatatcaggaccgagtggccccgccaggattaacacagattcctcagatccagaagactgaaatttcctttcgtcctaatgatcccaagagctatgaggcatatgtactgaacatagttaggttcctggaaaagtacaaagattcagcccagagggatgacatgatttttgaagattgtggcgatgtgcccagtgaaccgaaagaacgaggagactttaatcatgaacgaggagagcgaaaggtctgcagattcaagcttgaatggctgggaaattgctctggattaaatgatgaaacttatggctacaaagagggcaaaccgtgcattattataaagctcaaccgagttctaggcttcaaacctaagcctcccaagaatgagtccttggagacttacccagtgatgaagtataacccaaatgtccttcccgttcagtgcactggcaagcgagatgaagataaggataaagttggaaatgtggagtattttggactgggcaactcccctggttttcctctgcagtattatccgtactatggcaaactcctgcagcccaaatacctgcagcccctgctggccgtacagttcaccaatcttaccatggacactgaaattcgcatagagtgtaaggcgtacggtgagaacattgggtacagtgagaaagaccgttttcagggacgttttgatgtaaaaattgaagttaagagctgatcacaagcacaaatctttcccactagccatttaataagttaaaaaaagatacaaaaacaaaaacctactagtcttgaacaaactgtcatacgtatgggacctacacttaatctatatgctttacactagctttctgcatttaataggttagaatgtaaattaaagtgtagcaatagcaacaaaatatttattctactgtaaatgacaaaagaaaaagaaaaattgagccttgggacgtgcccatttttactgtaaattatgattccgtaactgacttgtagtaagcagtgtttctggcccctaagtattgctgccttgtgtattttatttagtgtacagtactacaggtgcatactctggtcatttttcaagccatgttttattgtatctgttttctactttatgtgagcaaggtttgctgtccaaggtgtaaatattcaacgggaataaaactggcatggtaatttttttttttgtttgttttttgttttttggctctttcaaaggtaatggcccatcgatgagcatttttaacatactccatagtcttttcctgtggtgttaggtctttatttttatttttttcctgggggctggggtgggggtttgtcatgtccccgtacatcgttagaagcttgaattcgagcagtagtagtagtaggcggccgc

SEQ ID NO: 357227 - DNA, 2877 bp, Homo sapiens
ctcgaggctccgggcgacccaggtgcggatcccccagccacggaaggggcggttcacgcccagccgggagctgggagggggctgcgcggcgctgcctgcgcgtccctcaccgccgcccccgcctcctcctcgccccgcgcccaacgccccgcgcccagcgatccaagcggcccctctagccccggcggctcctttgtgccggccccgaacccgccctctcgggccgagtccctgcccctggcgccggcgattggccaccgggccgctagagggcggggcgcacggccgccggggcgcggtatatagtaaaggtagggcgggcgcagcggaattcctcggctcctggcgggagtgccggtggcgccccgcagtccgcttgtccgtccttccctctctgactctcctaccccgggcctgtctctgcagaggtcaggggaggcgggggcccagcacacgtccccagtggcagcgggagcggcagctacgggttcgcggagcccccgaccccccaagggctagaggagcgctcggcggaccaaagaaagcccgcgagcggctgcgcgcccaccaataggtgcggggctcggagccgcgcagcctgcgccgtccctccctccggccccgccccgccgccgccgccgccgccgcctccccctcctcctgctcctgccttggctcctccgccgcgcgtctcgcactccgagagccgcagcggcagcggcgcgtcctgcctgcagagagccaggccggagaagccgagcggcgcagaggacgccagggcgcgcgccgcagccacccaccctccggaccgcggcagctgctgacccgccatcgccatggcccgcgggaaagccaaggaggagggcagctggaagaaattcatctggaactcagagaagaaggagtttctgggcaggaccggtggcagttggtgattaacacagattcctcagatccagaagactgaaatttcctttcgtcctaatgatcccaagagctatgaggcatatgtactgaacatagttaggttcctggaaaagtacaaagattcagcccagagggatgacatgatttttgaagattgtggcgatgtgcccagtgaaccgaaagaacgaggagactttaatcatgaacgaggagagcgaaaggtctgcagattcaagcttgaatggctgggaaattgctctggattaaatgatgaaacttatggctacaaagagggcaaaccgtgcattattataaagctcaaccgagttctaggcttcaaacctaagcctcccaagaatgagtccttggagacttacccagtgatgaagtataacccaaatgtccttcccgttcagtgcactggcaagcgagatgaagataaggataaagttggaaatgtggagtattttggactgggcaactcccctggttttcctctgcagtattatccgtactatggcaaactcctgcagcccaaatacctgcagcccctgctggccgtacagttcaccaatcttaccatggacactgaaattcgcatagagtgtaaggcgtacggtgagaacattgggtacagtgagaaagaccgttttcagggacgttttgatgtaaaaattgaagttaagagctgatcacaagcacaaatctttcccactagccatttaataagttaaaaaaagatacaaaaacaaaaacctactagtcttgaacaaactgtcatacgtatgggacctacacttaatctatatgctttacactagctttctgcatttaataggttagaatgtaaattaaagtgtagcaatagcaacaaaatatttattctactgtaaatgacaaaagaaaaagaaaaattgagccttgggacgtgcccatttttactgtaaattatgattccgtaactgacttgtagtaagcagtgtttctggcccctaagtattgctgccttgtgtattttatttagtgtacagtactacaggtgcatactctggtcatttttcaagccatgttttattgtatctgttttctactttatgtgagcaaggtttgctgtccaaggtgtaaatattcaacgggaataaaactggcatggtaatttttttttttgtttgttttttgttttttggctctttcaaaggtaatggcccatcgatgagcatttttaacatactccatagtcttttcctgtggtgttaggtctttatttttatttttttcctgggggctggggtgggggtttgtcatgggggaactgccctttaaattttaagtgacactacagaaaaacacaaaaaggtgatgggttgtgttatgcttgtattgaatgctgtcttgacatctcttgccttgtcctccggtatgttctaaagctgtgtctgagatctggatctgcccatcactttggctagtgacagggctaattaatttgctttatacattttcttttactttccttttttcctttctggaggcatcacatgctggtgctgtgtctttatgaatgttttaaccattttcatggtggaagaattttatatttatgcagttgtacaattttatttttttctgcaagaaaaagtgtaatgtatgaaataaaccaaagtcacttgtttgaaaataaatctttattttgaactttataaaaagcaatgcagtaccccatagactggtgttaaatgttgtctacagtgcaaaatccatgttctaacatatgtaataattgccaggagtacagtgctcttgttgatcttgtattcagtcaggttaaaacaacggacaataaaagaatgaacacaaaaaaaaaaaaaaaaaaaaaaaaaaaaaaaaaaaaaaaaaaaaaaaaaaaaaaaaaaaaaaaaaaacacacgaacacacaaaaagagagggggg

SEQ ID NO: 357228 - DNA, 2956 bp, Homo sapiens
ctcgaggctccgggcgacccaggtgcggatcccccagccacggaaggggcggttcacgcccagccgggagctgggagggggctgcgcggcgctgcctgcgcgtccctcaccgccgcccccgcctcctcctcgccccgcgcccaacgccccgcgcccagcgatccaagcggcccctctagccccggcggctcctttgtgccggccccgaacccgccctctcgggccgagtccctgcccctggcgccggcgattggccaccgggccgctagagggcggggcgcacggccgccggggcgcggtatatagtaaaggtagggcgggcgcagcggaattcctcggctcctggcgggagtgccggtggcgccccgcagtccgcttgtccgtccttccctctctgactctcctaccccgggcctgtctctgcagaggtcaggggaggcgggggcccagcacacgtccccagtggcagcgggagcggcagctacgggttcgcggagcccccgaccccccaagggctagaggagcgctcggcggaccaaagaaagcccgcgagcggctgcgcgcccaccaataggtgcggggctcggagccgcgcagcctgcgccgtccctccctccggccccgccccgccgccgccgccgccgccgcctccccctcctcctgctcctgccttggctcctccgccgcgcgtctcgcactccgagagccgcagcggcagcggcgcgtcctgcctgcagagagccaggccggagaagccgagcggcgcagaggacgccagggcgcgcgccgcagccacccaccctccggaccgcggcagctgctgacccgccatcgccatggcccgcgggaaagccaaggaggagggcagctggaagaaattcatctggaactcagagaagaaggagtttctgggcaggaccggtggcagttggtttaagatccttctattctacgtaatattttatggctgcctggctggcatcttcatcggaaccatccaagtgatgctgctcaccatcagtgaatttaagcccacatatcaggaccgagtggccccgccaggattaacacagattcctcagatccagaagactgaaatttcctttcgtcctaatgatcccaagagctatgaggcatatgtactgaacatagttaggttcctggaaaaatgtgcccagtgaaccgaaagaacgaggagactttaatcatgaacgaggagagcgaaaggtctgcagattcaagcttgaatggctgggaaattgctctggattaaatgatgaaacttatggctacaaagagggcaaaccgtgcattattataaagctcaaccgagttctaggcttcaaacctaagcctcccaagaatgagtccttggagacttacccagtgatgaagtataacccaaatgtccttcccgttcagtgcactggcaagcgagatgaagataaggataaagttggaaatgtggagtattttggactgggcaactcccctggttttcctctgcagtattatccgtactatggcaaactcctgcagcccaaatacctgcagcccctgctggccgtacagttcaccaatcttaccatggacactgaaattcgcatagagtgtaaggcgtacggtgagaacattgggtacagtgagaaagaccgttttcagggacgttttgatgtaaaaattgaagttaagagctgatcacaagcacaaatctttcccactagccatttaataagttaaaaaaagatacaaaaacaaaaacctactagtcttgaacaaactgtcatacgtatgggacctacacttaatctatatgctttacactagctttctgcatttaataggttagaatgtaaattaaagtgtagcaatagcaacaaaatatttattctactgtaaatgacaaaagaaaaagaaaaattgagccttgggacgtgcccatttttactgtaaattatgattccgtaactgacttgtagtaagcagtgtttctggcccctaagtattgctgccttgtgtattttatttagtgtacagtactacaggtgcatactctggtcatttttcaagccatgttttattgtatctgttttctactttatgtgagcaaggtttgctgtccaaggtgtaaatattcaacgggaataaaactggcatggtaatttttttttttgtttgttttttgttttttggctctttcaaaggtaatggcccatcgatgagcatttttaacatactccatagtcttttcctgtggtgttaggtctttatttttatttttttcctgggggctggggtgggggtttgtcatgggggaactgccctttaaattttaagtgacactacagaaaaacacaaaaaggtgatgggttgtgttatgcttgtattgaatgctgtcttgacatctcttgccttgtcctccggtatgttctaaagctgtgtctgagatctggatctgcccatcactttggctagtgacagggctaattaatttgctttatacattttcttttactttccttttttcctttctggaggcatcacatgctggtgctgtgtctttatgaatgttttaaccattttcatggtggaagaattttatatttatgcagttgtacaattttatttttttctgcaagaaaaagtgtaatgtatgaaataaaccaaagtcacttgtttgaaaataaatctttattttgaactttataaaaagcaatgcagtaccccatagactggtgttaaatgttgtctacagtgcaaaatccatgttctaacatatgtaataattgccaggagtacagtgctcttgttgatcttgtattcagtcaggttaaaacaacggacaataaaagaatgaacacaaaaaaaaaaaaaaaaaaaaaaaaaaaaaaaaaaaaaaaaaaaaaaaaaaaaaaaaaaaaaaaaaaacacacgaacacacaaaaagagagggggg

SEQ ID NO: 357229 - DNA, 1894 bp, Homo sapiens
ccggttaagagctgatcacaagcacaaatctttcccactagccatttaataagttagtacaaagattcagcccagagggatgacatgatttttgaagattgtggcgatgtgcccagtgaaccgaaagaacgaggagactttaatcatgaacgaggagagcgaaaggtctgcagattcaagcttgaatggctgggaaattgctctggattaaatgatgaaacttatggctacaaagagggcaaaccgtgcattattataaagctcaaccgagttctaggcttcaaacctaagcctcccaagaatgagtccttggagacttacccagtgatgaagtataacccaaatgtccttcccgttcagtgcactggcaagcgagatgaagataaggataaagttggaaatgtggagtattttggactgggcaactcccctggttttcctctgcagtattatccgtactatggcaaactcctgcagcccaaatacctgcagcccctgctggccgtacagttcaccaatcttaccatggacactgaaattcgcatagagtgtaaggcgtacggtgagaacattgggtacagtgagaaagaccgttttcagggacgttttgatgtaaaaattgaagttaagagctgatcacaagcacaaatctttcccactagccatttaataagttaaaaaaagatacaaaaacaaaaacctactagtcttgaacaaactgtcatacgtatgggacctacacttaatctatatgctttacactagctttctgcatttaataggttagaatgtaaattaaagtgtagcaatagcaacaaaatatttattctactgtaaatgacaaaagaaaaagaaaaattgagccttgggacgtgcccatttttactgtaaattatgattccgtaactgacttgtagtaagcagtgtttctggcccctaagtattgctgccttgtgtattttatttagtgtacagtactacaggtgcatactctggtcatttttcaagccatgttttattgtatctgttttctactttatgtgagcaaggtttgctgtccaaggtgtaaatattcaacgggaataaaactggcatggtaatttttttttttgtttgttttttgttttttggctctttcaaaggtaatggcccatcgatgagcatttttaacatactccatagtcttttcctgtggtgttaggtctttatttttatttttttcctgggggctggggtgggggtttgtcatgggggaactgccctttaaattttaagtgacactacagaaaaacacaaaaaggtgatgggttgtgttatgcttgtattgaatgctgtcttgacatctcttgccttgtcctccggtatgttctaaagctgtgtctgagatctggatctgcccatcactttggctagtgacagggctaattaatttgctttatacattttcttttactttccttttttcctttctggaggcatcacatgctggtgctgtgtctttatgaatgttttaaccattttcatggtggaagaattttatatttatgcagttgtacaattttatttttttctgcaagaaaaagtgtaatgtatgaaataaaccaaagtcacttgtttgaaaataaatctttattttgaactttataaaaagcaatgcagtaccccatagactggtgttaaatgttgtctacagtgcaaaatccatgttctaacatatgtaataattgccaggagtacagtgctcttgttgatcttgtattcagtcaggttaaaacaacggacaataaaagaatgaacacaaaaaaaaaaaaaaaaaaaaaaaaaaaaaaaaaaaaaaaaaaaaaaaaaaaaaaaaaaaaaaaaaaacacacgaacacacaaaaagagagggggg

SEQ ID NO: 357230 - DNA, 1702 bp, Homo sapiens
ctcgaggctccgggcgacccaggtgcggatcccccagccacggaaggggcggttcacgcccagccgggagctgggagggggctgcgcggcgctgcctgcgcgtccctcaccgccgcccccgcctcctcctcgccccgcgcccaacgccccgcgcccagcgatccaagcggcccctctagccccggcggctcctttgtgccggccccgaacccgccctctcgggccgagtccctgcccctggcgccggcgattggccaccgggccgctagagggcggggcgcacggccgccggggcgcggtatatagtaaaggtagggcgggcgcagcggaattcctcggctcctggcgggagtgccggtggcgccccgcagtccgcttgtccgtccttccctctctgactctcctaccccgggcctgtctctgcagaggtcaggggaggcgggggcccagcacacgtccccagtggcagcgggagcggcagctacgggttcgcggagcccccgaccccccaagggctagaggagcgctcggcggaccaaagaaagcccgcgagcggctgcgcgcccaccaataggtgcggggctcggagccgcgcagcctgcgccgtccctccctccggccccgccccgccgccgccgccgccgccgcctccccctcctcctgctcctgccttggctcctccgccgcgcgtctcgcactccgagagccgcagcggcagcggcgcgtcctgcctgcagagagccaggccggagaagccgagcggcgcagaggacgccagggcgcgcgccgcagccacccaccctccggaccgcggcagctgctgacccgccatcgccatggcccgcgggaaagccaaggaggagggcagctggaagaaattcatctggaactcagagaagaaggagtttctgggcaggaccggtggcagttggtttaagatccttctattctacgtaatattttatggctgcctggctggcatcttcatcggaaccatccaagtgatgctgctcaccatcagtgaatttaagcccacatatcaggaccgagtggccccgccaggattaacacagattcctcagatccagaagactgaaatttcctttcgtcctaatgatcccaagagctatgaggcatatgtactgaacatagttaggttcctggaaaagtacaaagattcagcccagagggatgacatgatttttgaagattgtggcgatgtgcccagtgaaccgaaagaacgaggagactttaatcatgaacgaggagagcgaaaggtctgcagattcaagcttgaatggctgggaaattgctctggattaaatgatgaaacttatggctacaaagagggcaaaccgtgcattattataaagctcaaccgagttctaggcttcaaacctaagcctcccaagaatgagtccttggagacttacccagtgatgaagtataacccaaatgtccttcccgttcagtgcactggcaagcgagatgaagataaggataaagttggaaatgtggagtattttggactgggcaactcccctggttttcctctgcagtattatccgtactatggcaaactcctgcagcccaaatacctgcagcccctgctggccgtacagttcaccaatcttaccatggacactgaaattcgcatagagtgtaaggcgcacatcacatcggtgccgagctcgattgtacc

SEQ ID NO: 357231 - DNA, 1582 bp, Homo sapiens
acatgatacaattcagctcggtacctgaacattcgtgtcccccgttcagtgcactggcagcgagatgaagataaggataaagttggaaatgtggagtattttggactgggcaactcccctggttttcctctgcagtattatccgtactatggcaaactcctgcagcccaaatacctgcagcccctgctggccgtacagttcaccaatcttaccatggacactgaaattcgcatagagtgtaaggcgtacggtgagaacattgggtacagtgagaaagaccgttttcagggacgttttgatgtaaaaattgaagttaagagctgatcacaagcacaaatctttcccactagccatttaataagttaaaaaaagatacaaaaacaaaaacctactagtcttgaacaaactgtcatacgtatgggacctacacttaatctatatgctttacactagctttctgcatttaataggttagaatgtaaattaaagtgtagcaatagcaacaaaatatttattctactgtaaatgacaaaagaaaaagaaaaattgagccttgggacgtgcccatttttactgtaaattatgattccgtaactgacttgtagtaagcagtgtttctggcccctaagtattgctgccttgtgtattttatttagtgtacagtactacaggtgcatactctggtcatttttcaagccatgttttattgtatctgttttctactttatgtgagcaaggtttgctgtccaaggtgtaaatattcaacgggaataaaactggcatggtaatttttttttttgtttgttttttgttttttggctctttcaaaggtaatggcccatcgatgagcatttttaacatactccatagtcttttcctgtggtgttaggtctttatttttatttttttcctgggggctggggtgggggtttgtcatgggggaactgccctttaaattttaagtgacactacagaaaaacacaaaaaggtgatgggttgtgttatgcttgtattgaatgctgtcttgacatctcttgccttgtcctccggtatgttctaaagctgtgtctgagatctggatctgcccatcactttggctagtgacagggctaattaatttgctttatacattttcttttactttccttttttcctttctggaggcatcacatgctggtgctgtgtctttatgaatgttttaaccattttcatggtggaagaattttatatttatgcagttgtacaattttatttttttctgcaagaaaaagtgtaatgtatgaaataaaccaaagtcacttgtttgaaaataaatctttattttgaactttataaaaagcaatgcagtaccccatagactggtgttaaatgttgtctacagtgcaaaatccatgttctaacatatgtaataattgccaggagtacagtgctcttgttgatcttgtattcagtcaggttaaaacaacggacaataaaagaatgaacacaaaaaaaaaaaaaaaaaaaaaaaaaaaaaaaaaaaaaaaaaaaaaaaaaaaaaaaaaaaaaaaaaaacacacgaacacacaaaaagagagggggg

SEQ ID NO: 357232 - DNA, 2830 bp, Homo sapiens
gagacgctgcttttaccaggaaagactattgaaagatgttttattttatttttctctgacctttccatccttgaaaaaatggggaaaaaagaagaaaaaagacaaaatcgaccataaaagaccaaaaaaaaaaaaaaaaatcagaaaacccccacctaatccacagaaagtaatgtctttcccctccccttggaatttttgttttgtttttggaaataatatttttttaaaagttgccttattgtggagcgggaatctgaaatacccaaatgcctgttttcctcggtggagtcaacccgaagagctcccaccttctctggatgtgcctgggcttggactggctagaatctttctctggactgttgcatgtacagtgcctccatcctggaggcaagagagttgggagtggctcgaatcagagccgtgcccaagatatccctgctgttgcatcgtttgaagctgacgtcctgtgtctgtacactgctgccactgttgtgtcctcgctctgcttgctgttgcctcacgccaggccccgtcctgccgtgacacccttcatcctacccttggaaccccaaggccaagttggttcaaactgttggagaacagagttggcctgcatctggaacacacttgtcctcagcttaccatctcctcacaccccagagtggaaaggtgaacacctgcagctgaggcttggaaacgtttcttgtgttgccctgaaaaatctttgagacctcagggaggctctgtctctcttaaaaggtggagaaagatgccattctctccctaaggtctggtggagtctccccatcttgcatacccttctgcaagccatctatctctgctcactctccaattgacccgcctgggaacaagggatgaggaggagttgggggctggggggaatcctgccagttggtgaagccctgtggcaggaaggtatatgtggacatagagtatacctgattctctttcttcagccactgactgcttgggttgggctgtgaatgataatggaatggctggagtctgctgttgtcagaaggcagggagggtgatgaaggactgacccacatggactgggatgtgtgtcggttatgggcatgactgcacgttcactctcagtgggatctgggcaacatggagttcattgtcctgttgcttacttactgcaatgtctttggccctccttttcaactggttcctctgttgggcccaaaggttgggagtaggagacagtatcccaggctgacaagggcttgccctttaccttgggcaccttgttaatttttagcctgtgcccttccccacctttgccctcccagtggttggtatgtgggaagcccatctcagttcctgtgacttcatgtctcaaaccaaggatgagcgtctggtctctgctatgatggtggtatccgaggcctttccctgcccagtctggtgcctgccccacattgtaccggacactggattcctggacccccttctcctttcctttctttccttcaggtcacgcagccctgtactgtatccagcaccacagaaacctcagtgtttttcctctgctggtttggggcacaaggaagccttagggtatggggaaaggctgttattacctagagtttactcccaggccagggggctgccatcttcttcacagacatccctgaaaggaagcccctttggggcagggaggtgaggacttcatctcaacatcggctggtggttggtaggggagctttttcttttctttcctttttttttgtttttgtttttgtttttgtttttggtaacatgttaggagttaatgttgcaaagagtagtttacatcttcactttctgaagacacttgaatttaggaccgatgtatctgtgacaagcatgccagaagtggcaggggccatcagggctaaccacttcacacctaccatcgtcccatggggatccaagacctgagataaagcaacagcctgcccagatccctctgttcatcctatcccttccaaggttggtccatgccaacataacctctgggcatcagacatcagcaggtctgtgtgcctcagccctgttaaggggcaggtttctctttagccctcttcctgcacttgggagcaaaggcactaccagtagagaagggccatccagccgtgccccagcctggacccctggggctcagatagaggtgctgagcccctgtgtcaaagttgttaaatgtttttgttttgttccattgtagctcttttttttttttttttccctttcctggtgattgattttacaaaagaaagtaagctgcttagaaggccctggaagggaagtgaggaggagggacaaggaagatgactagttacggagggtgagggttgttttttgccaaaaagcctgggtagagtgatctgaattatctggcaccctcctgaatggaaccccagagtacctcctgtgtggaagggtccctggattttccctaacacccaccctctcccccttcagccatgctgatggcagagaagataagaacttggagcccatttctcactggagaggaaaacttgtcatctggctttgcggagaaggttccaccttacgctcgtagtacattatctttactatgtgctaggatatcatatttaaaaggacaaaaaaatgtaaaatacttgaatgagcttgtattataacattaatattattgagagtatctgctttccaggctgaagtgattcattcattattctagtcctgctttagtcctttgtaatttgtggtaattatgcttttctttttaatacaaaaaaatgtataaaaataaacacttgaaaaggcaaaa

SEQ ID NO: 357233 - DNA, 405 bp, Homo sapiens
ttatcttctctgccatcagcatggctgaagggggagagggtgggtgttagggaaaatccaggacccttcagccatgctgatggcagagaagataagaacttggagcccatttctcactggagaggaaaacttgtcatctggctttgcggagaaggttccaccttacgctcgtagtacattatctttactatgtgctaggatatcatatttaaaaggacaaaaaaatgtaaaatacttgaatgagcttgtattataacattaatattattgagagtatctgctttccaggctgaagtgattcattcattattctagtcctgctttagtcctttgtaatttgtggtaattatgcttttctttttaatacaaaaaaatgtataaaaataaacacttgaaaaggcaaaa

SEQ ID NO: 357234 - DNA, 287 bp, Homo sapiens
tgacctgaacttaatgagaagacatccacggagcgcatattacagaatgctggttgcctcaggtgttgttaacgtacttgtagtccgcgcattttatcccattgaaatccagctgtgagctttttacatgagcacccaccctctcccccttcagccatgctgatggcagagaagataagaacttggagctttgaagatttctatgttaggaaaagccaaactaaatatactggctctgcttgtatttcttaaatgacaaagattacctagctaagaaacttccgagg

SEQ ID NO: 357235 - DNA, 2990 bp, Homo sapiens
gagacgctgcttttaccaggaaagactattgaaagatgttttattttatttttctctgacctttccatccttgaaaaaatggggaaaaaagaagaaaaaagacaaaatcgaccataaaagaccaaaaaaaaaaaaaaaaatcagaaaacccccacctaatccacagaaagtaatgtctttcccctccccttggaatttttgttttgtttttggaaataatatttttttaaaagttgccttattgtggagcgggaatctgaaatacccaaatgcctgttttcctcggtggagtcaacccgaagagctcccaccttctctggatgtgcctgggcttggactggctagaatctttctctggactgttgcatgtacagtgcctccatcctggaggcaagagagttgggagtggctcgaatcagagccgtgcccaagatatccctgctgttgcatcgtttgaagctgacgtcctgtgtctgtacactgctgccactgttgtgtcctcgctctgcttgctgttgcctcacgccaggccccgtcctgccgtgacacccttcatcctacccttggaaccccaaggccaagttggttcaaactgttggagaacagagttggcctgcatctggaacacacttgtcctcagcttaccatctcctcacaccccagagtggaaaggtgaacacctgcagctgaggcttggaaacgtttcttgtgttgccctgaaaaatctttgagacctcagggaggctctgtctctcttaaaaggtggagaaagatgccattctctccctaaggtctggtggagtctccccatcttgcatacccttctgcaagccatctatctctgctcactctccaattgacccgcctgggaacaagggatgaggaggagttgggggctggggggaatcctgccagttggtgaagccctgtggcaggaaggtatatgtggacatagagtatacctgattctctttcttcagccactgactgcttgggttgggctgtgaatgataatggaatggctggagtctgctgttgtcagaaggcagggagggtgatgaaggactgacccacatggactgggatgtgtgtcggttatgggcatgactgcacgttcactctcagtgggatctgggcaacatggagttcattgtcctgttgcttacttactgcaatgtctttggccctccttttcaactggttcctctgttgggcccaaaggttgggagtaggagacagtatcccaggctgacaagggcttgccctttaccttgggcaccttgttaatttttagcctgtgcccttccccacctttgccctcccagtggttggtatgtgggaagcccatctcagttcctgtgacttcatgtctcaaaccaaggatgagcgtctggtctctgctatgatggtggtatccgaggcctttccctgcccagtctggtgcctgccccacattgtaccggacactggattcctggacccccttctcctttcctttctttccttcaggtcacgcagccctgtactgtatccagcaccacagaaacctcagtgtttttcctctgctggtttggggcacaaggaagccttagggtatggggaaaggctgttattacctagagtttactcccaggccagggggctgccatcttcttcacagacatccctgaaaggaagcccctttggggcagggaggtgaggacttcatctcaacatcggctggtggttggtaggggagctttttcttttctttcctttttttttgtttttgtttttgtttttgtttttggtaacatgttaggagttaatgttgcaaagagtagtttacatcttcactttctgaagacacttgaatttaggaccgatgtatctgtgacaagcatgccagaagtggcaggggccatcagggctaaccacttcacacctaccatcgtcccatggggatccaagacctgagataaagcaacagcctgcccagatccctctgttcatcctatcccttccaaggttggtccatgccaacataacctctgggcatcagacatcagcaggtctgtgtgcctcagccctgttaaggggcaggtttctctttagccctcttcctgcacttgggagcaaaggcactaccagtagagaagggccatccagccgtgccccagcctggacccctggggctcagatagaggtgctgagcccctgtgtcaaagttgttaaatgtttttgttttgttccattgtagctcttttttttttttttttccctttcctggtgattgattttacaaaagaaagtaagctgcttagaaggccctggaagggaagtgaggaggagggacaaggaagatgactagttacggagggtgagggttgttttttgccaaaaagcctgggtagagtgatctgaattatctggcaccctcctgaatggaaccccagagtacctcctgtgtggaagggtccctggattttccctaacacccaccctctcccccttcagccatgctgatggcagagaagataagaacttggagcccatttctcactggagaggaaaacttgtcatctggctttgcggagaaggttccaccttacgctcgtagtacattatctttactatgtgctaggatatcatatttaaaaggacaaaaaaatgtaaaatacttgaatgagcttgtattataacattaatattattgagagtatctgctttccaggctgaagtgattcattcattattctagtcctgctttagtcctttgtaatttgtggtaattatgcttttctttttaatacaaaaaaatgtataaaaataaacacttgaaaaggcaaaaaaaaaaaaaaaaaaaaaaaaaaaaaaaaaaaaaaaaaaaaaaaaaaaaaaaaaaaaaaaacctcgagggggggcccgttacccattttgccctttagtgagtcgttttacaattcattggccgtcttttaacaacttcttgactgggaaaaaacctggcg

SEQ ID NO: 357236 - DNA, 3211 bp, Homo sapiens
gagacgctgcttttaccaggaaagactattgaaagatgttttattttatttttctctgacctttccatccttgaaaaaatggggaaaaaagaagaaaaaagacaaaatcgaccataaaagaccaaaaaaaaaaaaaaaaatcagaaaacccccacctaatccacagaaagtaatgtctttcccctccccttggaatttttgttttgtttttggaaataatatttttttaaaagttgccttattgtggagcgggaatctgaaatacccaaatgcctgttttcctcggtggagtcaacccgaagagctcccaccttctctggatgtgcctgggcttggactggctagaatctttctctggactgttgcatgtacagtgcctccatcctggaggcaagagagttgggagtggctcgaatcagagccgtgcccaagatatccctgctgttgcatcgtttgaagctgacgtcctgtgtctgtacactgctgccactgttgtgtcctcgctctgcttgctgttgcctcacgccaggccccgtcctgccgtgacacccttcatcctacccttggaaccccaaggccaagttggttcaaactgttggagaacagagttggcctgcatctggaacacacttgtcctcagcttaccatctcctcacaccccagagtggaaaggtgaacacctgcagctgaggcttggaaacgtttcttgtgttgccctgaaaaatctttgagacctcagggaggctctgtctctcttaaaaggtggagaaagatgccattctctccctaaggtctggtggagtctccccatcttgcatacccttctgcaagccatctatctctgctcactctccaattgacccgcctgggaacaagggatgaggaggagttgggggctggggggaatcctgccagttggtgaagccctgtggcaggaaggtatatgtggacatagagtatacctgattctctttcttcagccactgactgcttgggttgggctgtgaatgataatggaatggctggagtctgctgttgtcagaaggcagggagggtgatgaaggactgacccacatggactgggatgtgtgtcggttatgggcatgactgcacgttcactctcagtgggatctgggcaacatggagttcattgtcctgttgcttacttactgcaatgtctttggccctccttttcaactggttcctctgttgggcccaaaggttgggagtaggagacagtatcccaggctgacaagggcttgccctttaccttgggcaccttgttaatttttagcctgtgcccttccccacctttgccctcccagtggttggtatgtgggaagcccatctcagttcctgtgacttcatgtctcaaaccaaggatgagcgtctggtctctgctatgatggtggtatccgaggcctttccctgcccagtctggtgcctgccccacattgtaccggacactggattcctggacccccttctcctttcctttctttccttcaggtcacgcagccctgtactgtatccagcaccacagaaacctcagtgtttttcctctgctggtttggggcacaaggaagccttagggtatggggaaaggctgttattacctagagtttactcccaggccagggggctgccatcttcttcacagacatccctgaaaggaagcccctttggggcagggaggtgaggacttcatctcaacatcggctggtggttggtaggggagctttttcttttctttcctttttttttgtttttgtttttgtttttgtttttggtaacatgttaggagttaatgttgcaaagagtagtttacatcttcactttctgaagacacttgaatttaggaccgatgtatctgtgacaagcatgccagaagtggcaggggccatcagggctaaccacttcacacctaccatcgtcccatggggatccaagacctgagataaagcaacagcctgcccagatccctctgttcatcctatcccttccaaggttggtccatgccaacataacctctgggcatcagacatcagcaggtctgtgtgcctcagccctgttaaggggcaggtttctctttagccctcttcctgcacttgggagcaaaggcactaccagtagagaagggccatccagccgtgccccagcctggacccctggggctcagatagaggtgctgagcccctgtgtcaaagttgttaaatgtttttgttttgttccattgtagctcttttttttttttttttccctttcctggtgattgattttacaaaagaaagtaagctgcttagaaggccctggaagggaagtgaggaggagggacaaggaagatgactagttacggagggtgagggttgttttttgccaaaaagcctgggtagagtgatctgaattatctggcaccctcctgaatggaaccccagagtacctcctgtgtggaagggtccctggattttccctaacacccaccctctcccccttcagccatgctgatggcagagaagataagaacttggagcccatttctcactggagaggaaaacttgtcatctggctttgcggagaaggttccaccttacgctcgtagtacattatctttactatgtgctaggatatcatatttaaaaggacaaaaaaatgtaaaatacttgaatgagcttgtattataacattaatattattgagagtatctgctttccaggctgaagtgattcattcattattctagtcctgctttagtcctttgtaatttgtggtaattatgcttttctttttaatacaaaaaaatgtataaaaataaacacttgaaaaggcaaaaaaaaaaaaaaaaaaaaaaaaaaaaaaaaaaaaaaaaaaagaggggggggcgccccaaaaattccccccgggggggccccttgcccccctttttctgggtcaaaagagggtgcccccaatagggaggaggaggagagtaatataagaacagcagaagacgacgggagcgcggcgcgcgcttataaaccaaacagcggttggcggaacgggaggaaaaacagcggcaacaacgagggggaaaactcttgggggggaaggagaaccacctacttcgtcgcggggggggcgccaccatctggtgggacaaaaacaccccgcagacgaagagaattaaaacgccccaagagggaaaaccatcacacactttgcaggggagtataag

SEQ ID NO: 357237 - DNA, 2776 bp, Homo sapiens
gagacgctgcttttaccaggaaagactattgaaagatgttttattttatttttctctgacctttccatccttgaaaaaatggggaaaaaagaagaaaaaagacaaaatcgaccataaaagaccaaaaaaaaaaaaaaaaatcagaaaacccccacctaatccacagaaagtaatgtctttcccctccccttggaatttttgttttgtttttggaaataatatttttttaaaagttgccttattgtggagcgggaatctgaaatacccaaatgcctgttttcctcggtggagtcaacccgaagagctcccaccttctctggatgtgcctgggcttggactggctagaatctttctctggactgttgcatgtacagtgcctccatcctggaggcaagagagttgggagtggctcgaatcagagccgtgcccaagatatccctgctgttgcatcgtttgaagctgacgtcctgtgtctgtacactgctgccactgttgtgtcctcgctctgcttgctgttgcctcacgccaggccccgtcctgccgtgacacccttcatcctacccttggaaccccaaggccaagttggttcaaactgttggagaacagagttggcctgcatctggaacacacttgtcctcagcttaccatctcctcacaccccagagtggaaaggtgaacacctgcagctgaggcttggaaacgtttcttgtgttgccctgaaaaatctttgagacctcagggaggctctgtctctcttaaaaggtggagaaagatgccattctctccctaaggtctggtggagtctccccatcttgcatacccttctgcaagccatctatctctgctcactctccaattgacccgcctgggaacaagggatgaggaggagttgggggctggggggaatcctgccagttggtgaagccctgtggcaggaaggtatatgtggacatagagtatacctgattctctttcttcagccactgactgcttgggttgggctgtgaatgataatggaatggctggagtctgctgttgtcagaaggcagggagggtgatgaaggactgacccacatggactgggatgtgtgtcggttatgggcatgactgcacgttcactctcagtgggatctgggcaacatggagttcattgtcctgttgcttacttactgcaatgtctttggccctccttttcaactggttcctctgttgggcccaaaggttgggagtaggagacagtatcccaggctgacaagggcttgccctttaccttgggcaccttgttaatttttagcctgtgcccttccccacctttgccctcccagtggttggtatgtgggaagcccatctcagttcctgtgacttcatgtctcaaaccaaggatgagcgtctggtctctgctatgatggtggtatccgaggcctttccctgcccagtctggtgcctgccccacattgtaccggacactggattcctggacccccttctcctttcctttctttccttcaggtcacgcagccctgtactgtatccagcaccacagaaacctcagtgtttttcctctgctggtttggggcacaaggaagccttagggtatggggaaaggctgttattacctagagtttactcccaggccagggggctgccatcttcttcacagacatccctgaaaggaagcccctttggggcagggaggtgaggacttcatctcaacatcggctggtggttggtaggggagctttttcttttctttcctttttttttgtttttgtttttgtttttgtttttggtaacatgttaggagttaatgttgcaaagagtagtttacatcttcactttctgaagacacttgaatttaggaccgatgtatctgtgacaagcatgccagaagtggcaggggccatcagggctaaccacttcacacctaccatcgtcccatggggatccaagacctgagataaagcaacagcctgcccagatccctctgttcatcctatcccttccaaggttggtccatgccaacataacctctgggcatcagacatcagcaggtctgtgtgcctcagccctgttaaggggcaggtttctctttagccgtgccccagcctggacccctggggctcagatagaggtgctgagcccctgtgtcaaagttgttaaatgtttttgttttgttccattgtagctcttttttttttttttttccctttcctggtgattgattttacaaaagaaagtaagctgcttagaaggccctggaagggaagtgaggaggagggacaaggaagatgactagttacggagggtgagggttgttttttgccaaaaagcctgggtagagtgatctgaattatctggcaccctcctgaatggaaccccagagtacctcctgtgtggaagggtccctggattttccctaacacccaccctctcccccttcagccatgctgatggcagagaagataagaacttggagcccatttctcactggagaggaaaacttgtcatctggctttgcggagaaggttccaccttacgctcgtagtacattatctttactatgtgctaggatatcatatttaaaaggacaaaaaaatgtaaaatacttgaatgagcttgtattataacattaatattattgagagtatctgctttccaggctgaagtgattcattcattattctagtcctgctttagtcctttgtaatttgtggtaattatgcttttctttttaatacaaaaaaatgtataaaaataaacacttgaaaaggcaaaa

SEQ ID NO: 357238 - DNA, 1724 bp, Homo sapiens
  misc_feature (9)..(9): n is a, c, g, or t
tgtgttaangcatgtgccgttcccaacgcatgtgccgctcccaacgcatgtgcgctcccaacgcatgtgccgctcccaacgcatgtgccgctcccaacgcatgtgccgctcccaacgcatgtgccgctcccaacgcatgtgccgctcccaacgcatgtgccgctcccaacgcatgtgccgctcccaacgcatgtccgctccccacctttgccctcccagtggttggtatgtgggaagcccatctcagttcctgtgacttcatgtctcaaaccaaggatgagcgtctggtctctgctatgatggtggtatccgaggcctttccctgcccagtctggtgcctgccccacattgtaccggacactggattcctggacccccttctcctttcctttctttccttcaggtcacgcagccctgtactgtatccagcaccacagaaacctcagtgtttttcctctgctggtttggggcacaaggaagccttagggtatggggaaaggctgttattacctagagtttactcccaggccagggggctgccatcttcttcacagacatccctgaaaggaagcccctttggggcagggaggtgaggacttcatctcaacatcggctggtggttggtaggggagctttttcttttctttcctttttttttgtttttgtttttgtttttgtttttggtaacatgttaggagttaatgttgcaaagagtagtttacatcttcactttctgaagacacttgaatttaggaccgatgtatctgtgacaagcatgccagaagtggcaggggccatcagggctaaccacttcacacctaccatcgtcccatggggatccaagacctgagataaagcaacagcctgcccagatccctctgttcatcctatcccttccaaggttggtccatgccaacataacctctgggcatcagacatcagcaggtctgtgtgcctcagccctgttaaggggcaggtttctctttagccctcttcctgcacttgggagcaaaggcactaccagtagagaagggccatccagccgtgccccagcctggacccctggggctcagatagaggtgctgagcccctgtgtcaaagttgttaaatgtttttgttttgttccattgtagctcttttttttttttttttccctttcctggtgattgattttacaaaagaaagtaagctgcttagaaggccctggaagggaagtgaggaggagggacaaggaagatgactagttacggagggtgagggttgttttttgccaaaaagcctgggtagagtgatctgaattatctggcaccctcctgaatggaaccccagagtacctcctgtgtggaagggtccctggattttccctaacacccaccctctcccccttcagccatgctgatggcagagaagataagaacttggagcccatttctcactggagaggaaaacttgtcatctggctttgcggagaaggttccaccttacgctcgtagtacattatctttactatgtgctaggatatcatatttaaaaggacaaaaaaatgtaaaatacttgaatgagcttgtattataacattaatattattgagagtatctgctttccaggctgaagtgattcattcattattctagtcctgctttagtcctttgtaatttgtggtaattatgcttttctttttaatacaaaaaaatgtataaaaataaacacttgaaaaggcaaaa

SEQ ID NO: 357239 - DNA, 1372 bp, Homo sapiens
ctgaggatcctcagacagcggaccccttctcctttcctttctttccttcaggtcacgcagccctgtactgtatccagcaccacagaaacctcagtgtttttcctctgctggtttggggcacaaggaagccttagggtatggggaaaggctgttattacctagagtttactcccaggccagggggctgccatcttcttcacagacatccctgaaaggaagcccctttggggcagggaggtgaggacttcatctcaacatcggctggtggttggtaggggagctttttcttttctttcctttttttttgtttttgtttttgtttttgtttttggtaacatgttaggagttaatgttgcaaagagtagtttacatcttcactttctgaagacacttgaatttaggaccgatgtatctgtgacaagcatgccagaagtggcaggggccatcagggctaaccacttcacacctaccatcgtcccatggggatccaagacctgagataaagcaacagcctgcccagatccctctgttcatcctatcccttccaaggttggtccatgccaacataacctctgggcatcagacatcagcaggtctgtgtgcctcagccctgttaaggggcaggtttctctttagccctcttcctgcacttgggagcaaaggcactaccagtagagaagggccatccagccgtgccccagcctggacccctggggctcagatagaggtgctgagcccctgtgtcaaagttgttaaatgtttttgttttgttccattgtagctcttttttttttttttttccctttcctggtgattgattttacaaaagaaagtaagctgcttagaaggccctggaagggaagtgaggaggagggacaaggaagatgactagttacggagggtgagggttgttttttgccaaaaagcctgggtagagtgatctgaattatctggcaccctcctgaatggaaccccagagtacctcctgtgtggaagggtccctggattttccctaacacccaccctctcccccttcagccatgctgatggcagagaagataagaacttggagcccatttctcactggagaggaaaacttgtcatctggctttgcggagaaggttccaccttacgctcgtagtacattatctttactatgtgctaggatatcatatttaaaaggacaaaaaaatgtaaaatacttgaatgagcttgtattataacattaatattattgagagtatctgctttccaggctgaagtgattcattcattattctagtcctgctttagtcctttgtaatttgtggtaattatgcttttctttttaatacaaaaaaatgtataaaaataaacacttgaaaaggcaaaa

SEQ ID NO: 357240 - DNA, 1977 bp, Homo sapiens
gagacgctgcttttaccaggaaagactattgaaagatgttttattttatttttctctgacctttccatccttgaaaaaatggggaaaaaagaagaaaaaagacaaaatcgaccataaaagaccaaaaaaaaaaaaaaaaatcagaaaacccccacctaatccacagaaagtaatgtctttcccctccccttggaatttttgttttgtttttggaaataatatttttttaaaagttgccttattgtggagcgggaatctgaaatacccaaatgcctgttttcctcggtggagtcaacccgaagagctcccaccttctctggatgtgcctgggcttggactggctagaatctttctctggactgttgcatgtacagtgcctccatcctggaggcaagagagttgggagtggctcgaatcagagccgtgcccaagatatccctgctgttgcatcgtttgaagctgacgtcctgtgtctgtacactgctgccactgttgtgtcctcgctctgcttgctgttgcctcacgccaggccccgtcctgccgtgacacccttcatcctacccttggaaccccaaggccaagttggttcaaactgttggagaacagagttggcctgcatctggaacacacttgtcctcagcttaccatctcctcacaccccagagtggaaaggtgaacacctgcagctgaggcttggaaacgtttcttgtgttgccctgaaaaatctttgagacctcagggaggctctgtctctcttaaaaggtggagaaagatgccattctctccctaaggtctggtggagtctccccatcttgcatacccttctgcaagccatctatctctgctcactctccaattgacccgcctgggaacaagggatgaggaggagttgggggctggggggaatcctgccagttggtgaagccctgtggcaggaaggtatatgtggacatagagtatacctgattctctttcttcagccactgactgcttgggttgggctgtgaatgataatggaatggctggagtctgctgttgtcagaaggcagggagggtgatgaaggactgacccacatggactgggatgtgtgtcggttatgggcatgactgcacgttcacgcccagatccctctgttcatcctatcccttccaaggttggtccatgccaacataacctctgggcatcagacatcagcaggtctgtgtgcctcagccctgttaaggggcaggtttctctttagccctcttcctgcacttgggagcaaaggcactaccagtagagaagggccatccagccgtgccccagcctggacccctggggctcagatagaggtgctgagcccctgtgtcaaagttgttaaatgtttttgttttgttccattgtagctcttttttttttttttttccctttcctggtgattgattttacaaaagaaagtaagctgcttagaaggccctggaagggaagtgaggaggagggacaaggaagatgactagttacggagggtgagggttgttttttgccaaaaagcctgggtagagtgatctgaattatctggcaccctcctgaatggaaccccagagtacctcctgtgtggaagggtccctggattttccctaacacccaccctctcccccttcagccatgctgatggcagagaagataagaacttggagcccatttctcactggagaggaaaacttgtcatctggctttgcggagaaggttccaccttacgctcgtagtacattatctttactatgtgctaggatatcatatttaaaaggacaaaaaaatgtaaaatacttgaatgagcttgtattataacattaatattattgagagtatctgctttccaggctgaagtgattcattcattattctagtcctgctttagtcctttgtaatttgtggtaattatgcttttctttttaatacaaaaaaatgtataaaaataaacacttgaaaaggcaaaa

SEQ ID NO: 357241 - DNA, 1293 bp, Homo sapiens
ggtgttctagaggatcccatctcaggccaggacgatctcaggcccgggactttttttggggacaggtctggtttggtgcccaggctggagcgcacgggcatgttcacggctcactgcagccttgacttcccaggctcaagacatcctcccacctcagcctcttgagtagctgggaccacagggatgtgtcaccaagcctggctttttcttttctttcctttttttttgtttttgtttttgtttttgtttttggtaacatgttaggagttaatgttgcaaagagtagtttacatcttcactttctgaagacacttgaatttaggaccgatgtatctgtgacaagcatgccagaagtggcaggggccatcagggctaaccacttcacacctaccatcgtcccatggggatccaagacctgagataaagcaacagcctgcccagatccctctgttcatcctatcccttccaaggttggtccatgccaacataacctctgggcatcagacatcagcaggtctgtgtgcctcagccctgttaaggggcaggtttctctttagccctcttcctgcacttgggagcaaaggcactaccagtagagaagggccatccagccgtgccccagcctggacccctggggctcagatagaggtgctgagcccctgtgtcaaagttgttaaatgtttttgttttgttccattgtagctcttttttttttttttttccctttcctggtgattgattttacaaaagaaagtaagctgcttagaaggccctggaagggaagtgaggaggagggacaaggaagatgactagttacggagggtgagggttgttttttgccaaaaagcctgggtagagtgatctgaattatctggcaccctcctgaatggaaccccagagtacctcctgtgtggaagggtccctggattttccctaacacccaccctctcccccttcagccatgctgatggcagagaagataagaacttggagcccatttctcactggagaggaaaacttgtcatctggctttgcggagaaggttccaccttacgctcgtagtacattatctttactatgtgctaggatatcatatttaaaaggacaaaaaaatgtaaaatacttgaatgagcttgtattataacattaatattattgagagtatctgctttccaggctgaagtgattcattcattattctagtcctgctttagtcctttgtaatttgtggtaattatgcttttctttttaatacaaaaaaatgtataaaaataaacacttgaaaaggcaaaa

SEQ ID NO: 357242 - DNA, 2029 bp, Homo sapiens
gagacgctgcttttaccaggaaagactattgaaagatgttttattttatttttctctgacctttccatccttgaaaaaatggggaaaaaagaagaaaaaagacaaaatcgaccataaaagaccaaaaaaaaaaaaaaaaatcagaaaacccccacctaatccacagaaagtaatgtctttcccctccccttggaatttttgttttgtttttggaaataatatttttttaaaagttgccttattgtggagcgggaatctgaaatacccaaatgcctgttttcctcggtggagtcaacccgaagagctcccaccttctctggatgtgcctgggcttggactggctagaatctttctctggactgttgcatgtacagtgcctccatcctggaggcaagagagttgggagtggctcgaatcagagccgtgcccaagatatccctgctgttgcatcgtttgaagctgacgtcctgtgtctgtacactgctgccactgttgtgtcctcgctctgcttgctgttgcctcacgccaggccccgtcctgccgtgacacccttcatcctacccttggaaccccaaggccaagttggttcaaactgttggagaacagagttggcctgcatctggaacacacttgtcctcagcttaccatctcctcacaccccagagtggaaaggtgaacacctgcagctgaggcttggaaacgtttcttgtgttgccctgaaaaatctttgagacctcagggaggctctgtctctcttaaaaggtggagaaagatgccattctctccctaaggtctggtggagtctccccatcttgcatacccttctgcaagccatctatctctgctcactctccaattgacccgcctgggaacaagggatgaggaggagttgggggctggggggaatcctgccagttggtgaagccctgtggcaggaaggtatatgtggacatagagtatacctgattctctttcttcagccactgactgcttgggttgggctgtgaatgataatggaatggctggagtctgctgttgtcagaaggcagggagggtgatgaaggactgacccacatggactgggatgtgtgtcggttatgggcatgactgcacgttcactctcagtgggatctgggcaacatggagttcattgtcctgttgcttacttactgcaatgtctttggccctccttttcaactggttcctctgttgggcccaaaggttgggagtaggagacagtatcccaggctgacaagggcttgccctttaccttgggcaccttgttaatttttagcctgtgcccttccccacctttgccctcccagtggttggtatgtgggaagcccatctcagttcctgtgacttcatgtctcaaaccaaggatgagcgtctggtctctgctatgatggtggtatccgaggcctttccctgcccagtctggtgcctgccccacattgtaccggacactggattcctggacccccttctcctttcctttctttccttcaggtcacgcagccctgtactgtatccagcaccacagaaacctcagtgtttttcctctgctggtttggggcacaaggaagccttagggtatggggaaaggctgttattacctagagtttactcccaggccagggggctgccatcttcttcacagacatccctgaaaggaagcccctttggggcagggagccatgctgatggcagagaagataagaacttggagcccatttctcactggagaggaaaacttgtcatctggctttgcggagaaggttccaccttacgctcgtagtacattatctttactatgtgctaggatatcatatttaaaaggacaaaaaaatgtaaaatacttgaatgagcttgtattataacattaatattattgagagtatctgctttccaggctgaagtgattcattcattattctagtcctgctttagtcctttgtaatttgtggtaattatgcttttctttttaatacaaaaaaatgtataaaaataaacacttgaaaaggcaaaa

SEQ ID NO: 357243 - DNA, 3020 bp, Homo sapiens
gagacgctgcttttaccaggaaagactattgaaagatgttttattttatttttctctgacctttccatccttgaaaaaatggggaaaaaagaagaaaaaagacaaaatcgaccataaaagaccaaaaaaaaaaaaaaaaatcagaaaacccccacctaatccacagaaagtaatgtctttcccctccccttggaatttttgttttgtttttggaaataatatttttttaaaagttgccttattgtggagcgggaatctgaaatacccaaatgcctgttttcctcggtggagtcaacccgaagagctcccaccttctctggatgtgcctgggcttggactggctagaatctttctctggactgttgcatgtacagtgcctccatcctggaggcaagagagttgggagtggctcgaatcagagccgtgcccaagatatccctgctgttgcatcgtttgaagctgacgtcctgtgtctgtacactgctgccactgttgtgtcctcgctctgcttgctgttgcctcacgccaggccccgtcctgccgtgacacccttcatcctacccttggaaccccaaggccaagttggttcaaactgttggagaacagagttggcctgcatctggaacacacttgtcctcagcttaccatctcctcacaccccagagtggaaaggtgaacacctgcagctgaggcttggaaacgtttcttgtgttgccctgaaaaatctttgagacctcagggaggctctgtctctcttaaaaggtggagaaagatgccattctctccctaaggtctggtggagtctccccatcttgcatacccttctgcaagccatctatctctgctcactctccaattgacccgcctgggaacaagggatgaggaggagttgggggctggggggaatcctgccagttggtgaagccctgtggcaggaaggtatatgtggacatagagtatacctgattctctttcttcagccactgactgcttgggttgggctgtgaatgataatggaatggctggagtctgctgttgtcagaaggcagggagggtgatgaaggactgacccacatggactgggatgtgtgtcggttatgggcatgactgcacgttcactctcagtgggatctgggcaacatggagttcattgtcctgttgcttacttactgcaatgtctttggccctccttttcaactggttcctctgttgggcccaaaggttgggagtaggagacagtatcccaggctgacaagggcttgccctttaccttgggcaccttgttaatttttagcctgtgcccttccccacctttgccctcccagtggttggtatgtgggaagcccatctcagttcctgtgacttcatgtctcaaaccaaggatgagcgtctggtctctgctatgatggtggtatccgaggcctttccctgcccagtctggtgcctgccccacattgtaccggacactggattcctggacccccttctcctttcctttctttccttcaggtcacgcagccctgtactgtatccagcaccacagaaacctcagtgtttttcctctgctggtttggggcacaaggaagccttagggtatggggaaaggctgttattacctagagtttactcccaggccagggggctgccatcttcttcacagacatccctgaaaggaagcccctttggggcagggaggtgaggacttcatctcaacatcggctggtggttggtaggggagctttttcttttctttcctttttttttgtttttgtttttgtttttgtttttggtaacatgttaggagttaatgttgcaaagagtagtttacatcttcactttctgaagacacttgaatttaggaccgatgtatctgtgacaagcatgccagaagtggcaggggccatcagggctaaccacttcacacctaccatcgtcccatggggatccaagacctgagataaagcaacagcctgcccagatccctctgttcatcctatcccttccaaggttggtccatgccaacataacctctgggcatcagacatcagcaggtctgtgtgcctcagccctgttaaggggcaggtttctctttagccctcttcctgcacttgggagcaaaggcactaccagtagagaagggccatccagccgtgccccagcctggacccctggggctcagatagaggtgctgagcccctgtgtcaaagttgttaaatgtttttgttttgttccattgtagctcttttttttttttttttccctttcctggtgattgattttacaaaagaaagtaagctgcttagaaggccctggaagggaagtgaggaggagggacaaggaagatgactagttacggagggtgagggttgttttttgccaaaaagcctgggtagagtgatctgaattatctggcaccctcctgaatggaaccccagagtacctcctgtgtggaagggtccctggattttccctaacacccaccctctcccccttcagccatgctgatggcagagaagataagaacttggagcccatttctcactggagaggaaaacttgtcatctggctttgcggagaaggttccaccttacgctcgtagtacattatctttactatgtgctaggatatcatatttaaaaggacaaaaaaatgtaaaatacttgaatgagcttgtattataacattaatattattgagagtatctgctttccaggctgaagtgattcattcattattctagtcctgctttagtcctttgtaatttgtggtaattatgcttttctttttaatacaaaaaaatgtataaaaataaacacttgaaaaggcaaaaaaaaaaaaaaaaaaaaaaaaaaaaaaaaaaaaaaaaaaaaaaaaaaaaaaaaaaaaaaaaaaaaaaaaaaagaaaaaaaaaaaaaagagaggggggggcgacagcagatacaacacgacggggaggcccacacacgccccgaccagacatgttgtatacgaagaggggcacactagaggcgggcatatag

SEQ ID NO: 357244 - DNA, 2601 bp, Homo sapiens
gagacgctgcttttaccaggaaagactattgaaagatgttttattttatttttctctgacctttccatccttgaaaaaatggggaaaaaagaagaaaaaagacaaaatcgaccataaaagaccaaaaaaaaaaaaaaaaatcagaaaacccccacctaatccacagaaagtaatgtctttcccctccccttggaatttttgttttgtttttggaaataatatttttttaaaagttgccttattgtggagcgggaatctgaaatacccaaatgcctgttttcctcggtggagtcaacccgaagagctcccaccttctctggatgtgcctgggcttggactggctagaatctttctctggactgttgcatgtacagtgcctccatcctggaggcaagagagttgggagtggctcgaatcagagccgtgcccaagatatccctgctgttgcatcgtttgaagctgacgtcctgtgtctgtacactgctgccactgttgtgtcctcgctctgcttgctgttgcctcacgccaggccccgtcctgccgtgacacccttcatcctacccttggaaccccaaggccaagttggttcaaactgttggagaacagagttggcctgcatctggaacacacttgtcctcagcttaccatctcctcacaccccagagtggaaaggtgaacacctgcagctgaggcttggaaacgtttcttgtgttgccctgaaaaatctttgagacctcagggaggctctgtctctcttaaaaggtggagaaagatgccattctctccctaaggtctggtggagtctccccatcttgcatacccttctgcaagccatctatctctgctcactctccaattgacccgcctgggaacaagggatgaggaggagttgggggctggggggaatcctgccagttggtgaagccctgtggcaggaaggtatatgtggacatagagtatacctgattctctttcttcagccactgactgcttgggttgggctgtgaatgataatggaatggctggagtctgctgttgtcagaaggcagggagggtgatgaaggactgacccacatggactgggatgtgtgtcggttatgggcatgactgcacgttcactctcagtgggatctgggcaacatggagttcattgtcctgttgcttacttactgcaatgtctttggccctccttttcaactggttcctctgttgggcccaaaggttgggagtaggagacagtatcccaggctgacaagggcttgccctttaccttgggcaccttgttaatttttagcctgtgcccttccccacctttgccctcccagtggttggtatgtgggaagcccatctcagttcctgtgacttcatgtctcaaaccaaggatgagcgtctggtctctgctatgatggtggtatccgaggcctttccctgcccagtctggtgcctgccccacattgtaccggacactggattcctggacccccttctcctttcctttctttccttcaggtcacgcagccctgtactgtatccagcaccacagaaacctcagtgtttttcctctgctggtttggggcacaaggaagccttagggtatggggaaaggctgttattacctagagtttactcccaggccagggggctgccatcttcttcacagacatccctgaaaggaagcccctttggggcagggaggtgaggacttcatctcaacatcggctggtggttggtaggggagctttttcttttctttcctttttttttgtttttgtttttgtttttgtttttggcaacataacctctgggcatcagacatcagcaggtctgtgtgcctcagccctgttaaggggcaggtttctctttagccctcttcctgcacttgggagcaaaggcactaccagtagagaagggccatccagccgtgccccagcctggacccctggggctcagatagaggtgctgagcccctgtgtcaaagttgttaaatgtttttgttttgttccattgtagctcttttttttttttttttccctttcctggtgattgattttacaaaagaaagtaagctgcttagaaggccctggaagggaagtgaggaggagggacaaggaagatgactagttacggagggtgagggttgttttttgccaaaaagcctgggtagagtgatctgaattatctggcaccctcctgaatggaaccccagagtacctcctgtgtggaagggtccctggattttccctaacacccaccctctcccccttcagccatgctgatggcagagaagataagaacttggagcccatttctcactggagaggaaaacttgtcatctggctttgcggagaaggttccaccttacgctcgtagtacattatctttactatgtgctaggatatcatatttaaaaggacaaaaaaatgtaaaatacttgaatgagcttgtattataacattaatattattgagagtatctgctttccaggctgaagtgattcattcattattctagtcctgctttagtcctttgtaatttgtggtaattatgcttttctttttaatacaaaaaaatgtataaaaataaacacttgaaaaggcaaaa

SEQ ID NO: 357245 - DNA, 2194 bp, Homo sapiens
gagacgctgcttttaccaggaaagactattgaaagatgttttattttatttttctctgacctttccatccttgaaaaaatggggaaaaaagaagaaaaaagacaaaatcgaccataaaagaccaaaaaaaaaaaaaaaaatcagaaaacccccacctaatccacagaaagtaatgtctttcccctccccttggaatttttgttttgtttttggaaataatatttttttaaaagttgccttattgtggagcgggaatctgaaatacccaaatgcctgttttcctcggtggagtcaacccgaagagctcccaccttctctggatgtgcctgggcttggactggctagaatctttctctggactgttgcatgtacagtgcctccatcctggaggcaagagagttgggagtggctcgaatcagagccgtgcccaagatatccctgctgttgcatcgtttgaagctgacgtcctgtgtctgtacactgctgccactgttgtgtcctcgctctgcttgctgttgcctcacgccaggccccgtcctgccgtgacacccttcatcctacccttggaaccccaaggccaagttggttcaaactgttggagaacagagttggcctgcatctggaacacacttgtcctcagcttaccatctcctcacaccccagagtggaaaggtgaacacctgcagctgaggcttggaaacgtttcttgtgttgccctgaaaaatctttgagacctcagggaggctctgtctctcttaaaaggtggagaaagatgccattctctccctaaggtctggtggagtctccccatcttgcatacccttctgcaagccatctatctctgctcactctccaattgacccgcctgggaacaagggatgaggaggagttgggggctggggggaatcctgccagttggtgaagccctgtggcaggaaggtatatgtggacatagagtatacctgattctctttcttcagccactgactgcttgggttgggctgtgaatgataatggaatggctggagtctgctgttgtcagaaggcagggagggtgatgaaggactgacccacatggactgggatgtgtgtcggttatgggcatgactgcacgttcactctcagtgggatctgggcaacatggagttcattgtcctgttgcttacttactgcaatgtctttggccctccttttcaactggttcctctgttgggcccaaaggttgggagtaggagacagtatcccaggctgacaagggcttgccctttaccttgggcaccttgttaatttttagcctgtgcccttccccacctttgccctcccagtggttggtatgtgggaagcccatctcagttcctgtgacttcatgtctcaaaccaaggatgagcgtctggtctctgctatgatggtggtatccgaggcctttccctgcccagtctggtgcctgccccacattgtaccggacactggattcctggacccccttctcctttcctttctttccttcaggtcacgcagccctgtactgtatccagcaccacagaaacctcagtgtttttcctctgctggtttggggcacaaggaagccttagggtatggggaaaggctgttattacctagagtttactcccaggccagggggctgccatcttcttcacagacatccctgaaaggaagcccctttggggcagggaggtgaggacttcatctcaacatcggctggtggttggtaggggagctttttcttttctttcctttttttttgtttttgtttttgtttttgtttttggtaacatgttaggagttaatgttgcaaagagtagtttacatcttcactttctgaagacacttgaatttaggaccgatgtatctgtgacaagcatgccagaagtggcaggggccatcagggctaaccacttcacacctaccatcgtcccatggggatccaagacctgagataaagcaacagcctgcccagatccctctgttcatcctatcccttccaaggttggtccatgccaacataacctctgggcatcagacatcagcaggtctgtgtgcctcagccctgttaaggggcaggtttctctttagccctcttcctgcacttgggagcgcacatgcgttgggagcggcacatgcgttgggagcggcacatgcgttgggagcgcacatgcgttgggggatcctctag

SEQ ID NO: 357246 - DNA, 726 bp, Homo sapiens
  misc_feature (681)..(681): n is a, c, g, or t
gaaccgtttactcgctgctgtgcccagtgcccatctatcagcaggctccgggctgaagattgcttctcttctctcctccaaggtctagtgacggagcccgcgcgcggcgccaccatgcggcagaaggcggtatcgcttttcttgtgctacctgctgctcttcacttgcagtggggtggaggcaggtaagaaaaagtgctcggagagctcggacagcggctccgggttctggaaggccctgaccttcatggccgtcggaggaggactcgcagtcgccgggctgcccgcgctgggcttcaccggcgccggcatcgcggccaactcggtggctgcctcgctgatgagctggtctgcgatcctgaatgggggcggcgtgcccgccggggggctagtggccacgctgcagagcctcggggctggtggcagcagcgtcgtcataggtaatattggtgccctgatgggctacgccacccacaagtatctcgatagtgaggaggatgaggagtagccagcagctcccagaacctcttcttccttcttggcctaactcttccagttaggatctagaactttgcctttttttttttttttttttttttggggaaaggggtcccccctttttggcccgggcaaaaggggcgggggatatccccaggttggcgaccttggtacctgggagccntcaaattctatagcctcaaagggagacccccggggtttaaacctc

SEQ ID NO: 357247 - DNA, 216 bp, Homo sapiens
tgagacagagtctcgctctgtcacccaggctggagtgcagtggcatgatctcagctcactgtaacctctgcctcctgggttcaagcaatcctcctgtctcaacctcccaagtaggattacaagcatgcgccgacgatgcccagaatccagaactttgtctatcactctccccaacaacctagatgtgaaaacagaataaacttcacccagaaaaca

SEQ ID NO: 357248 - DNA, 1216 bp, Homo sapiens
ttagggcccatcacaggtccccaagggactcccccccaccagccgagagggggaattccccgggcccgaaggtggaaggcctcccgccccgccactcaagaccccgtcacgccggcccgaaactcatgcccgctccaacactccccggctcgccctctgggcttcaaggaactgacaggaggcgctgggcatccagccccgctctcctcgacagaggcttggacccttgccgcagcttgggcccccgggctcgggcgagggcagcgccccgccggagtctcccggctgtgtagtcccggagagccccgggccccgaggggccgaacggccgctacgacggcggcgaatctcgggctcctgacctggcggacccggtagctgggggcgggagaccggcggggagacaacccgaccaggtgcccatctatcagcaggctccgggctgaagattgcttctcttctctcctccaaggtctagtgacggagcccgcgcgcggcgccaccatgcggcagaaggcggtatcgcttttcttgtgctacctgctgctcttcacttgcagtggggtggaggcaggtaagaaaaagtgctcggagagctcggacagcggctccgggttctggaaggccctgaccttcatggccgtcggaggaggactcgcagtcgccgggctgcccgcgctgggcttcaccggcgccggcatcgcggccaactcggtggctgcctcgctgatgagctggtctgcgatcctgaatgggggcggcgtgcccgccggggggctagtggccacgctgcagagcctcggggctggtggcagcagcgtcgtcataggtaatattggtgccctgatgggctacgccacccacaagtatctcgatagtgaggaggatgaggagtagccagcagctcccagaacctcttcttccttcttggcctaactcttccagttaggatctagaactttgcctttttttttttttttttttttttttgagatgggttctcactatattgtccaggctagagtgcagtggctattcacagatgcgaacatagtacactgcagcctccaactcctagcctcaagtgatcctcctgtctcaacctcccaagtaggattacaagcatgcgccgacgatgcccagaatccagaactttgtctatcactctccccaacaacctagatgtgaaaacagaataaacttcacccagaaaaca

SEQ ID NO: 357249 - DNA, 805 bp, Homo sapiens
gaaccgtttactcgctgctgtgcccagtgcccatctatcagcaggctccgggctgaagattgcttctcttctctcctccaaggtctagtgacggagcccgcgcgcggcgccaccatgcggcagaaggcggtatcgcttttcttgtgctacctgctgctcttcacttgcagtggggtggaggcagattgagcggtgcgcaggcagagtgatggaacatgcgcggtaatgagataacagttgactctggacgagctcgggacagtcggtcatcctgagtgttcttggaacggccctgcacccttcattggcccgtctgcgcacggaggtacctcgactagtccgcctcgaggcgtgccccgcagctcgtgcgcgttccatccgtcgcgcccgtgcagtcgtcggccaaactcgcgtgtgctggccgtcgctagaattcaggcttggctcttgcgattccttgaaactggggaggccgtgcagtgccctcgccagttgcggcgcgctaaagtgggtccaacgggcttggccacgaaagcctcgtcgagtggcctagtgcttggccctagtcacgtccggtcccgctacagtacggttctactcatttcgtgttcgcccccttggacttgggagccttatcagtcccaaccccctacctaaatggtaacttcttccgaagtcagctagacgcgaggcgattcgagggcacgttaggcccagacaaagtcttcctccaagaagacgctacttacctttcctttcttgtgggccttaaactcctgccaaggttgggactctcagacacttt

SEQ ID NO: 357250 - DNA, 854 bp, Homo sapiens
gaaccgtttactcgctgctgtgcccagtgcccatctatcagcaggctccgggctgaagattgcttctcttctctcctccaaggtctagtgacggagcccgcgcgcggcgccaccatgcggcagaaggcggtatcgcttttcttgtgctacctgctgctcttcacttgcagtggggtggaggcaggcaggtgagaatgcgggtaaggatgcaggtaagaaaaagtgctcggagagctcggacagcggctccgggttctggaaggccctgaccttcatggccgtcggaggaggactcgcagtcgccgggctgcccgcgctgggcttcaccggcgccggcatcgcggccaactcggtggctgcctcgctgatgagctggtctgcgatcctgaatgggggcggcgtgcccgccggggggctagtggccacgctgcagagcctcggggctggtggcagcagcgtcgtcataggtaatattggtgccctgatgggctacgccacccacaagtatctcgatagtgaggaggatgaggagtagccagcagctcccagaacctcttcttccttcttggcctaactcttccagttaggatctagaactttgcctttttttttttttttttttttttttgagatgggttctcactatattgtccaggctagagtgcagtggctattcacagatgcgaacatagtacactgcagcctccaactcctagcctcaagtgatcctcctgtctcaacctcccaagtaggattacaagcatgcgccgacgatgcccagaatccagaactttgtctatcactctccccaacaacctagatgtgaaaacagaataaacttcacccagaaaaca

SEQ ID NO: 357251 - DNA, 826 bp, Homo sapiens
gaaccgtttactcgctgctgtgcccagtgcccatctatcagcaggctccgggctgaagattgcttctcttctctcctccaaggtctagtgacggagcccgcgcgcggcgccaccatgcggcagaaggcggtatcgcttttcttgtgctacctgctgctcttcacttgcagtggggtggaggcaggtaagaaaaagtgctcggagagctcggacagcggctccgggttctggaaggccctgaccttcatggccgtcggaggaggactcgcagtcgccgggctgcccgcgctgggcttcaccggcgccggcatcgcggccaactcggtggctgcctcgctgatgagctggtctgcgatcctgaatgggggcggcgtgcccgccggggggctagtggccacgctgcagagcctcggggctggtggcagcagcgtcgtcataggtaatattggtgccctgatgggctacgccacccacaagtatctcgatagtgaggaggatgaggagtagccagcagctcccagaacctcttcttccttcttggcctaactcttccagttaggatctagaactttgcctttttttttttttttttttttttttgagatgggttctcactatattgtccaggctagagtgcagtggctattcacagatgcgaacatagtacactgcagcctccaactcctagcctcaagtgatcctcctgtctcaacctcccaagtaggattacaagcatgcgccgacgatgcccagaatccagaactttgtctatcactctccccaacaacctagatgtgaaaacagaataaacttcacccagaaaaca

SEQ ID NO: 357252 - DNA, 1433 bp, Homo sapiens
ttagggcccatcacaggtccccaagggactcccccccaccagccgagagggggaattccccgggcccgaaggtggaaggcctcccgccccgccactcaagaccccgtcacgccggcccgaaactcatgcccgctccaacactccccggctcgccctctgggcttcaaggaactgacaggaggcgctgggcatccagccccgctctcctcgacagaggcttggacccttgccgcagcttgggcccccgggctcgggcgagggcagcgccccgccggagtctcccggctgtgtagtcccggagagccccgggccccgaggggccgaacggccgctacgacggcggcgaatctcgggctcctgacctggcggacccggtagctgggggcgggagaccggcggggagacaacccgaccaggtgcccatctatcagcaggctccgggctgaagattgcttctcttctctcctccaaggtctagtgacggagcccgcgcgcggcgccaccatgcggcagaaggcggtatcgcttttcttgtgctacctgctgctcttcacttgcagtggggtggaggcaggtaagaaaaagtgctcggagagctcggacagcggctccgggttctggaaggccctgaccttcatggccgtcggaggaggactcgcagtcgccgggctgcccgcgctgggcttcaccggcgccggcatcgcggccaactcggtggctgcctcgctgatgagctggtctgcgatcctgaatgggggcggcgtgcccgccggggggctagtggccacgctgcagagcctcggggctggtggcagcagcgtcgtcataggtaatattggtgccctgatgggctacgccacccacaagtatctcgatagtgaggaggatgaggagtagccagcagctcccagaacctcttcttccttcttggcctaactcttccagttaggatctagaactttgcctttttttttttttttttttttttttgagatgggttctcactatattgtccaggctagagtgcagtggctattcacagatgcgaacatagtacactgcagcctccaactcctagcctcaagtgatcctcctgtctcaacctcccaagtaggattacaagcatgcgccgacgatgcccagaatccagaactttgtctatcactctccccaacaacctagatgtgaaaacagaataaacttcacccagaaaacaaaaaaaaaaaaaaaaaaaaaaaaaaaaaaaaaaaaaaaaaaaaaaaaaaaaaaaaaaaaaaaaaggaaaaaaaaaaaaaaaaaaaaaaaaaaaaacctggtgggccgcttgggccaagtggattttaaattgggccaggtttatcatgggggccgaatttggggctaattgggcaaattgcccttatggggggccgtttaacaattaatggcccgcg

SEQ ID NO: 357253 - DNA, 1701 bp, Homo sapiens
ttagggcccatcacaggtccccaagggactcccccccaccagccgagagggggaattccccgggcccgaaggtggaaggcctcccgccccgccactcaagaccccgtcacgccggcccgaaactcatgcccgctccaacactccccggctcgccctctgggcttcaaggaactgacaggaggcgctgggcatccagccccgctctcctcgacagaggcttggacccttgccgcagcttgggcccccgggctcgggcgagggcagcgccccgccggagtctcccggctgtgtagtcccggagagccccgggccccgaggggccgaacggccgctacgacggcggcgaatctcgggctcctgacctggcggacccggtagctgggggcgggagaccggcggggagacaacccgaccaggtgcccatctatcagcaggctccgggctgaagattgcttctcttctctcctccaaggtctagtgacggagcccgcgcgcggcgccaccatgcggcagaaggcggtatcgcttttcttgtgctacctgctgctcttcacttgcagtggggtggaggcaggtaagaaaaagtgctcggagagctcggacagcggctccgggttctggaaggccctgaccttcatggccgtcggaggaggactcgcagtcgccgggctgcccgcgctgggcttcaccggcgccggcatcgcggccaactcggtggctgcctcgctgatgagctggtctgcgatcctgaatgggggcggcgtgcccgccggggggctagtggccacgctgcagagcctcggggctggtggcagcagcgtcgtcataggtaatattggtgccctgatgggctacgccacccacaagtatctcgatagtgaggaggatgaggagtagccagcagctcccagaacctcttcttccttcttggcctaactcttccagttaggatctagaactttgcctttttttttttttttttttttttttgagatgggttctcactatattgtccaggctagagtgcagtggctattcacagatgcgaacatagtacactgcagcctccaactcctagcctcaagtgatcctcctgtctcaacctcccaagtaggattacaagcatgcgccgacgatgcccagaatccagaactttgtctatcactctccccaacaacctagatgtgaaaacagaataaacttcacccagaaaacactttgtcctgctgtcaatcatgtttgcagtgagaagcccaaaacaatctggctctggcctgcaccatccacacacccccattcccattttcccctcgagtcaaccacagctcctggaacacaaccagttgattttgtttctgggccttagcacatgttggtctctacctggatgccttcagaagctcatctgcctgaaaaactcccttccatccttccagactcagttcagacatcccctcctctggactcctgcctagcaggtcctcctgtataaatggacaggcttgattccacagggtgcttggggaggcagaactcagtttgttctcactgagagaagcttccaggtacttctctgattaggcagagatggagaagccaggtctccgttctctcaagaagcgctagtgatcaccctcagatggagaataaaggccagcccttcgctctggggaaagggcgtaacagcagcttttcgagggc

SEQ ID NO: 357254 - DNA, 436 bp, Homo sapiens
atccacttccaagctcactcatgtggaggttgacaggagacttcagttctgcaccacccatgtgggcctctctgtagggctggtcatgacataacttcccctagatagagtgatcaagacagagtgaacccaattctgaagccacagtcttgtaacctcgaaagagacaagcagtcacttctgccctactctattggccatgtagaccaatcttggtacagtatgtgaggagagggtgtgaataccaggatgtggggtcattgggggccatcttggaggctggccacctcataaggtatttaaacttattatgtttaagttgcatgttcctacctgctttctgtggactgtgttttcaaagcttttggaaaattattcaaatccgtactgtgtgtgtgcgccacccagtaggcaatctgggacctaagtggtgttc

SEQ ID NO: 357255 - DNA, 457 bp, Homo sapiens
cttttgccccggctcccagtgctgcgtggaggacgggcctgaaagcattgactccatcatcgacatggatgctgtgtgcaagcgagtcaccacgttgggcctggatgtgtcggtgaccatctcgcaggatgccggcagccttggaagtcagaagtccaaggtcaaggtggtagcaggactggttccttctggaggtgctgagggaaaaaacccttccctgccaaaggtgactgtgttttctgccgccgaaggagggcccggtccctccaggctcagtgtggcttctccctgacccccgccctagaacttttgccagtgccttttctgaaactcctgtgtcccgggccccccaggcggagaaggatatgccggattctgcctggggctgggctctaggagaccccaaatttgacaccacagaaagcaaataaaacacttgaaatacgaaaaaaaaaaa

SEQ ID NO: 357256 - DNA, 392 bp, Homo sapiens
cttttgccccggctcccagtgctgcgtggaggacgggcctgaaagcattgactccatcatcgacatggatgctgtgtgcaagcgagtcaccacgttgggcctggatgtgtcggtgaccatctcgcaggatgccggcaggaaaaaacccttccctgccaaaggtgactgtgttttctgccgccgaaggagggcccggtccctccaggctcagtgtggcttctccctgacccccgccctagaacttttgccagtgccttttctgaaactcctgtgtcccgggccccccaggcggagaaggatatgccggattctgcctggggctgggctctaggagaccccaaatttgacaccacagaaagcaaataaaacacttgaaatacgaaaaaaaaaaa

SEQ ID NO: 357257 - DNA, 501 bp, Homo sapiens
agatgcagcttcaccatgttggccaggctggtcttgaaatcctgacctcaggtgatctgcctgccttggcctcccaaagtgctgggattacaggtgtgagctactgcgcctggccaagttttttacaaatatttttcttttggtggaactcatctgtgcactctctggtgtgtttttccacctttgttgggtcttggcttaaaatatcctcatgtgggctaggtgtggttactcacacctgtaatcctagcactttgggaggttgaggcaggagaatcccttgagccaggagttcaagaccagcctgggcaacatagcaagagatcccatatctaccaaaacatacaagaattagccagatgtggtggtgcatgcctgtggtcccagatactcaggaggctgaggcaggaggatcacctatgcctgggaggttgaagccccagtgagccatgatcacaccactgtagtccagcccgggtgacacagcaagactctgtctca

SEQ ID NO: 357258 - DNA, 2624 bp, Homo sapiens
aaaagacaggctgaggggtgtggtgggaaggctgggggagaaaggtgagaagtgattgggggggcttccctgatgagtcctcatggagggtgctgaggcagggaacaggggtgcagggacagtgatcagggcacctggtaccctgaccaacttgatgatggcatctcttttaagatgcccaagtctgcgcacttttattcctttattcggcccctagcaccccctccccaccccaaagaaggtcagttgcatgcgtgtggggatgtagctcaaaaaagaaataagatggagtggaaaggaaagaaaggaagaagcaggaattcaaggtgggtgggctgagcttggggccacctagcccacctgctccaatcaagggctggaacaaacctgaggccacttggagaggcagggctgggcagggacagggggtgggggccgaaatcacagcttccccatcagagccagatgtgtgaaggaaatgtcccagatggcagtagtttctcggcaaggaggggaatcctggagatggttcatgtctgtgatcccagtgctttgggaggctgaggtgggaggattgcttgagcccgggagttcgagaccagccctgggcaacatggcgagaccccatctctacagaaattaaaaaaaaaattagccagttgtggtgtcaagcacctgtagtcccagctacttgggaggctgagttgggaggcttatctgagcccaggaggtgaaggctgcaatgagccatgattacactactgtaccccagcctgggcaacagagcaagaccctgcctcaaaattaagaaaaaaaaaaggggggccaggcgcagtggcttatgcctgttatcccagcactttgggaggccaaggcagactgatcgcttgaggccaggagtttgcgaccagcctggccaacatagcaaaaccccatctctactaaaaatacaaaaattagtcaagagtggatggtgcgtgcctgtaatcccagctacctgggaggctgagacaggagaattgcttgaacctgggaggcagaggttgcagtggtgtgagatcacgccactgcattccagactgggcaacatagcaagactctgtcacaaaaaaaaaaaaaaagaattccctgctctgcttttctgctcgttgctggcatagaaacatctagaacagaaagtatccactctggggcagatgggagagctggaaaagtagattcaagatgccttttagtcttggaagtttcttccaggaagcaagaccagctggtatgtttacacctgcactccagtgccctggggaggtgaccaggtggagggggatggctcatggaaatctgtcccgcacagctggcccccttttggctgccactgtctagactgttggcctttgacctctctgcctcttgtggcgtctgaacctagacgtcccttttggagacagctggacaaagccctattctccgcagccccagcctctatcctgaggcctctgggagctgcgtgacggccagcatggggtgctgatcatggtcaaggaggcaggtctttgccaggttgccccatgcagccacccatcctcagcatcctaacttgagggggcaggagagggctttgtttttataatccggattaaatttcccttccctgggcacaagtgcctcatgagggcccggggctgctggttgggagggaaagcatccccgtttttgcagtgaggaggccggccgagggctggggttccacttagacccttggcagaatggctgttgaggggcaggcgctgcccagtgcccacgtctggaaagctaattcccgggtggacgctgaacatacctgctgagagactctgtcccctggtttccaggacagttgtcacaagctgagtggggggggactcccaggacttgagggacccagtcccaccccaaactgctccccctcccccaaattccctttctcctcctgctctttctccccgctgtgcctcccccagttacccacagaagtgcctgcctctccagcgctcacagaacacacaaaaagggacaggaattggtcactgggtagtggccgtggctcctgacgatccagaccagcgtctggcccaagccattcagaggtggggtctggggcctgggggttttgtgtcgtgacactttgtctcaaggagattccacatagggatttgaattaggctttctgcttgccaaggcctgtggcatctgagcctggctgagggccgggcaagcctcccctgagcctttggaagccgagttcactctctgcctgcccaggggagcaccggcttggttctgggggctcctctaacatctcaggtttttatcttgtcttaaatttctttctaggaaaaaacccttccctgccaaaggtgactgtgttttctgccgccgaaggagggcccggtccctccaggctcagtgtggcttctccctgacccccgccctagaacttttgccagtgccttttctgaaactcctgtgtcccgggccccccaggcggagaaggatatgccggattctgcctggggctgggctctaggagaccccaaatttgacaccacagaaagcaaataaaacacttgaaatacgaaaaaaaaaaa

SEQ ID NO: 357259 - DNA, 2495 bp, Homo sapiens
aaaagacaggctgaggggtgtggtgggaaggctgggggagaaaggtgagaagtgattgggggggcttccctgatgagtcctcatggagggtgctgaggcagggaacaggggtgcagggacagtgatcagggcacctggtaccctgaccaacttgatgatggcatctcttttaagatgcccaagtctgcgcacttttattcctttattcggcccctagcaccccctccccaccccaaagaaggtcagttgcatgcgtgtggggatgtagctcaaaaaagaaataagatggagtggaaaggaaagaaaggaagaagcaggaattcaaggtgggtgggctgagcttggggccacctagcccacctgctccaatcaagggctggaacaaacctgaggccacttggagaggcagggctgggcagggacagggggtgggggccgaaatcacagcttccccatcagagccagatgtgtgaaggaaatgtcccagatggcagtagtttctcggcaaggaggggaatcctggagatggttcatgtctgtgatcccagtgctttgggaggctgaggtgggaggattgcttgagcccgggagttcgagaccagccctgggcaacatggcgagaccccatctctacagaaattaaaaaaaaaattagccagttgtggtgtcaagcacctgtagtcccagctacttgggaggctgagttgggaggcttatctgagcccaggaggtgaaggctgcaatgagccatgattacactactgtaccccagcctgggcaacagagcaagaccctgcctcaaaattaagaaaaaaaaaaggggggccaggcgcagtggcttatgcctgttatcccagcactttgggaggccaaggcagactgatcgcttgaggccaggagtttgcgaccagcctggccaacatagcaaaaccccatctctactaaaaatacaaaaattagtcaagagtggatggtgcgtgcctgtaatcccagctacctgggaggctgagacaggagaattgcttgaacctgggaggcagaggttgcagtggtgtgagatcacgccactgcattccagactgggcaacatagcaagactctgtcacaaaaaaaaaaaaaaagaattccctgctctgcttttctgctcgttgctggcatagaaacatctagaacagaaagtatccactctggggcagatgggagagctggaaaagtagattcaagatgccttttagtcttggaagtttcttccaggaagcaagaccagctggtatgtttacacctgcactccagtgccctggggaggtgaccaggtggagggggatggctcatggaaatctgtcccgcacagctggcccccttttggctgccactgtctagactgttggcctttgacctctctgcctcttgtggcgtctgaacctagacgtcccttttggagacagctggacaaagccctattctccgcagccccagcctctatcctgaggcctctgggagctgcgtgacggccagcatggggtgctgatcatggtcaaggaggcaggtctttgccaggttgccccatgcagccacccatcctcagcatcctaacttgagggggcaggagagggctttgtttttataatccggattaaatttcccttccctgggcacaagtgcctcatgagggcccggggctgctggttgggagggaaagcatccccgtttttgcagtgaggaggccggccgagggctggggttccacttagacccttggcagaatggctgttgaggggcaggcgctgcccagtgcccacgtctggaaagctaattcccgggtggacgctgaacatacctgctgagagactctgtcccctggtttccaggacagttgtcacaagctgagtggggggggactcccaggacttgagggacccagtcccaccccaaactgctccccctcccccaaattccctttctcctcctgctctttctccccgctgtgcctcccccagttacccacagaagtgcctgcctctccagcgctcacagaacacacaaaaagggacaggaattggtcactgggtagtggccgtggctcctgacgatccagaccagcgtctggcccaagccattcagaggtggggtctggggcctgggggttttgtgtcgtgacactttgtctcaaggagattccacatagggatttgaattaggctttctgcttgccaaggcctgtggcatctgagcctggctgagggccgggcaagcctcccctgagcctttggaagccgagttcactctctgcctgcccaggggagcaccggcttggttctgggggctcctctaacatctcaggtttttatcttgtcttaaatttctttctaggccaggcgtgatggctcatgcctgtaatcccagcactttgggaggccgagttgggaggatcgcttgagcccaggagttcaagaccagcctgggcaacatagtgagactctgtctctacaaaaaaa

SEQ ID NO: 357260 - DNA, 493 bp, Homo sapiens
gagatgttggacctcctggagcagtcagagggcaaaatcaactattgccacaaacactgagggacgctcaggtctcctaagacctcatcctgctggggaccccacgaggggacatccaccctctggggtgtggccaggaaaagacaagctcttcagcttggggatccgatctggaagagagattctgatctgcccacctcctcttcctccttctctacaaaagctccggttgattcgaggaaaaaacccttccctgccaaaggtgactgtgttttctgccgccgaaggagggcccggtccctccaggctcagtgtggcttctccctgacccccgccctagaacttttgccagtgccttttctgaaactcctgtgtcccgggccccccaggcggagaaggatatgccggattctgcctggggctgggctctaggagaccccaaatttgacaccacagaaagcaaataaaacacttgaaatacgaaaaaaaaaaa

SEQ ID NO: 357261 - DNA, 338 bp, Homo sapiens
gcggcatggcaagggaggacgagtttaatttaggggactcacgacacttcacgggtttttatcttgtcttaaatttctttctaggaaaaaacccttccctgccaaaggtgactgtgttttctgccgccgaaggagggcccggtccctccaggctcagtgtggcttctccctgacccccgccctagaacttttgccagtgccttttctgaaactcctgtgtcccgggccccccaggcggagaaggatatgccggattctgcctggggctgggctctaggagaccccaaatttgacaccacagaaagcaaataaaacacttgaaatacgaaaaaaaaaaa

SEQ ID NO: 357262 - DNA, 300 bp, Homo sapiens
gagatgttggacctcctggagcagtcagagggcaaaatcaactattgccacaaacactgagggacgctcaggtctcctaagacctcatcctgctggggaccccacgaggggacatccaccctctggggtgtggccaggaaaagacaagctcttcagcttggggatccgatctggaagagagattctgatctgcccacctcctcttcctccttctctacaaaagctccggttgattcgagggaagtggtgaaaatttttttttctcccattttcctccctgcatctggggacacagctgcc

SEQ ID NO: 357263 - DNA, 2017 bp, Homo sapiens
agatgcagcttcaccatgttggccaggctggtcttgaaatcctgacctcaggtgatctgcctgccttggcctcccaaagtgctgggattacaggtgtgagctactgcgcctggccaagttttttacaaatatttttcttttggtggaactcatctgtgcactctctggtgtgtttttccacctttgttgggtcttggcttaaaatatcctcatgtgggctaggtgtggttactcacacctgtaatcctagcactttgggaggccaaggcagactgatcgcttgaggccaggagtttgcgaccagcctggccaacatagcaaaaccccatctctactaaaaatacaaaaattagtcaagagtggatggtgcgtgcctgtaatcccagctacctgggaggctgagacaggagaattgcttgaacctgggaggcagaggttgcagtggtgtgagatcacgccactgcattccagactgggcaacatagcaagactctgtcacaaaaaaaaaaaaaaagaattccctgctctgcttttctgctcgttgctggcatagaaacatctagaacagaaagtatccactctggggcagatgggagagctggaaaagtagattcaagatgccttttagtcttggaagtttcttccaggaagcaagaccagctggtatgtttacacctgcactccagtgccctggggaggtgaccaggtggagggggatggctcatggaaatctgtcccgcacagctggcccccttttggctgccactgtctagactgttggcctttgacctctctgcctcttgtggcgtctgaacctagacgtcccttttggagacagctggacaaagccctattctccgcagccccagcctctatcctgaggcctctgggagctgcgtgacggccagcatggggtgctgatcatggtcaaggaggcaggtctttgccaggttgccccatgcagccacccatcctcagcatcctaacttgagggggcaggagagggctttgtttttataatccggattaaatttcccttccctgggcacaagtgcctcatgagggcccggggctgctggttgggagggaaagcatccccgtttttgcagtgaggaggccggccgagggctggggttccacttagacccttggcagaatggctgttgaggggcaggcgctgcccagtgcccacgtctggaaagctaattcccgggtggacgctgaacatacctgctgagagactctgtcccctggtttccaggacagttgtcacaagctgagtggggggggactcccaggacttgagggacccagtcccaccccaaactgctccccctcccccaaattccctttctcctcctgctctttctccccgctgtgcctcccccagttacccacagaagtgcctgcctctccagcgctcacagaacacacaaaaagggacaggaattggtcactgggtagtggccgtggctcctgacgatccagaccagcgtctggcccaagccattcagaggtggggtctggggcctgggggttttgtgtcgtgacactttgtctcaaggagattccacatagggatttgaattaggctttctgcttgccaaggcctgtggcatctgagcctggctgagggccgggcaagcctcccctgagcctttggaagccgagttcactctctgcctgcccaggggagcaccggcttggttctgggggctcctctaacatctcaggtttttatcttgtcttaaatttctttctaggaaaaaacccttccctgccaaaggtgactgtgttttctgccgccgaaggagggcccggtccctccaggctcagtgtggcttctccctgacccccgccctagaacttttgccagtgccttttctgaaactcctgtgtcccgggccccccaggcggagaaggatatgccggattctgcctggggctgggctctaggagaccccaaatttgacaccacagaaagcaaataaaacacttgaaatacgaaaaaaaaaaa

SEQ ID NO: 357264 - DNA, 630 bp, Homo sapiens
tctcggcgatttttacgatctaacttcgagataaaacccctatccatttgacatctaaatgtcatagcgacttttgggatagtttgctatcgacaaagggagacaaagtcaaggggtgaagggaaaggagggccaagtagagcctccacgaccctcggcttcctcctcaccagctccccctccctccaagtccagtaagaagttgggccaagctggaagggattgaccggccgtttcctctccctcgccggcctcggcggagattccaggccctatagaaaccaggacgtcccttagcgccaccgcctcacatgccagtgctgccgggaacccagcgatatccgcaccagcggagaaggttccaggctgccggcggcggcgcagagagcgggaagagaggctcggaggaagccccgggcgtggcgtggtcaggctccgagagcggccgggatgcggccacaccggcctggtaaactcgcacctcttaggatcttgctcccggactcattcccttccccaccccctattttaaagttttatttgggtcgtctgtatcaatttagaacgagataaattaagacaaagaaagtaaaataaatcgaaataaaatataggaatagctcttggcga

SEQ ID NO: 357265 - DNA, 558 bp, Homo sapiens
  misc_feature (1)..(1): n is a, c, g, or t
  misc_feature (11)..(11): n is a, c, g, or t
ntagctgcagnggctctcttaattaccccgctcaggctttggggagggggtgggagagacgacaggtctgggatcagggagtcttcaaggcccccgctgaggggacagcgaatctaccattgaaccgtgcacgggggacatggacaaaatgagacgcgacagggacaagagcattttgctctgcttccaggaaacatcaagttgcttgtctggagatggagccactacaggcgggcctgggcgcctggagtcgggcatgaaagaaaatagcgcctcatcgctcttatctaagcccagaggtagacttcgcttgaaaagatcgagaatggaggaggggatcggcactcacttgcagacatcaacagtttccagaaaattcggttcaattccttcaccacggacccaccaaccaaggagctggcaaaacccactaaccaaccaggagaacacagacccggtttgtcttttgacaaccgagtggaactgacggggccggcgcctgccctgcgggtcccctcccttggctgagaagaaaaccaaataaaccttgaacagcct

SEQ ID NO: 357266 - DNA, 1002 bp, Homo sapiens
tctcggcgatttttacgatctaacttcgagataaaacccctatccatttgacatctaaatgtcatagcgacttttgggatagtttgctatcgacaaagggagacaaagtcaaggggtgaagggaaaggagggccaagtagagcctccacgaccctcggcttcctcctcaccagctccccctccctccaagtccagtaagaagttgggccaagctggaagggattgaccgggttgcttgtctggagatggagccactacaggcgggcctgggcgcctggagtcgggcatgaaagaaaatagcgcctcatcgctcttatctaagcccagaggtccaggggacaacctgagggccctgaagtgtttcaataccatgtaccagcttgacttctctacatgtcctttggattgcccaaaagcaaaatctcagaggggccaaggaccttctaggggggtcgtctgctctgtctggacacacaagaaccatcatgcgtgtgagagcctttggcatgagagacacaaagccacagggaaacacatggtgtggagactgtgctgagagcagagatgcagagatgcagagacagcagagatgcagagacagcagagatgcagagacagcagagagtggacgaacgaggagggtgtggggtggctggggatggcgtgaggtccagggaacaggaggggctctcgtgcaccagcgtgggtggagaaatcaaacaggatgaagcctcgacagaaagaacaggacacgagactgaggaagctccgagagagcagcgagggagaccagtggctggaaaatgagaaaacaaagccactgaggccccagcagcagccccagcgccgaccagcagggggcacaggacagagaagaggaagcggcagcagccccagcgccgaccagcagcgggcacaggacagagaagaggaagccgcagcagctccagtgcctaaccagcagcgggcacaggacagagaagaggaagccgcagcagcccc

SEQ ID NO: 357267 - DNA, 1798 bp, Homo sapiens
gagactagccctctcctcacttggtgatatggagtgaaggagtgaggggtatccctcagcctaggtggctttatttgtctgatccctatcctgcctgcaaccctcactccagtaccctctacaatcccaaaagacttaagaatagcctgggctataggattttcaggaatcagggatgtcccagtaaatctgggcacaaggaagaaatcattcttcttccagttgtgggctttgaaccctcctgatagttgaggcagtcagagaccactgggaagaaatgcatcctcactcctcttctaagtctctgtaggagctgccagttctttttaaaattaattctttcccaagacttggtttttgctttagtttgatagggagagaaggtcgtttgcgttctcttggggactcagcaggctgttccagccatcagccagcatcccctctcccttctgtctgtatctcagcatcgctacaattccctcccacaccccgtgtttgtatcatcagctttgccgccttacaaatttaggtgtgtcagagaatgtatgtctctggctctttcatccaaggaaaataagcattgagcccaggctgggagacagggccacagtgcattcccaacattctaatatacatacacaggccaagtagtgaagggtgacaaccttcacacctggggacaagaaggggccagggcatggaacaaagtcagatgtcaggccaggctgaccctcctctgccttgtccttcctttgggctcctttttctggccaagttctgcccactgaagatggtacaagacactagggaaggtggcaggggactgagcttggatcaccaagggtgggaacttatttggttgcacgtggtctccaaggctctctaaactcagggcaacttcttggctgtaccttaatggcaaaatagccatccctagatggcctccaattacttcctaacctgactctgtgggagtgtttgataagcatttaagaaaacaaatttaaaccccctgataatgaagaaggataaatattccatatctaggtatggctgggcttgcttctagagaggactaggggccatttgaacagggggagaaaagtgggagagagtacctgcatgcacctccctgcctactgctgaggctgagccctgggcctcagccttccctgcctcctccctgcccacaatgtctccatcctagcactaaatagtgtggttttctcagtgaagtctgaacaaaataagatctggtgaggaagggagcatttccctgtgtcagaagcagggaaataattgccttatctttagagtcacagcccccaaattaacctcacctctgcaggttgcttgtctggagatggagccactacaggcgggcctgggcgcctggagtcgggcatgaaagaaaatagcgcctcatcgctcttatctaagcccagaggtatttatgagcgtttattcgtctgatccgtttgtttgggaaaaagagcaggcgggcagggcaggccagagaccgactcctttctggagccagatccctacgaatctgtctgtggttcggtccaccgccctctgtctgtctccttgggggaatatgtaaatacacagcgggctcagccatccgccagtctggggtgtctctccctgcctcaatgaggaagtgtgtgttcagagagatggatagaagtgtgtaccaattcttgagtacataacagagggattgtacagataccccacaggcaggatttataattgtaattttctatgctgtgagtctgcagtcctgtgggca

SEQ ID NO: 357268 - DNA, 428 bp, Homo sapiens
ggaagccgcttcccttgccagccgccagccgtttcctctccctcgccggcctcggcggagattccaggccctatagaaaccaggacgtcccttagcgccaccgcctcacatgccagtgctgccgggaacccagcgatatccgcaccagcggagaaggttccaggctgccggcggcggcgcagagagcgggaagagaggctcggaggaagccccgggcgtggcgtggtcaggctccgagagcggccgggatgcggccacaccggcctggtaaactcgcacctcttaggatcttgctcccggactcattcccttccccaccccctattttaaagttttatttgggtcgtctgtatcaatttagaacgagataaattaagacaaagaaagtaaaataaatcgaaataaaatataggaatagctcttggcga

SEQ ID NO: 357269 - DNA, 422 bp, Homo sapiens
tcttgatctggcgctcggacaggcagagtgcgtgggcgatctcgatgcgccgtcgccgggtcaggttgcttgtctggagatggagccactacaggcgggcctgggcgcctggagtcgggcatgaaagaaaatagcgcctcatcgctcttatctaagcccagaggtagacttcgcttgaaaagatcgagaatggaggaggggatcggcactcacttgcagacatcaacagtttccagaaaattcggttcaattccttcaccacggacccaccaaccaaggagctggcaaaacccactaaccaaccaggagaacacagacccggtttgtcttttgacaaccgagtggaactgacggggccggcgcctgccctgcgggtcccctcccttggctgagaagaaaaccaaataaaccttgaacagcct

SEQ ID NO: 357270 - DNA, 588 bp, Homo sapiens
tctcggcgatttttacgatctaacttcgagataaaacccctatccatttgacatctaaatgtcatagcgacttttgggatagtttgctatcgacaaagggagacaaagtcaaggggtgaagggaaaggagggccaagtagagcctccacgaccctcggcttcctcctcaccagctccccctccctccaagtccagtaagaagttgggccaagctggaagggattgaccgggttgcttgtctggagatggagccactacaggcgggcctgggcgcctggagtcgggcatgaaagaaaatagcgcctcatcgctcttatctaagcccagaggtagacttcgcttgaaaagatcgagaatggaggaggggatcggcactcacttgcagacatcaacagtttccagaaaattcggttcaattccttcaccacggacccaccaaccaaggagctggcaaaacccactaaccaaccaggagaacacagacccggtttgtcttttgacaaccgagtggaactgacggggccggcgcctgccctgcgggtcccctcccttggctgagaagaaaaccaaataaaccttgaacagcct

SEQ ID NO: 357271 - DNA, 484 bp, Homo sapiens
gcgtcggttctggaaccatatcttgatctgcctctccgtcaggcacagggcgtgcgcgatctcgatgcgccgccgccgggtcagccgtttcctctccctcgccggcctcggcggagattccaggccctatagaaaccaggacgtcccttagcgccaccgcctcacatgccagtgctgccgggaacccagcgatatccgcaccagcggagaaggttccaggctgccggcggcggcgcagagagcgggaagagaggctcggaggaagccccgggcgtggcgtggtcaggctccgagagcggccgggatgcggccacaccggcctggtaaactcgcacctcttaggatcttgctcccggactcattcccttccccaccccctattttaaagttttatttgggtcgtctgtatcaatttagaacgagataaattaagacaaagaaagtaaaataaatcgaaataaaatataggaatagctcttggcga

SEQ ID NO: 357272 - DNA, 434 bp, Homo sapiens
gttttcttattttttaaaggataattgaggaaaaaaaaaatcaagatttggggggaattacctacaaagatgtaaggttgcttgtctggagatggagccactacaggcgggcctgggcgcctggagtcgggcatgaaagaaaatagcgcctcatcgctcttatctaagcccagaggtagacttcgcttgaaaagatcgagaatggaggaggggatcggcactcacttgcagacatcaacagtttccagaaaattcggttcaattccttcaccacggacccaccaaccaaggagctggcaaaacccactaaccaaccaggagaacacagacccggtttgtcttttgacaaccgagtggaactgacggggccggcgcctgccctgcgggtcccctcccttggctgagaagaaaaccaaataaaccttgaacagcct

SEQ ID NO: 357273 - DNA, 489 bp, Homo sapiens
tctcggcgatttttacgatctaacttcgagataaaacccctatccatttgacatctaaatgtcatagcgacttttgggatagtttgctatcgacaaagggagacaaagtcaaggggtgaagggaaaggagggccaagtagagcctccacgaccctcggcttcctcctcaccagctccccctccctccaagtccagtaagaagttgggccaagctggaagggattgaccgggtagacttcgcttgaaaagatcgagaatggaggaggggatcggcactcacttgcagacatcaacagtttccagaaaattcggttcaattccttcaccacggacccaccaaccaaggagctggcaaaacccactaaccaaccaggagaacacagacccggtttgtcttttgacaaccgagtggaactgacggggccggcgcctgccctgcgggtcccctcccttggctgagaagaaaaccaaataaaccttgaacagcct

SEQ ID NO: 357274 - DNA, 323 bp, Homo sapiens
tcttgatctggcgctcggacaggcagagtgcgtgggcgatctcgatgcgccgtcgccgggtcaggtagacttcgcttgaaaagatcgagaatggaggaggggatcggcactcacttgcagacatcaacagtttccagaaaattcggttcaattccttcaccacggacccaccaaccaaggagctggcaaaacccactaaccaaccaggagaacacagacccggtttgtcttttgacaaccgagtggaactgacggggccggcgcctgccctgcgggtcccctcccttggctgagaagaaaaccaaataaaccttgaacagcct

SEQ ID NO: 357275 - DNA, 1942 bp, Homo sapiens
gagactagccctctcctcacttggtgatatggagtgaaggagtgaggggtatccctcagcctaggtggctttatttgtctgatccctatcctgcctgcaaccctcactccagtaccctctacaatcccaaaagacttaagaatagcctgggctataggattttcaggaatcagggatgtcccagtaaatctgggcacaaggaagaaatcattcttcttccagttgtgggctttgaaccctcctgatagttgaggcagtcagagaccactgggaagaaatgcatcctcactcctcttctaagtctctgtaggagctgccagttctttttaaaattaattctttcccaagacttggtttttgctttagtttgatagggagagaaggtcgtttgcgttctcttggggactcagcaggctgttccagccatcagccagcatcccctctcccttctgtctgtatctcagcatcgctacaattccctcccacaccccgtgtttgtatcatcagctttgccgccttacaaatttaggtgtgtcagagaatgtatgtctctggctctttcatccaaggaaaataagcattgagcccaggctgggagacagggccacagtgcattcccaacattctaatatacatacacaggccaagtagtgaagggtgacaaccttcacacctggggacaagaaggggccagggcatggaacaaagtcagatgtcaggccaggctgaccctcctctgccttgtccttcctttgggctcctttttctggccaagttctgcccactgaagatggtacaagacactagggaaggtggcaggggactgagcttggatcaccaagggtgggaacttatttggttgcacgtggtctccaaggctctctaaactcagggcaacttcttggctgtaccttaatggcaaaatagccatccctagatggcctccaattacttcctaacctgactctgtgggagtgtttgataagcatttaagaaaacaaatttaaaccccctgataatgaagaaggataaatattccatatctaggtatggctgggcttgcttctagagaggactaggggccatttgaacagggggagaaaagtgggagagagtacctgcatgcacctccctgcctactgctgaggctgagccctgggcctcagccttccctgcctcctccctgcccacaatgtctccatcctagcactaaatagtgtggttttctcagtgaagtctgaacaaaataagatctggtgaggaagggagcatttccctgtgtcagaagcagggaaataattgccttatctttagagtcacagcccccaaattaacctcacctctgcaggttgcttgtctggagatggagccactacaggcgggcctgggcgcctggagtcgggcatgaaagaaaatagcgcctcatcgctcttatctaagcccagaggtccaggggacaacctgagggccctgaagtgtttcaataccatgtaccagcttgacttctctacatgtcctttggattgcccaaaagcaaaatctcagaggggccaaggaccttctagggctggctccctcagggcctcctatagagcagctccttgagtcgggccttatagccaccagaaagtcacctcgccgcaggaaagctataaagagctgctccagaggcgccgaaagagggtagacttcgcttgaaaagatcgagaatggaggaggggatcggcactcacttgcagacatcaacagtttccagaaaattcggttcaattccttcaccacggacccaccaaccaaggagctggcaaaacccactaaccaaccaggagaacacagacccggtttgtcttttgacaaccgagtggaactgacggggccggcgcctgccctgcgggtcccctcccttggctgagaagaaaaccaaataaaccttgaacagcct

SEQ ID NO: 357276 - DNA, 2652 bp, Homo sapiens
gagactagccctctcctcacttggtgatatggagtgaaggagtgaggggtatccctcagcctaggtggctttatttgtctgatccctatcctgcctgcaaccctcactccagtaccctctacaatcccaaaagacttaagaatagcctgggctataggattttcaggaatcagggatgtcccagtaaatctgggcacaaggaagaaatcattcttcttccagttgtgggctttgaaccctcctgatagttgaggcagtcagagaccactgggaagaaatgcatcctcactcctcttctaagtctctgtaggagctgccagttctttttaaaattaattctttcccaagacttggtttttgctttagtttgatagggagagaaggtcgtttgcgttctcttggggactcagcaggctgttccagccatcagccagcatcccctctcccttctgtctgtatctcagcatcgctacaattccctcccacaccccgtgtttgtatcatcagctttgccgccttacaaatttaggtgtgtcagagaatgtatgtctctggctctttcatccaaggaaaataagcattgagcccaggctgggagacagggccacagtgcattcccaacattctaatatacatacacaggccaagtagtgaagggtgacaaccttcacacctggggacaagaaggggccagggcatggaacaaagtcagatgtcaggccaggctgaccctcctctgccttgtccttcctttgggctcctttttctggccaagttctgcccactgaagatggtacaagacactagggaaggtggcaggggactgagcttggatcaccaagggtgggaacttatttggttgcacgtggtctccaaggctctctaaactcagggcaacttcttggctgtaccttaatggcaaaatagccatccctagatggcctccaattacttcctaacctgactctgtgggagtgtttgataagcatttaagaaaacaaatttaaaccccctgataatgaagaaggataaatattccatatctaggtatggctgggcttgcttctagagaggactaggggccatttgaacagggggagaaaagtgggagagagtacctgcatgcacctccctgcctactgctgaggctgagccctgggcctcagccttccctgcctcctccctgcccacaatgtctccatcctagcactaaatagtgtggttttctcagtgaagtctgaacaaaataagatctggtgaggaagggagcatttccctgtgtcagaagcagggaaataattgccttatctttagagtcacagcccccaaattaacctcacctctgcaggttgcttgtctggagatggagccactacaggcgggcctgggcgcctggagtcgggcatgaaagaaaatagcgcctcatcgctcttatctaagcccagaggtccaggggacaacctgagggccctgaagtgtttcaataccatgtaccagcttgacttctctacatgtcctttggattgcccaaaagcaaaatctcagaggggccaaggaccttctagggctggctccctcagggcctcctatagagcagctccttgagtcgggccttatagccaccagaaagtcacctcgccgcaggaaagctataaagagctgctccagaggcgccgaaagagggtgagggctgcagccacagtgtttgtccccagcaccaccaggccccttaacctcgtcagctcctctagccctcggccagactctggcaacaccttggtttgcctggcaccgcaggcaatttcctggaaccccacccccacccaggaacggggaccacagcacctttaaaggaactgccagagcttcctcctacggcttgaaagcccaagctaatcagtaacccgtgagacaggggccaatattcaaacgctgcagcagaggcgcatagcctagccctggccaccccctcttgggaaggaggtcgagttaagccggtgtggagggtccaacaggaacggaaattacgacggtgtggttccttaaggatttggccccagtcccactaccaaatttttcccaaatcatatttaggtagacttcgcttgaaaagatcgagaatggaggaggggatcggcactcacttgcagacatcaacagtttccagaaaattcggttcaattccttcaccacggacccaccaaccaaggagctggcaaaacccactaaccaaccaggagaacacagacccgccgtttcctctccctcgccggcctcggcggagattccaggccctatagaaaccaggacgtcccttagcgccaccgcctcacatgccagtgctgccgggaacccagcgatatccgcaccagcggagaaggttccaggctgccggcggcggcgcagagagcgggaagagaggctcggaggaagccccgggcgtggcgtggtcaggctccgagagcggccgggatgcggccacaccggcctggtaaactcgcacctcttaggatcttgctcccggactcattcccttccccaccccctattttaaagttttatttgggtcgtctgtatcaatttagaacgagataaattaagacaaagaaagtaaaataaatcgaaataaaatataggaatagctcttggcga

SEQ ID NO: 357277 - DNA, 2353 bp, Homo sapiens
gagactagccctctcctcacttggtgatatggagtgaaggagtgaggggtatccctcagcctaggtggctttatttgtctgatccctatcctgcctgcaaccctcactccagtaccctctacaatcccaaaagacttaagaatagcctgggctataggattttcaggaatcagggatgtcccagtaaatctgggcacaaggaagaaatcattcttcttccagttgtgggctttgaaccctcctgatagttgaggcagtcagagaccactgggaagaaatgcatcctcactcctcttctaagtctctgtaggagctgccagttctttttaaaattaattctttcccaagacttggtttttgctttagtttgatagggagagaaggtcgtttgcgttctcttggggactcagcaggctgttccagccatcagccagcatcccctctcccttctgtctgtatctcagcatcgctacaattccctcccacaccccgtgtttgtatcatcagctttgccgccttacaaatttaggtgtgtcagagaatgtatgtctctggctctttcatccaaggaaaataagcattgagcccaggctgggagacagggccacagtgcattcccaacattctaatatacatacacaggccaagtagtgaagggtgacaaccttcacacctggggacaagaaggggccagggcatggaacaaagtcagatgtcaggccaggctgaccctcctctgccttgtccttcctttgggctcctttttctggccaagttctgcccactgaagatggtacaagacactagggaaggtggcaggggactgagcttggatcaccaagggtgggaacttatttggttgcacgtggtctccaaggctctctaaactcagggcaacttcttggctgtaccttaatggcaaaatagccatccctagatggcctccaattacttcctaacctgactctgtgggagtgtttgataagcatttaagaaaacaaatttaaaccccctgataatgaagaaggataaatattccatatctaggtatggctgggcttgcttctagagaggactaggggccatttgaacagggggagaaaagtgggagagagtacctgcatgcacctccctgcctactgctgaggctgagccctgggcctcagccttccctgcctcctccctgcccacaatgtctccatcctagcactaaatagtgtggttttctcagtgaagtctgaacaaaataagatctggtgaggaagggagcatttccctgtgtcagaagcagggaaataattgccttatctttagagtcacagcccccaaattaacctcacctctgcaggttgcttgtctggagatggagccactacaggcgggcctgggcgcctggagtcgggcatgaaagaaaatagcgcctcatcgctcttatctaagcccagaggtccaggggacaacctgagggccctgaagtgtttcaataccatgtaccagcttgacttctctacatgtcctttggattgcccaaaagcaaaatctcagaggggccaaggaccttctagggctggctccctcagggcctcctatagagcagctccttgagtcgggccttatagccaccagaaagtcacctcgccgcaggaaagctataaagagctgctccagaggcgccgaaagagggtgagggctgcagccacagtgtttgtccccagcaccaccaggccccttaacctcgtcagctcctctagccctcggccagactctggcaacaccttggtttgcctggcaccgcaggcaatttcctggaaccccacccccacccaggaacggggaccacagcacctttaaaggaactgccagagcttcctcctacggcttgaaagcccaagctaatcagtaacccgtgagacaggggccaatattcaaacgctgcagcagaggcgcatagcctagccctggccaccccctcttgggaaggaggtcgagttaagccggtgtggagggtccaacaggaacggaaattacgacggtgtggttccttaaggatttggccccagtcccactaccaaatttttcccaaatcatatttaggtagacttcgcttgaaaagatcgagaatggaggaggggatcggcactcacttgcagacatcaacagtttccagaaaattcggttcaattccttcaccacggacccaccaaccaaggagctggcaaaacccactaaccaaccaggagaacacagacccggtttgtcttttgacaaccgagtggaactgacggggccggcgcctgccctgcgggtcccctcccttggctgagaagaaaaccaaataaaccttgaacagcct

SEQ ID NO: 357278 - DNA, 1706 bp, Homo sapiens
gagactagccctctcctcacttggtgatatggagtgaaggagtgaggggtatccctcagcctaggtggctttatttgtctgatccctatcctgcctgcaaccctcactccagtaccctctacaatcccaaaagacttaagaatagcctgggctataggattttcaggaatcagggatgtcccagtaaatctgggcacaaggaagaaatcattcttcttccagttgtgggctttgaaccctcctgatagttgaggcagtcagagaccactgggaagaaatgcatcctcactcctcttctaagtctctgtaggagctgccagttctttttaaaattaattctttcccaagacttggtttttgctttagtttgatagggagagaaggtcgtttgcgttctcttggggactcagcaggctgttccagccatcagccagcatcccctctcccttctgtctgtatctcagcatcgctacaattccctcccacaccccgtgtttgtatcatcagctttgccgccttacaaatttaggtgtgtcagagaatgtatgtctctggctctttcatccaaggaaaataagcattgagcccaggctgggagacagggccacagtgcattcccaacattctaatatacatacacaggccaagtagtgaagggtgacaaccttcacacctggggacaagaaggggccagggcatggaacaaagtcagatgtcaggccaggctgaccctcctctgccttgtccttcctttgggctcctttttctggccaagttctgcccactgaagatggtacaagacactagggaaggtggcaggggactgagcttggatcaccaagggtgggaacttatttggttgcacgtggtctccaaggctctctaaactcagggcaacttcttggctgtaccttaatggcaaaatagccatccctagatggcctccaattacttcctaacctgactctgtgggagtgtttgataagcatttaagaaaacaaatttaaaccccctgataatgaagaaggataaatattccatatctaggtatggctgggcttgcttctagagaggactaggggccatttgaacagggggagaaaagtgggagagagtacctgcatgcacctccctgcctactgctgaggctgagccctgggcctcagccttccctgcctcctccctgcccacaatgtctccatcctagcactaaatagtgtggttttctcagtgaagtctgaacaaaataagatctggtgaggaagggagcatttccctgtgtcagaagcagggaaataattgccttatctttagagtcacagcccccaaattaacctcacctctgcaggttgcttgtctggagatggagccactacaggcgggcctgggcgcctggagtcgggcatgaaagaaaatagcgcctcatcgctcttatctaagcccagaggtagacttcgcttgaaaagatcgagaatggaggaggggatcggcactcacttgcagacatcaacagtttccagaaaattcggttcaattccttcaccacggacccaccaaccaaggagctggcaaaacccactaaccaaccaggagaacacagacccggtttgtcttttgacaaccgagtggaactgacggggccggcgcctgccctgcgggtcccctcccttggctgagaagaaaaccaaataaaccttgaacagcct

SEQ ID NO: 357279 - DNA, 1145 bp, Homo sapiens
cgagttttcacatctttattattgttgttgttgttgttattattattattattatcatcatcatcatcatcatcatcatcgaagtatttcacgtccagagctaagacaagactacaaacacaacacattccagctcccaggaaaatgtttcctaagttgtgttcagttcgggagtaaaattcttgataggtaacctcaggagggatatttgcgtgtgtgtgtgtgtgtgtgtgtgtgtgtgtggtgtggtgtggtgtgtgtgggagggtgctgagacattgtccaggcttccaatttcctctaagctataaagccctctccctcagctctttgaggtgatgagcaccttctcccaccacccccaactttggctggggtggggtgggatgaaaatatttcaactcaattctcgtcctggactctgtttctctgggtttggggaacataaataaatgttcccaggggtactgagtgatcactcccataggttgagggaggctgtttagatgagacactttgccctaaaatcggcccctccaaatcaaagtacaaagacttcattttcattatgcaaaggagcggcatcctctttgatctttaggggagtgagcagtagtgctgaacccactctcccggtttcctacccgcaggtccaggggacaacctgagggccctgaagtgtttcaataccatgtaccagcttgacttctctacatgtcctttggattgcccaaaagcaaaatctcagaggggccaaggaccttctagggctggctccctcagggcctcctatagagcagctccttgagtcgggccttatagccaccagaaagtcacctcgccgcaggaaagctataaagagctgctccagaggcgccgaaagagggtagacttcgcttgaaaagatcgagaatggaggaggggatcggcactcacttgcagacatcaacagtttccagaaaattcggttcaattccttcaccacggacccaccaaccaaggagctggcaaaacccactaaccaaccaggagaacacagacccggtttgtcttttgacaaccgagtggaactgacggggccggcgcctgccctgcgggtcccctcccttggctgagaagaaaaccaaataaaccttgaacagcct

SEQ ID NO: 357280 - DNA, 887 bp, Homo sapiens
tctcggcgatttttacgatctaacttcgagataaaacccctatccatttgacatctaaatgtcatagcgacttttgggatagtttgctatcgacaaagggagacaaagtcaaggggtgaagggaaaggagggccaagtagagcctccacgaccctcggcttcctcctcaccagctccccctccctccaagtccagtaagaagttgggccaagctggaagggattgaccgggttgcttgtctggagatggagccactacaggcgggcctgggcgcctggagtcgggcatgaaagaaaatagcgcctcatcgctcttatctaagcccagaggtagacttcgcttgaaaagatcgagaatggaggaggggatcggcactcacttgcagacatcaacagtttccagaaaattcggttcaattccttcaccacggacccaccaaccaaggagctggcaaaacccactaaccaaccaggagaacacagacccgccgtttcctctccctcgccggcctcggcggagattccaggccctatagaaaccaggacgtcccttagcgccaccgcctcacatgccagtgctgccgggaacccagcgatatccgcaccagcggagaaggttccaggctgccggcggcggcgcagagagcgggaagagaggctcggaggaagccccgggcgtggcgtggtcaggctccgagagcggccgggatgcggccacaccggcctggtaaactcgcacctcttaggatcttgctcccggactcattcccttccccaccccctattttaaagttttatttgggtcgtctgtatcaatttagaacgagataaattaagacaaagaaagtaaaataaatcgaaataaaatataggaatagctcttggcga

SEQ ID NO: 357281 - DNA, 459 bp, Homo sapiens
  misc_feature (1)..(1): n is a, c, g, or t
  misc_feature (11)..(11): n is a, c, g, or t
ntagctgcagnggctctcttaattaccccgctcaggctttggggagggggtgggagagacgacaggtctgggatcagggagtcttcaaggcccccgctgaggggacagcgaatctaccattgaaccgtgcacgggggacatggacaaaatgagacgcgacagggacaagagcattttgctctgcttccaggaaacatcaagtagacttcgcttgaaaagatcgagaatggaggaggggatcggcactcacttgcagacatcaacagtttccagaaaattcggttcaattccttcaccacggacccaccaaccaaggagctggcaaaacccactaaccaaccaggagaacacagacccggtttgtcttttgacaaccgagtggaactgacggggccggcgcctgccctgcgggtcccctcccttggctgagaagaaaaccaaataaaccttgaacagcct

SEQ ID NO: 357282 - DNA, 1504 bp, Homo sapiens
  misc_feature (1)..(1): n is a, c, g, or t
  misc_feature (11)..(11): n is a, c, g, or t
ntagctgcagnggctctcttaattaccccgctcaggctttggggagggggtgggagagacgacaggtctgggatcagggagtcttcaaggcccccgctgaggggacagcgaatctaccattgaaccgtgcacgggggacatggacaaaatgagacgcgacagggacaagagcattttgctctgcttccaggaaacatcaagttgcttgtctggagatggagccactacaggcgggcctgggcgcctggagtcgggcatgaaagaaaatagcgcctcatcgctcttatctaagcccagaggtccaggggacaacctgagggccctgaagtgtttcaataccatgtaccagcttgacttctctacatgtcctttggattgcccaaaagcaaaatctcagaggggccaaggaccttctagggctggctccctcagggcctcctatagagcagctccttgagtcgggccttatagccaccagaaagtcacctcgccgcaggaaagctataaagagctgctccagaggcgccgaaagagggtgagggctgcagccacagtgtttgtccccagcaccaccaggccccttaacctcgtcagctcctctagccctcggccagactctggcaacaccttggtttgcctggcaccgcaggcaatttcctggaaccccacccccacccaggaacggggaccacagcacctttaaaggaactgccagagcttcctcctacggcttgaaagcccaagctaatcagtaacccgtgagacaggggccaatattcaaacgctgcagcagaggcgcatagcctagccctggccaccccctcttgggaaggaggtcgagttaagccggtgtggagggtccaacaggaacggaaattacgacggtgtggttccttaaggatttggccccagtcccactaccaaatttttcccaaatcatatttaggtagacttcgcttgaaaagatcgagaatggaggaggggatcggcactcacttgcagacatcaacagtttccagaaaattcggttcaattccttcaccacggacccaccaaccaaggagctggcaaaacccactaaccaaccaggagaacacagacccgccgtttcctctccctcgccggcctcggcggagattccaggccctatagaaaccaggacgtcccttagcgccaccgcctcacatgccagtgctgccgggaacccagcgatatccgcaccagcggagaaggttccaggctgccggcggcggcgcagagagcgggaagagaggctcggaggaagccccgggcgtggcgtggtcaggctccgagagcggccgggatgcggccacaccggcctggtaaactcgcacctcttaggatcttgctcccggactcattcccttccccaccccctattttaaagttttatttgggtcgtctgtatcaatttagaacgagataaattaagacaaagaaagtaaaataaatcgaaataaaatataggaatagctcttggcga

SEQ ID NO: 357283 - DNA, 919 bp, Homo sapiens
caccacaaagaagtgtcccgtggtcaggtacactggggaaatggggctggttttgtttaaccgcaagtcttttcaggatgttggaagtgggcatacccatgggaatgagcaaggctgtttggtgtttctcaggtgtacctgatcacacagccctcggaggaccagcactctgaggaatgtatttttggggaagtgtaggtatcaggtccaggattttggatctcagtccatgttcatcctcaaagcccagtgatggtggtcatttcaggtgagctgggctggacctctgaaggaagcaaagattgtgagggttgctctcaagggtcttctgggcatgtttggaaaagtggacaagatggcggtgtcagcgaaaaagagcagggggcaggtgggcccctgggcaggagagggtggggggaaagggagccaggtgaggcacctgagaagttgtggcagcctcttagggacaaagctgaatttccctgagactagaaacctcttcttccgaaaactctgatactttttgtactgggcctatctcttgtcacttaggcaaattccttttcagttaatgggaccaaagagagatgtttttgcctccccctaagctggaggtagttggcttaaagtggaagaatcccgaggaggcggggacctggtaaggcccccatcattcagctgccctctcacacctgaagagccacttctctgctccaactgtggctggctttgtgttttgttttaaccaggaaggctgttccccgtgacctcaggggccacatcctgcttctgctgcctgccttgcctttgcaccctttgagtcagtgctgctcagccagcagcccctttctgagtcacagccacacagctgggccaaccgtgcgttggtttccttccccttagcaggacttagagaatc

SEQ ID NO: 357284 - DNA, 653 bp, Homo sapiens
cccaaaaccaaccaaacaaaaaaaaatatgattatgatcactgtactactctgtctcccctccaaatgccaggcagtgctctaggttttagggatgccaaagcttacagtccagtggcaaacacaaatgattaatgaaacaaacacagtaagtacagcatggagtaggctaggatacggaagtataaagtgctgcagagcccaggacagaaacacccaacctggccttggagtagtcagggaagacttcccagaagaaggtaagtctaggttaaggcctaactggtgaatgacctggctaggggagacagcggggtatttcagaccttgaggccaacatgaaaaaactgatggctgggagactgcgatgcctttgaaaaactgagagggccaagcgcagtggctcatgcctgtaattctagcattttggggggccgaggcgggtggatcacgaggtcaggagatcaagaccatcctggctaacatggtgaaaccctgtctctactaaaaatacaaaagataagctgggtgtggtggcgggcgcctgtagtcccagctactccagaagctgaggccagagaatggtgtgaacccgggaggcagagcttgcagtgaaccgagattgcgccactgcactccagcctgggggacaga

SEQ ID NO: 357285 - DNA, 470 bp, Homo sapiens
acagacaagccaccatgcctgattttctcattttcttagaaactggggcagggggtgtctcactatgttgcctgggctggttttgaactcctggcctcaagtgatcatcccacctcagcctcccaaagtgctgagattggagacatgagctaccgtgactggcctgttctttttttttaaagtaaataaggccgagcatggtgactcacccctgtaatcccagcacttttggtggctgaggtgggtggatcacctgaggtcaggagttcaagaccagcttgcccaacatggtgaaacgtcacctatcctaaaaatacaaaaataagctgggcgtggtggcagatgcctataaccacagctactctggagtctgatacaggagaatcacttgaacccaggaggtggtagttgaagtgagccgagatcatgccattgcattccagtttgggcaaaagagcaagattttgtct

SEQ ID NO: 357286 - DNA, 869 bp, Homo sapiens
cagcttcctctcgcactttcgccaggcaggcagcaggtgtgggcctggccccggctgggctgggccggaacctcacggaccgcacccaaccccagtaccgtgacatacgcaagtcgtgtaaatcaggagacaatgcagggaggtggatggaggcctgggctctggagccagactcccggctgtgtgacactgagctagtcagttagcctctctgggcctcacagccccaaaacagctgtgcccacctgagggttgtggtgagggttctgaagaagattgtggctaccacactgcagagctggaagctgttgtgggggcccagggcctggtggtgtgggcacatgccccacccatgtgctctcgggctgtggacccagcagcttccatcactgccaacagagcgtgactatcacagcctgtgcgagcggcagcccattgggcgcctgctgttccgagagttctgtgccacgaggccggagctgagccgctgcgtcgccttcctggatggggtggccgagtatgaagtgaccccggatgacaagcggaaggcatgtgggcggcagctaacgcagaattttctgagccacacgggtcctgacctcatccctgaggtcccccggcagctggtgacgaactgcacccagcggctggagcagggtccctgcaaagaccttttccaggaactcacccggctgacccacgagtacctgagcgtggccccttttgccgactacctcgacagcatctacttcaaccgtttcctgcagtggaagtggctggaaaggcagccagtgaccaaaaacaccttcaggcaataccgagtcctgggcaaaggtggctttggggaggtgagtggccaggccagagcc

SEQ ID NO: 357287 - DNA, 2723 bp, Homo sapiens
cggctggctgcggcggccggggaggccggggaggccgcggcgcggtcactgcgagccgagccgagccgcgccgagccgcgccgatcgccatccggcctcggcactcgcgcgcgatcccggccggcggcgcggcccggcgggccaggcggcgccacagcccatggagctcgagaacatcgtagcgaacacggtgctactcaaggcccgggaaggtggcggtggaaatcgcaaaggcaaaagcaagaaatggcggcagatgctccagttccctcacatcagccagtgcgaagagctgcggctcagcctcgagcgtgactatcacagcctgtgcgagcggcagcccattgggcgcctgctgttccgagagttctgtgccacgaggccggagctgagccgctgcgtcgccttcctggatggggtggccgagtatgaagtgaccccggatgacaagcggaaggcatgtgggcggcagctaacgcagaattttctgagccacacgggtcctgacctcatccctgaggtcccccggcagctggtgacgaactgcacccagcggctggagcagggtccctgcaaagaccttttccaggaactcacccggctgacccacgagtacctgagcgtggccccttttgccgactacctcgacagcatctacttcaaccgtttcctgcagtggaagtggctggaaaggcagccagtgaccaaaaacaccttcaggcaataccgagtcctgggcaaaggtggctttggggaggtgtgcgcctgccaggtgcgggccacaggtaagatgtatgcctgcaagaagctagagaaaaagcggatcaagaagcggaaaggggaggccatggcgctgaacgagaagcagatcctggagaaagtgaacagtaggtttgtagtgagcttggcctacgcctatgagaccaaggacgcgctgtgcctggtgctgacactgatgaacgggggcgacctcaagttccacatctaccacatgggccaggctggcttccccgaagcgcgggccgtcttctacgccgccgagatctgctgtggcctggaggacctgcaccgggagcgcatcgtgtacagggacctgaagcccgagaacatcttgctggatgaccacggccacatccgcatctctgacctgggactagctgtgcatgtgcccgagggccagaccatcaaagggcgtgtgggcaccgtgggttacatggctccggaggtggtgaagaatgaacggtacacgttcagccctgactggtgggcgctcggctgcctcctgtacgagatgatcgcaggccagtcgcccttccagcagaggaagaagaagatcaagcgggaggaggtggagcggctggtgaaggaggtccccgaggagtattccgagcgcttttccccgcaggcccgctcactttgctcacagctcctctgcaaggaccctgccgaacgcctggggtgtcgtgggggcagtgcccgcgaggtgaaggagcaccccctctttaagaagctgaacttcaagcggctgggagctggcatgctggagccgccgttcaagcctgacccccaggccatttactgcaaggatgttctggacattgaacagttctctacggtcaagggcgtggagctggagcctaccgaccaggacttctaccagaagtttgccacaggcagtgtgcccatcccctggcagaacgagatggtggagaccgagtgcttccaagagctgaatgtctttgggctggatggctcagttcccccagacctggactggaagggccagccacctgcacctcctaaaaagggactgctgcagagactcttcagtcgccaagattgctgtggaaactgcagcgacagcgaggaagagctccccacccgcctctagcccccagcccgaggcccccaccagcagttggcggtagcagctactccgagcgccgtttacagttttgcacagtgatcttccccattgtccactcaagtcgtggcctggggaacacagacggagctgtccccagtgtcctccgtccctcagcccctggcctggctgagtttggcagggcctgggccatccctgggacaaaggtgcgtcccttcagctcttctccgtggagctcggggctttctgtatttatgtatttgtacgaatgtatatagcgaccagagcattcttaattcccgccgcagacctggcgcccccgccttggctcctgggggcagccagccctggctgggagagcgggagctggcagaggagccactgccaaactcaaggctcctctggcccagcttggatggctgagggtggtcacacccctgagccttcagcactgtgctggccaccccggcctctgagtaagactcgtgcctccccctgctgccctgggctcaggctgctaccctctggggcccaaagctgtcccttctcagtgcttgtcagcgctgggtctggggcctctgtatgccctaggcctgtgccaaagtggccagagattgggctgcctgtgatacccatcagcccactgccccggccggcccagataggtctgcctctgccttccagctcccacagcctggtccctgatactgggctctgtcctgcagacacctctttcagaaacgcccaagcccagcccctaggagggggtggggcatccctggtcaaccctcaaacattccggactcccctcataacaatagacacatgtgcccagcaa

SEQ ID NO: 357288 - DNA, 3149 bp, Homo sapiens
cggctggctgcggcggccggggaggccggggaggccgcggcgcggtcactgcgagccgagccgagccgcgccgagccgcgccgatcgccatccggcctcggcactcgcgcgcgatcccggccggcggcgcggcccggcgggccaggcggcgccacagcccatggagctcgagaacatcgtagcgaacacggtgctactcaaggcccgggaaggagcctgaagcaggagaagcacgtgtgtcctggaacgcagcaagggcgtgctggagcgtgcagagggaaggcctgaggtgctgttctgcctcggctctgccttggctgggccctagaggccgtggaccgcactgaggacccagaggcagttctgaggcagtgggactcgagacccagtgtcctattgctcccacaggtggcggtggaaatcgcaaaggcaaaagcaagaaatggcggcagatgctccagttccctcacatcagccagtgcgaagagctgcggctcagcctcgagcgtgactatcacagcctgtgcgagcggcagcccattgggcgcctgctgttccgagagttctgtgccacgaggccggagctgagccgctgcgtcgccttcctggatggggtggccgagtatgaagtgaccccggatgacaagcggaaggcatgtgggcggcagctaacgcagaattttctgagccacacgggtcctgacctcatccctgaggtcccccggcagctggtgacgaactgcacccagcggctggagcagggtccctgcaaagaccttttccaggaactcacccggctgacccacgagtacctgagcgtggccccttttgccgactacctcgacagcatctacttcaaccgtttcctgcagtggaagtggctggaaaggcagccagtgaccaaaaacaccttcaggcaataccgagtcctgggcaaaggtggctttggggaggtgtgcgcctgccaggtgcgggccacaggtaagatgtatgcctgcaagaagctagagaaaaagcggatcaagaagcggaaaggggaggccatggcgctgaacgagaagcagatcctggagaaagtgaacagtaggtttgtagtgagcttggcctacgcctatgagaccaaggacgcgctgtgcctggtgctgacactgatgaacgggggcgacctcaagttccacatctaccacatgggccaggctggcttccccgaagcgcgggccgtcttctacgccgccgagatctgctgtggcctggaggacctgcaccgggagcgcatcgtgtacagggacctgaagcccgagaacatcttgctggatgaccacggccacatccgcatctctgacctgggactagctgtgcatgtgcccgagggccagaccatcaaagggcgtgtgggcaccgtgggttacatggctccggaggtggtgaagaatgaacggtacacgttcagccctgactggtgggcgctcggctgcctcctgtacgagatgatcgcaggccagtcgcccttccagcagaggaagaagaagatcaagcgggaggaggtggagcggctggtgaaggaggtccccgaggagtattccgagcgcttttccccgcaggcccgctcactttgctcacagctcctctgcaaggaccctgccgaacgcctggggtgtcgtgggggcagtgcccgcgaggtgaaggagcaccccctctttaagaagctgaacttcaagcggctgggagctggcatgctggagccgccgttcaagcctgacccccaggccatttactgcaaggatgttctggacattgaacagttctctacggtcaagggcgtggagctggagcctaccgaccaggacttctaccagaagtttgccacaggcagtgtgcccatcccctggcagaacgagatggtggagaccgagtgcttccaagagctgaatgtctttgggctggatggctcagttcccccagacctggactggaagggccagccacctgcacctcctaaaaagggactgctgcagagactcttcagtcgccaagattgctgtggaaactgcagcgacagcgaggaagagctccccacccgcctctagcccccagcccgaggcccccaccagcagttggcggtagcagctactccgagcgccgtttacagttttgcacagtgatcttccccattgtccactcaagtcgtggcctggggaacacagacggagctgtccccagtgtcctccgtccctcagcccctggcctggctgagtttggcagggcctgggccatccctgggacaaaggtgcgtcccttcagctcttctccgtggagctcggggctttctgtatttatgtatttgtacgaatgtatatagcgaccagagcattcttaattcccgccgcagacctggcgcccccgccttggctcctgggggcagccagccctggctgggagagcgggagctggcagaggagccactgccaaactcaaggctcctctggcccagcttggatggctgagggtggtcacacccctgagccttcagcactgtgctggccaccccggcctctgagtaagactcgtgcctccccctgctgccctgggctcaggctgctaccctctggggcccaaagctgtcccttctcagtgcttgtcagcgctgggtctggggcctctgtatgccctaggcctgtgccaaagtggccagagattgggctgcctgtgatacccatcagcccactgccccggccggcccagataggtctgcctctgccttccagctcccacagcctggtccctgatactgggctctgtcctgcagacacctctttcagaaacgcccaagcccagcccctaggagggggtggggcatccctggtcaaccctcaaacattccggactcccctcataacaatagacacatgtgcccagcaataatccgccccttcctgtgtgcgcctgtggggtgcgtgcgcgcgcgtgtgtacctgtgtgggtgaaggggatagggcgaggctgtgcctgtgccccaggtcccagccctggcccttcccagactgtgatggccatcctggtcccagtgttagggtagcatgggattacagggccctgttttttccatatttaaagccaatttttattactcgttttgtccaacgtaaaag

SEQ ID NO: 357289 - DNA, 2659 bp, Homo sapiens
cggctggctgcggcggccggggaggccggggaggccgcggcgcggtcactgcgagccgagccgagccgcgccgagccgcgccgatcgccatccggcctcggcactcgcgcgcgatcccggccggcggcgcggcccggcgggccaggcggcgccacagcccatggagctcgagaacatcgtagcgaacacggtgctactcaaggcccgggaaggtggcggtggaaatcgcaaaggcaaaagcaagaaatggcggcagatgctccagttccctcacatcagccagtgcgaagagctgcggctcagcctcgagcgtgactatcacagcctgtgcgagcggcagcccattgggcgcctgctgttccgagagttctgtgccacgaggccggagctgagccgctgcgtcgccttcctggatggggtggccgagtatgaagtgaccccggatgacaagcggaaggcatgtgggcggcagctaacgcagaattttctgagccacacgggtcctgacctcatccctgaggtcccccggcagctggtgacgaactgcacccagcggctggagcagggtccctgcaaagaccttttccaggaactcacccggctgacccacgagtacctgagcgtggccccttttgccgactacctcgacagcatctacttcaaccgtttcctgcagtggaagtggctggaaaggcagccagtgaccaaaaacaccttcaggcaataccgagtcctgggcaaaggtggctttggggaggtgtgcgcctgccaggtgcgggccacaggtaagatgtatgcctgcaagaagctagagaaaaagcggatcaagaagcggaaaggggaggccatggcgctgaacgagaagcagatcctggagaaagtgaacagtaggtttgtagtgagcttggcctacgcctatgagaccaaggacgcgctgtgcctggtgctgacactgatgaacgggggcgacctcaagttccacatctaccacatgggccaggctggcttccccgaagcgcgggccgtcttctacgccgccgagatctgctgtggcctggaggacctgcaccgggagcgcatcgtgtacagggacctgaagcccgagaacatcttgctggatgaccacggccacatccgcatctctgacctgggactagctgtgcatgtgcccgagggccagaccatcaaagggcgtgtgggcaccgtgggttacatggctccggaggtggtgaagaatgaacggtacacgttcagccctgactggtgggcgctcggctgcctcctgtacgagatgatcgcaggccagtcgcccttccagcagaggaagaagaagatcaagcgggaggaggtggagcggctggtgaaggaggtccccgaggagtattccgagcgcttttccccgcaggcccgctcactttgctcacagctcctctgcaaggaccctgccgaacgcctggggtgtcgtgggggcagtgcccgcgaggtgaaggagcaccccctctttaagaagctgaacttcaagcggctgggagctggcatgctggagccgccgttcaagcctgacccccaggccatttactgcaaggatgttctggacattgaacagttctctacggtcaagggcgtggagctggagcctaccgaccaggacttctaccagaagtttgccacaggcagtgtgcccatcccctggcagaacgagatggtggagaccgagtgcttccaagagctgaatgtctttgggctggatggctcagttcccccagacctggactggaagggccagccacctgcacctcctaaaaagggactgctgcagagactcttcagtcgccaagattgctgtggaaactgcagcgacagcgaggaagagctccccacccgcctctagcccccagcccgaggcccccaccagcagttggcggtagcagctactccgagcgccgtttacagttttgcacagtgatcttccccattgtccactcaagtcgtggcctggggaacacagacggagctgtccccagtgtcctccgtccctcagcccttctccgtggagctcggggctttctgtatttatgtatttgtacgaatgtatatagcgaccagagcattcttaattcccgccgcagacctggcgcccccgccttggctcctgggggcagccagccctggctgggagagcgggagctggcagaggagccactgccaaactcaaggctcctctggcccagcttggatggctgagggtggtcacacccctgagccttcagcactgtgctggccaccccggcctctgagtaagactcgtgcctccccctgctgccctgggctcaggctgctaccctctggggcccaaagctgtcccttctcagtgcttgtcagcgctgggtctggggcctctgtatgccctaggcctgtgccaaagtggccagagattgggctgcctgtgatacccatcagcccactgccccggccggcccagataggtctgcctctgccttccagctcccacagcctggtccctgatactgggctctgtcctgcagacacctctttcagaaacgcccaagcccagcccctaggagggggtggggcatccctggtcaaccctcaaacattccggactcccctcataacaatagacacatgtgcccagcaa

SEQ ID NO: 357290 - DNA, 1851 bp, Homo sapiens
cggctggctgcggcggccggggaggccggggaggccgcggcgcggtcactgcgagccgagccgagccgcgccgagccgcgccgatcgccatccggcctcggcactcgcgcgcgatcccggccggcggcgcggcccggcgggccaggcggcgccacagcccatggagctcgagaacatcgtagcgaacacggtgctactcaaggcccgggaaggtggcggtggaaatcgcaaaggcaaaagcaagaaatggcggcagatgctccagttccctcacatcagccagtgcgaagagctgcggctcagcctcgagcgtgactatcacagcctgtgcgagcggcagcccattgggcgcctgctgttccgagagttctgtgccacgaggccggagctgagccgctgcgtcgccttcctggatggggtggccgagtatgaagtgaccccggatgacaagcggaaggcatgtgggcggcagctaacgcagaattttctgagccacacgggtcctgacctcatccctgaggtcccccggcagctggtgacgaactgcacccagcggctggagcagggtccctgcaaagaccttttccaggaactcacccggctgacccacgagtacctgagcgtggccccttttgccgactacctcgacagcatctacttcaaccgtttcctgcagtggaagtggctggaaaggcagccagtgaccaaaaacaccttcaggcaataccgagtcctgggcaaaggtggctttggggaggtgtgcgcctgccaggtgcgggccacaggtaagatgtatgcctgcaagaagctagagaaaaagcggatcaagaagcggaaaggggaggccatggcgctgaacgagaagcagatcctggagaaagtgaacagtaggtttgtagtgagcttggcctacgcctatgagaccaaggacgcgctgtgcctggtgctgacactgatgaacgggggcgacctcaagttccacatctaccacatgggccaggctggcttccccgaagcgcgggccgtcttctacgccgccgagatctgctgtggcctggaggacctgcaccgggagcgcatcgtgtacagggacctgaagcccgagaacatcttgctggatgaccacggccacatccgcatctctgacctgggactagctgtgcatgtgcccgagggccagaccatcaaagggcgtgtgggcaccgtgggttacatggctccggaggtggtgaagaatgaacggtacacgttcagccctgactggtgggcgctcggctgcctcctgtacgagatgatcgcaggccagtcgcccttccagcagaggaagaagaagatcaagcgggaggaggtggagcggctggtgaaggaggtccccgaggagtattccgagcgcttttccccgcaggcccgctcactttgctcacagctcctctgcaaggaccctgccgaacgcctggggtgtcgtgggggcagtgcccgcgaggtgaaggagcaccccctctttaagaagctgaacttcaagcggctgggagctggcatgctggagccgccgttcaagcctgacccccaggccatttactgcaaggatgttctggacattgaacagttctctacggtcaagggcgtggagctggagcctaccgaccaggacttccactgccccggccggcccagataggtctgcctctgccttccagctcccacagcctggtccctgatactgggctctgtcctgcagacacctctttcagaaacgcccaagcccagcccctaggagggggtggggcatccctggtcaaccctcaaacattccggactcccctcataacaatagacacatgtgcccagcaa

SEQ ID NO: 357291 - DNA, 1784 bp, Homo sapiens
cggctggctgcggcggccggggaggccggggaggccgcggcgcggtcactgcgagccgagccgagccgcgccgagccgcgccgatcgccatccggcctcggcactcgcgcgcgatcccggccggcggcgcggcccggcgggccaggcggcgccacagcccatggagctcgagaacatcgtagcgaacacggtgctactcaaggcccgggaaggtggcggtggaaatcgcaaaggcaaaagcaagaaatggcggcagatgctccagttccctcacatcagccagtgcgaagagctgcggctcagcctcgagcgtgactatcacagcctgtgcgagcggcagcccattgggcgcctgctgttccgagagttctgtgccacgaggccggagctgagccgctgcgtcgccttcctggatggggtggccgagtatgaagtgaccccggatgacaagcggaaggcatgtgggcggcagctaacgcagaattttctgagccacacgggtcctgacctcatccctgaggtcccccggcagctggtgacgaactgcacccagcggctggagcagggtccctgcaaagaccttttccaggaactcacccggctgacccacgagtacctgagcgtggccccttttgccgactacctcgacagcatctacttcaaccgtttcctgcagtggaagtggctggaaaggcagccagtgaccaaaaacaccttcaggcaataccgagtcctgggcaaaggtggctttggggaggtgtgcgcctgccaggtgcgggccacaggtaagatgtatgcctgcaagaagctagagaaaaagcggatcaagaagcggaaaggggaggccatggcgctgaacgagaagcagatcctggagaaagtgaacagtaggtttgtagtgagcttggcctacgcctatgagaccaaggacgcgctgtgcctggtgctgacactgatgaacgggggcgacctcaagttccacatctaccacatgggccaggctggcttccccgaagcgcgggccgtcttctacgccgccgagatctgctgtggcctggaggacctgcaccgggagcgcatcgtgtacagggacctgaagcccgagaacatcttgctggatgaccacgggcctgggccatccctgggacaaaggtgcgtcccttcagctcttctccgtggagctcggggctttctgtatttatgtatttgtacgaatgtatatagcgaccagagcattcttaattcccgccgcagacctggcgcccccgccttggctcctgggggcagccagccctggctgggagagcgggagctggcagaggagccactgccaaactcaaggctcctctggcccagcttggatggctgagggtggtcacacccctgagccttcagcactgtgctggccaccccggcctctgagtaagactcgtgcctccccctgctgccctgggctcaggctgctaccctctggggcccaaagctgtcccttctcagtgcttgtcagcgctgggtctggggcctctgtatgccctaggcctgtgccaaagtggccagagattgggctgcctgtgatacccatcagcccactgccccggccggcccagataggtctgcctctgccttccagctcccacagcctggtccctgatactgggctctgtcctgcagacacctctttcagaaacgcccaagcccagcccctaggagggggtggggcatccctggtcaaccctcaaacattccggactcccctcataacaatagacacatgtgcccagcaa

SEQ ID NO: 357292 - DNA, 714 bp, Homo sapiens
cgagccgcgccgagccgcgccgatcgccatccggcctcggcactcgcgcgcgatcccggccggcggcgcggcccggcgggccaggcggcgccacagcccatggagctcgagaacatcgtagcgaacacggtgctactcaaggcccgggaaggtgaggcggccgggtgggcggccgggcccgggtgcgtggagcgcgagtgcgctgcgtctgagctccgcagggctacccagccgtcggatcccctaggcccgcgggccctgcgccttacaccccgcccagacacgagcctttccggcccgtcgtcttcctcctccgcacctgcccccgggattcggggcccaggaaggggcgggggtcaggccgccgccctcgcggcgggtgggggtgaaggagtgaaagaaggtgagacgaagagggaagggtgggaccggagccccaggagagcctgtctgagaggcaagcctcctccaggggagaggtgtaaagatgccccacgtgccaggggcccagaccccagcaccctagcctaatcccgcgcaaagttggcgataggtaaagctggagaatgaataaacggaccctctgcgtagcacagcccacctgacttggggaaactcctggccacaaatgctacttataggactgccacttgctccgtgcctcaggacactgagggcagaggtgaatggatatttgccctcagggagcccatg

SEQ ID NO: 357293 - DNA, 2953 bp, Homo sapiens
cggctggctgcggcggccggggaggccggggaggccgcggcgcggtcactgcgagccgagccgagccgcgccgagccgcgccgatcgccatccggcctcggcactcgcgcgcgatcccggccggcggcgcggcccggcgggccaggcggcgccacagcccatggagctcgagaacatcgtagcgaacacggtgctactcaaggcccgggaaggtggcggtggaaatcgcaaaggcaaaagcaagaaatggcggcagatgctccagttccctcacatcagccagtgcgaagagctgcggctcagcctcgagcgtgactatcacagcctgtgcgagcggcagcccattgggcgcctgctgttccgagagttctgtgccacgaggccggagctgagccgctgcgtcgccttcctggatggggtggccgagtatgaagtgaccccggatgacaagcggaaggcatgtgggcggcagctaacgcagaattttctgagccacacgggtcctgacctcatccctgaggtcccccggcagctggtgacgaactgcacccagcggctggagcagggtccctgcaaagaccttttccaggaactcacccggctgacccacgagtacctgagcgtggccccttttgccgactacctcgacagcatctacttcaaccgtttcctgcagtggaagtggctggaaaggcagccagtgaccaaaaacaccttcaggcaataccgagtcctgggcaaaggtggctttggggaggtgtgcgcctgccaggtgcgggccacaggtaagatgtatgcctgcaagaagctagagaaaaagcggatcaagaagcggaaaggggaggccatggcgctgaacgagaagcagatcctggagaaagtgaacagtaggtttgtagtgagcttggcctacgcctatgagaccaaggacgcgctgtgcctggtgctgacactgatgaacgggggcgacctcaagttccacatctaccacatgggccaggctggcttccccgaagcgcgggccgtcttctacgccgccgagatctgctgtggcctggaggacctgcaccgggagcgcatcgtgtacagggacctgaagcccgagaacatcttgctggatgaccacggccacatccgcatctctgacctgggactagctgtgcatgtgcccgagggccagaccatcaaagggcgtgtgggcaccgtgggttacatggctccggaggtggtgaagaatgaacggtacacgttcagccctgactggtgggcgctcggctgcctcctgtacgagatgatcgcaggccagtcgcccttccagcagaggaagaagaagatcaagcgggaggaggtggagcggctggtgaaggaggtccccgaggagtattccgagcgcttttccccgcaggcccgctcactttgctcacagctcctctgcaaggaccctgccgaacgcctggggtgtcgtgggggcagtgcccgcgaggtgaaggagcaccccctctttaagaagctgaacttcaagcggctgggagctggcatgctggagccgccgttcaagcctgacccccaggccatttactgcaaggatgttctggacattgaacagttctctacggtcaagggcgtggagctggagcctaccgaccaggacttctaccagaagtttgccacaggcagtgtgcccatcccctggcagaacgagatggtggagaccgagtgcttccaagagctgaatgtctttgggctggatggctcagttcccccagacctggactggaagggccagccacctgcacctcctaaaaagggactgctgcagagactcttcagtcgccaagattgctgtggaaactgcagcgacagcgaggaagagctccccacccgcctctagcccccagcccgaggcccccaccagcagttggcggtagcagctactccgagcgccgtttacagttttgcacagtgatcttccccattgtccactcaagtcgtggcctggggaacacagacggagctgtccccagtgtcctccgtccctcagcccctggcctggctgagtttggcagggcctgggccatccctgggacaaaggtgcgtcccttcagctcttctccgtggagctcggggctttctgtatttatgtatttgtacgaatgtatatagcgaccagagcattcttaattcccgccgcagacctggcgcccccgccttggctcctgggggcagccagccctggctgggagagcgggagctggcagaggagccactgccaaactcaaggctcctctggcccagcttggatggctgagggtggtcacacccctgagccttcagcactgtgctggccaccccggcctctgagtaagactcgtgcctccccctgctgccctgggctcaggctgctaccctctggggcccaaagctgtcccttctcagtgcttgtcagcgctgggtctggggcctctgtatgccctaggcctgtgccaaagtggccagagattgggctgcctgtgatacccatcagcccactgccccggccggcccagataggtctgcctctgccttccagctcccacagcctggtccctgatactgggctctgtcctgcagacacctctttcagaaacgcccaagcccagcccctaggagggggtggggcatccctggtcaaccctcaaacattccggactcccctcataacaatagacacatgtgcccagcaataatccgccccttcctgtgtgcgcctgtggggtgcgtgcgcgcgcgtgtgtacctgtgtgggtgaaggggatagggcgaggctgtgcctgtgccccaggtcccagccctggcccttcccagactgtgatggccatcctggtcccagtgttagggtagcatgggattacagggccctgttttttccatatttaaagccaatttttattactcgttttgtccaacgtaaaag

SEQ ID NO: 357294 - DNA, 2915 bp, Homo sapiens
cggctggctgcggcggccggggaggccggggaggccgcggcgcggtcactgcgagccgagccgagccgcgccgagccgcgccgatcgccatccggcctcggcactcgcgcgcgatcccggccggcggcgcggcccggcgggccaggcggcgccacagcccatggagctcgagaacatcgtagcgaacacggtgctactcaaggcccgggaaggtggcggtggaaatcgcaaaggcaaaagcaagaaatggcggcagatgctccagttccctcacatcagccagtgcgaagagctgcggctcagcctcgagcgtgactatcacagcctgtgcgagcggcagcccattgggcgcctgctgttccgagagttctgtgccacgaggccggagctgagccgctgcgtcgccttcctggatggggtggccgagtatgaagtgaccccggatgacaagcggaaggcatgtgggcggcagctaacgcagaattttctgagccacacgggtcctgacctcatccctgaggtcccccggcagctggtgacgaactgcacccagcggctggagcagggtccctgcaaagaccttttccaggaactcacccggctgacccacgagtacctgagcgtggccccttttgccgactacctcgacagcatctacttcaaccgtttcctgcagtggaagtggctggaaaggcagccagtgaccaaaaacaccttcaggcaataccgagtcctgggcaaaggtggctttggggaggtgtgcgcctgccaggtgcgggccacaggtaagatgtatgcctgcaagaagctagagaaaaagcggatcaagaagcggaaaggggaggccatggcgctgaacgagaagcagatcctggagaaagtgaacagtaggtttgtagtgagcttggcctacgcctatgagaccaaggacgcgctgtgcctggtgctgacactgatgaacgggggcgacctcaagttccacatctaccacatgggccaggctggcttccccgaagcgcgggccgtcttctacgccgccgagatctgctgtggcctggaggacctgcaccgggagcgcatcgtgtacagggacctgaagcccgagaacatcttgctggatgaccacggccacatccgcatctctgacctgggactagctgtgcatgtgcccgagggccagaccatcaaagggcgtgtgggcaccgtgggttacatggctccggaggtggtgaagaatgaacggtacacgttcagccctgactggtgggcgctcggctgcctcctgtacgagatgatcgcaggccagtcgcccttccagcagaggaagaagaagatcaagcgggaggaggtggagcggctggtgaaggaggtccccgaggagtattccgagcgcttttccccgcaggcccgctcactttgctcacagctcctctgcaaggaccctgccgaacgcctggggtgtcgtgggggcagtgcccgcgaggtgaaggagcaccccctctttaagaagctgaacttcaagcggctgggagctggcatgctggagccgccgttcaagcctgacccccaggccatttactgcaaggatgttctggacattgaacagttctctacggtcaagggcgtggagctggagcctaccgaccaggacttctaccagaagtttgccacaggcagtgtgcccatcccctggcagaacgagatggtggagaccgagtgcttccaagagctgaatgtctttgggctggatggctcagttcccccagacctggactggaagggccagccacctgcacctcctaaaaagggactgctgcagagactcttcagtcgccaagattgctgtggaaactgcagcgacagcgaggaagagctccccacccgcctctagcccccagcccgaggcccccaccagcagttggcggtagcagctactccgagcgccgtttacagttttgcacagtgatcttccccattgtccactcaagtcgtggcctggggaacacagacggagctgtccccagtgtcctccgtccctcagcccctggcctggctgagtttggcagggcctgggccatccctgggacaaaggtgcgtcccttcagctcttctccgtggagctcggggctttctgtatttatgtatttgtacgaatgtatatagcgaccagagcattcttaattcccgccgcagacctggcgcccccgccttggctcctgggggcagccagccctggctgggagagcgggagctggcagaggagccactgccaaactcaaggctcctctggcccagcttggatggctgagggtggtcacacccctgagccttcagcactgtgctggccaccccggcctctgagtaagactcgtgcctccccctgctgccctgggctcaggctgctaccctctggggcccaaagctgtcccttctcagtgcttgtcagcgctgggtctggggcctctgtatgccctaggcctgtgccaaagtggccagagattgggctgcctgtgatacccatcagcccactgccccggccggcccagataggtctgcctctgccttccagctcccacagcctggtccctgatactgggctctgtcctgcagacacctctttcagaaacgcccaagcccagcccctaggagggggtggggcatccctggtcaaccctcaaacattccggactcccctcataacaatagacacatgtgcccagcaaaaaaaaaaaaaaaacaaaaaaaaaccccggggacctcaattgttcggggtggggaaaaaggggctacggaaggggcccaggggcaaaagcgggatcccagagaccccagctacgtggcacaagggggaaaatcggcgagtctccctataggagagcccaataactccgaaaagccggggtaccggcatagag

SEQ ID NO: 357295 - DNA, 1946 bp, Homo sapiens
cggctggctgcggcggccggggaggccggggaggccgcggcgcggtcactgcgagccgagccgagccgcgccgagccgcgccgatcgccatccggcctcggcactcgcgcgcgatcccggccggcggcgcggcccggcgggccaggcggcgccacagcccatggagctcgagaacatcgtagcgaacacggtgctactcaaggcccgggaaggtggcggtggaaatcgcaaaggcaaaagcaagaaatggcggcagatgctccagttccctcacatcagccagtgcgaagagctgcggctcagcctcgagcgtgactatcacagcctgtgcgagcggcagcccattgggcgcctgctgttccgagagttctgtgccacgaggccggagctgagccgctgcgtcgccttcctggatggggtggccgagtatgaagtgaccccggatgacaagcggaaggcatgtgggcggcagctaacgcagaattttctgagccacacgggtcctgacctcatccctgaggtcccccggcagctggtgacgaactgcacccagcggctggagcagggtccctgcaaagaccttttccaggaactcacccggctgacccacgagtacctgagcgtggccccttttgccgactacctcgacagcatctacttcaaccgtttcctgcagtggaagtggctggaaaggcagccagtgaccaaaaacaccttcaggcaataccgagtcctgggcaaaggtggctttggggaggtgtgcgcctgccaggtgcgggccacaggtaagatgtatgcctgcaagaagctagagaaaaagcggatcaagaagcggaaaggggaggccatggcgctgaacgagaagcagatcctggagaaagtgaacagtaggtttgtagtgagcttggcctacgcctatgagaccaaggacgcgctgtgcctggtgctgacactgatgaacgggggcgacctcaagttccacatctaccacatgggccaggctggcttccccgaagcgcgggccgtcttctacgccgccgagatctgctgtggcctggaggacctgcaccgggagcgcatcgtgtacagggacctgaagcccgagaacatcttgctggatgaccacggccacatccgcatctctgacctgggactagctgtgcatgtgcccgagggccagaccatcaaagggcgtgtgggcaccgtgggttacatggctccggaggtggtgaagaatgaacggtacacgttcagccctgactggtgggcgctcggctgcctcctgtacgagatgatcgcaggccagtcgcccttccagcagaggaagaagaagatcaagcgggaggaggtggagcggctggtgaaggaggtccccgaggagtattccgagcgcttttccccgcaggcccgctcactttgctcacagctcctctgcaaggaccctgccgaacgcctggggtgtcgtgggggcagtgcccgcgaggtgaaggagcaccccctctttaagaagctgaacttcaagcggctgggagctggcatgctggagccgccgttcaagcctgacccccaggccatttactgcaaggatgttctggacattgaacagttctctacggtcaagggcgtggagctggagcctaccgaccaggacttctaccagaagtttgccacaggcagtgtgcccatcccctggcagaacgagatggtggagaccgagtgcttccaagagctgaatgtctttgggctggatggctcagttcccccagacctggactggaagggccagccacctgcacctcctaaaaagggactgctgcagagactcttcagtcgccaaaggtgagcagtgtgggctccccgtgggttggccttgctgcctggcctcggggagccacgggcagcccttccatggcaaaggcaagatgtgggagaaagaagtctggtgc

SEQ ID NO: 357296 - DNA, 1951 bp, Homo sapiens
cggctggctgcggcggccggggaggccggggaggccgcggcgcggtcactgcgagccgagccgagccgcgccgagccgcgccgatcgccatccggcctcggcactcgcgcgcgatcccggccggcggcgcggcccggcgggccaggcggcgccacagcccatggagctcgagaacatcgtagcgaacacggtgctactcaaggcccgggaaggtggcggtggaaatcgcaaaggcaaaagcaagaaatggcggcagatgctccagttccctcacatcagccagtgcgaagagctgcggctcagcctcgagcgtgactatcacagcctgtgcgagcggcagcccattgggcgcctgctgttccgagagttctgtgccacgaggccggagctgagccgctgcgtcgccttcctggatggggtggccgagtatgaagtgaccccggatgacaagcggaaggcatgtgggcggcagctaacgcagaattttctgagccacacgggtcctgacctcatccctgaggtcccccggcagctggtgacgaactgcacccagcggctggagcagggtccctgcaaagaccttttccaggaactcacccggctgacccacgagtacctgagcgtggccccttttgccgactacctcgacagcatctacttcaaccgtttcctgcagtggaagtggctggaaaggcagccagtgaccaaaaacaccttcaggcaataccgagtcctgggcaaaggtggctttggggaggtgtgcgcctgccaggtgcgggccacaggtaagatgtatgcctgcaagaagctagagaaaaagcggatcaagaagcggaaaggggaggccatggcgctgaacgagaagcagatcctggagaaagtgaacagtaggtttgtagtgagcttggcctacgcctatgagaccaaggacgcgctgtgcctggtgctgacactgatgaacgggggcgacctcaagttccacatctaccacatgggccaggctggcttccccgaagcgcgggccgtcttctacgccgccgagatctgctgtggcctggaggacctgcaccgggagcgcatcgtgtacagggacctgaagcccgagaacatcttgctggatgaccacggccacatccgcatctctgacctgggactagctgtgcatgtgcccgagggccagaccatcaaagggcgtgtgggcaccgtgggttacatggctccggaggtggtgaagaatgaacggtacacgttcagccctgactggtgggcgctcggctgcctcctgtacgagatgatcgcaggccagtcgcccttccagcagaggaagaagaagatcaagcgggaggaggtggagcggctggtgaaggaggtccccgaggagtattccgagcgcttttccccgcaggcccgctcactttgctcacagctcctctgcaaggaccctgccgaacgcctggggtgtcgtgggggcagtgcccgcgaggtgaaggagcaccccctctttaagaagctgaacttcaagcggctgggagctggcatgctggagccgccgttcaagcctgacgtgagtgcagcccactcctgctgagggcggggcccagccagggctggggctcaggggctcttgtagtatcagccaggatgcttccagtgcaagtggcagaaaaaacaatctagtggcttagccacagaaataaagataattcacaaaaaggaaaagccccaggatgggtctggcttgtggcatgcctggatggggcttggagcctctgacaatgtcctaggaactctctctccttcccctcactgtaccgttgagtgtgtagtcttcatattggggtagctctccccatggtgcggcagcagtgggccccagcagctcagccaccacagtagacagagagcttctcttctcttttctcttctcctctcctctccttccttccttcgt

SEQ ID NO: 357297 - DNA, 1420 bp, Homo sapiens
cggctggctgcggcggccggggaggccggggaggccgcggcgcggtcactgcgagccgagccgagccgcgccgagccgcgccgatcgccatccggcctcggcactcgcgcgcgatcccggccggcggcgcggcccggcgggccaggcggcgccacagcccatggagctcgagaacatcgtagcgaacacggtgctactcaaggcccgggaaggtggcggtggaaatcgcaaaggcaaaagcaagaaatggcggcagatgctccagttccctcacatcagccagtgcgaagagctgcggctcagcctcgagcgtgactatcacagcctgtgcgagcggcagcccattgggcgcctgctgttccgagagttctgtgccacgaggccggagctgagccgctgcgtcgccttcctggatggggtggccgagtatgaagtgaccccggatgacaagcggaaggcatgtgggcggcagctaacgcagaattttctgagccacacgggtcctgacctcatccctgaggtcccccggcagctggtgacgaactgcacccagcggctggagcagggtccctgcaaagaccttttccaggaactcacccggctgacccacgagtacctgagcgtggccccttttgccgactacctcgacagcatctacttcaaccgtttcctgcagtggaagtggctggaaaggcagccagtgaccaaaaacaccttcaggcaataccgagtcctgggcaaaggtggctttggggaggtgtgcgcctgccaggtgcgggccacaggtaagatgtatgcctgcaagaagctagagaaaaagcggatcaagaagcggaaaggggaggccatggcgctgaacgagaagcagatcctggagaaagtgaacagtaggtttgtagtgagcttggcctacgcctatgagaccaaggacgcgctgtgcctggtgctgacactgatgaacgggggcgacctcaagttccacatctaccacatgggccaggctggcttccccgaagcgcgggccgtcttctacgccgccgagatctgctgtggcctggaggacctgcaccgggagcgcatcgtgtacagggacctgaagcccgagaacatcttgctggaaagtcagccagtgaccaaatacaccttcaggcaataccgagtcctgggcaaaggtggctttggggaggtgtgcccctgcccggtgcgcgccacaggtaagatgtatgcctgcaagaagctagagaaaaagcggatcaagaagcggaaaggggaggccctggcgctgaacgagaagcagatcctggagaaagtgaacagtaggtttgtagtgagcttggcctacgcctatgagaccaaggacgcggtgtgcctggtgctgacactgatgaacggggcgactcaagttccacagtccgtactg

SEQ ID NO: 357298 - DNA, 803 bp, Homo sapiens
cggctggctgcggcggccggggaggccggggaggccgcggcgcggtcactgcgagccgagccgagccgcgccgagccgcgccgatcgccatccggcctcggcactcgcgcgcgatcccggccggcggcgcggcccggcgggccaggcggcgccacagcccatggagctcgagaacatcgtagcgaacacggtgctactcaaggcccgggaaggtggcggtggaaatcgcaaaggcaaaagcaagaaatggcggcagatgctccagttccctcacatcagccagtgcgaagagctgcggctcagcctcgagcgtgactatcacagcctgtgcgagcggcagcccattgggcgcctgctgttccgagagttctgtgccacgaggccggagctgagccgctgcgtcgccttcctggatggggtggccgagtatgaagtgaccccggatgacaagcggaaggcatgtgggcggcagctaacgcagaattttctgagccacacgggtcctgacctcatccctgagtcatatagctctgcctcattctgtgtgtgtgtgcatgtgtgtgttagcagaggtattttactcagaaaataggtttcaaagaacattaatgactttcttttcccttttatgtctgcttaatcagtgttaaactgctatgggaaaagttttatagaactatataacctgaatgttggtctctttgtacacatcttttctatgactgcaaatcttcactttatgtatcatttttactgtcatattatttttgttcaataaaaactttgtgataaaaggtgaaaaa

SEQ ID NO: 357299 - DNA, 2691 bp, Homo sapiens
tccggaactgcagtatccacctggggcttaaaaaccacctgagactccatttcccggcgtgctttaaaaatcgctttacacctgcaatgcggtgagggcgtggcgacgactccatttcccggcttgcctcacggcccgagacccgcaggttcacgcgggccgactcaatttcccagagcgcaccgagctctgggaggcatacacagctaatagactgagtgagtggactccgtttcccagcgtgcatcaggctctctgcttcctaaagtgcttcagggctccccgtcgtacagtcggctgacagattaccctggactccatttcccgacgtacagcgtgacccgtcattcccgcccatcattcccgcggtctactctgaggcttttgtggacttcatttcccggcgtgccacgcggctctctgtgcgggccgagggcggtgacggcggcgcggacgacagccggactgcatctcccggcgtgccccgcggcgggcgctgggccggagccggagcccaagccagagcggcgcggcctggaagaggccagggcccgggggaggcggcggcagcggcggcggctggggcagcccgggcagcccgagccccgcagcctgggcctgtgctcggcgccatgagcggcggcgggccttcgggaggcggccctgggggctcgggcagggcgcggactagctcgttcgcggacccggcggcggaggcggaggaggcggcggcggccccggaggctcggcctccggcccaggcggcaccggcggcggaaaggcatctgtcggggccatgggtgggggcgtcggggcctcgagctccgggggtggacccggcggcagcggcggaggaggcagcggaggccccggcgcaggcactagcttcccgccgcccggggtgaagctgggccgtgacagcgggaaggtgaccacagtcgtagccactctaggccaaggcccagagcgctcccaagaagtggcttacacggacatcaaagtgattggcaatggctcatttggggtcgtgtaccaggcacggctggcagagaccagggaactagtcgccatcaagaaggttctccaggacaagaggttcaagaaccgagagctgcagatcatgcgtaagctggaccactgcaatattgtgaggctgagatactttttctactccagtggcgagaagaaagacgagctttacctaaatctggtgctggaatatgtgcccgagacagtgtaccgggtggcccgccacttcaccaaggccaagttgaccatccctatcctctatgtcaaggtgtacatgtaccagctcttccgcagcttggcctacatccactcccagggcgtgtgtcaccgcgacatcaagccccagaacctgctggtggaccctgacactgctgtcctcaagctctgcgattttggcagtgcaaagcagttggtccgaggggagcccaatgtctcctacatctgttctcgctactaccgggccccagagctcatctttggagccactgattacacctcatccatcgatgtttggtcagctggctgtgtactggcagagctcctcttgggccagcccatcttccctggggacagtggggtggaccagctggtggagatcatcaaggtgctgggaacaccaacccgggaacaaatccgagagatgaaccccaactacacggagttcaagttccctcagattaaagctcacccctggacaaaggtgttcaaatctcgaacgccgccagaggccatcgcgctctgctctagcctgctggagtacaccccatcctcaaggctctccccactagaggcctgtgcgcacagcttctttgatgaactgcgatgtctgggaacccagctgcctaacaaccgcccacttccccctctcttcaacttcagtgctggtgaactctccatccaaccgtctctcaacgccattctcatccctcctcacttgaggtccccagcgggcactaccaccctcaccccgtcctcacaagctttaactgagactccgaccagctcagactggcagtcgaccgatgccacacctaccctcactaactcctcctgagggccccaccaagcacccttccacttccatctgggagccccaagaggggctgggaaggggggccatagcccatcaagctcctgccctggctgggcccctagactagagggcagaggtaaatgagtccctgtccccacctccagtccctccctcaccagcctcacccctgtggtgggctttttaagaggattttaactggttgtggggagggaagagaaggacagggtgttggggggatgaggacctcctacccccttggccccctcccctcccccagacctccacctcctccagaccccctcccctcctgtgtcccttgtaaatagaaccagcccagcccgtctcctcttcccttccctggcccccgggtgtaaatagattgttataatttttttcttaaagaaaacgtcgattcgcaccgtccaacctggccccgcccctcctacagctgtaactcccctcctgtcctctgcccccaaggtctactccctcctcaccccaccctggagggccaggggagtggagagagctcctgatgtcttagtttccacagtaaggtttgcctgtgtacagacctccgttcaataaattattggcatgaaaacctg

SEQ ID NO: 357300 - DNA, 1787 bp, Homo sapiens
  misc_feature (1731)..(1731): n is a, c, g, or t
  misc_feature (1738)..(1738): n is a, c, g, or t
  misc_feature (1753)..(1753): n is a, c, g, or t
  misc_feature (1761)..(1761): n is a, c, g, or t
tccggaactgcagtatccacctggggcttaaaaaccacctgagactccatttcccggcgtgctttaaaaatcgctttacacctgcaatgcggtgagggcgtggcgacgactccatttcccggcttgcctcacggcccgagacccgcaggttcacgcgggccgactcaatttcccagagcgcaccgagctctgggaggcatacacagctaatagactgagtgagtggactccgtttcccagcgtgcatcaggctctctgcttcctaaagtgcttcagggctccccgtcgtacagtcggctgacagattaccctggactccatttcccgacgtacagcgtgacccgtcattcccgcccatcattcccgcggtctactctgaggcttttgtggacttcatttcccggcgtgccacgcggctctctgtgcgggccgagggcggtgacggcggcgcggacgacagccggactgcatctcccggcgtgccccgcggcgggcgctgggccggagccggagcccaagccagagcggcgcggcctggaagaggccagggcccgggggaggcggcggcagcggcggcggctggggcagcccgggcagcccgagccccgcagcctgggcctgtgctcggcgccatgagcggcggcgggccttcgggaggcggccctgggggctcgggcagggcgcggactagctcgttcgcggacccggcggcggaggcggaggaggcggcggcggccccggaggctcggcctccggcccaggcggcaccggcggcggaaaggcatctgtcggggccatgggtgggggcgtcggggcctcgagctccgggggtggacccggcggcagcggcggaggaggcagcggaggccccggcgcaggcactagcttcccgccgcccggggtgaagctgggccgtgacagcgggaaggtgaccacagtcgtagccactctaggccaaggcccagagcgctcccaagaagtggcttacacggacatcaaagtgattggcaatggctcatttggggtcgtgtaccaggcacggctggcagagaccagggaactagtcgccatcaagaaggttctccaggacaagaggttcaagaaccgagagctgcagatcatgcgtaagctggaccactgcaatattgtgaggctgagatactttttctactccagtggcgagaagaaagacgagctttacctaaatctggtgctggaatatgtgcccgagacagtgtaccgggtggcccgccacttcaccaaggccaagttgaccatccctatcctctatgtcaaggtgtacatgtaccagctcttccgcagcttggcctacatccactcccagggcgtgtgtcaccgcgacatcaagccccagaacctgctggtggaccctgacactgctgtcctcaagctctgcgattttggcagtgcaaagcagttggtccgaggggagcccaatgtctcctacatctgttctcgctactaccgggccccagagctcatctttggagccactgattacacctcatccatcgatgtttggtcagctggctgtgtactggcagagctcctcttgggccagcccatcttccctggggacagtggggtggaccagctggtggagatcatcaaggtgctgggaacaccaacccgggaacaaatccgagagatgaaccccaactacacggagttcaagttccctcagattaaagctcacccctggacaaaggnttcattntgaagcgcaaagaanggcctgtntacgtgggaaccacctaggtccccac

SEQ ID NO: 357301 - DNA, 507 bp, Homo sapiens
gtagcctggccccgttgtacagttgcggtagccactctaggccaaggcccagagcgctcccaagaagtggcttacacggacatcaaagtgattggcaatggctcatttggggtcgtgtaccaggcacggctggcagagaccagggaactagtcgccatcaagaaggttctccaggacaagaggttcaagaaccgagagctgcagatcatgcgtaagctggaccactgcaatattgtgaggctgagatactttttctactccagtggcgagaagaaagacgagctttacctaaatctggtgctggaatatgtgcccgagacagtgtaccgggtggcccgccacttcaccaaggccaagttgaccatccctatcctctatgtcaggtgtacatgtaccagctcttccgcaactgtacggcgggcccgccgtaccagttgcgcatccaaactctacatttacaaaacgaattcagggtgaggaagtaaaaacaggtcatctattcacaaa

SEQ ID NO: 357302 - DNA, 1932 bp, Homo sapiens
aggggagaggctctgagaggcgaggccgggtgaggcggcgagggcggcccgacgggcgcgggacgggacggggcagcgagggcgccgggagccgcggcccggaatcggggcgcttcgccccgggccccccagcatgaagaccccggcggacacaggtgacagcgggaaggtgaccacagtcgtagccactctaggccaaggcccagagcgctcccaagaagtggcttacacggacatcaaagtgattggcaatggctcatttggggtcgtgtaccaggcacggctggcagagaccagggaactagtcgccatcaagaaggttctccaggacaagaggttcaagaaccgagagctgcagatcatgcgtaagctggaccactgcaatattgtgaggctgagatactttttctactccagtggcgagaagaaagacgagctttacctaaatctggtgctggaatatgtgcccgagacagtgtaccgggtggcccgccacttcaccaaggccaagttgaccatccctatcctctatgtcaaggtgtacatgtaccagctcttccgcagcttggcctacatccactcccagggcgtgtgtcaccgcgacatcaagccccagaacctgctggtggaccctgacactgctgtcctcaagctctgcgattttggcagtgcaaagcagttggtccgaggggagcccaatgtctcctacatctgttctcgctactaccgggccccagagctcatctttggagccactgattacacctcatccatcgatgtttggtcagctggctgtgtactggcagagctcctcttgggccagcccatcttccctggggacagtggggtggaccagctggtggagatcatcaaggtgctgggaacaccaacccgggaacaaatccgagagatgaaccccaactacacggagttcaagttccctcagattaaagctcacccctggacaaaggtgttcaaatctcgaacgccgccagaggccatcgcgctctgctctagcctgctggagtacaccccatcctcaaggctctccccactagaggcctgtgcgcacagcttctttgatgaactgcgatgtctgggaacccagctgcctaacaaccgcccacttccccctctcttcaacttcagtgctggtgaactctccatccaaccgtctctcaacgccattctcatccctcctcacttgaggtccccagcgggcactaccaccctcaccccgtcctcacaagctttaactgagactccgaccagctcagactggcagtcgaccgatgccacacctaccctcactaactcctcctgagggccccaccaagcacccttccacttccatctgggagccccaagaggggctgggaaggggggccatagcccatcaagctcctgccctggctgggcccctagactagagggcagaggtaaatgagtccctgtccccacctccagtccctccctcaccagcctcacccctgtggtgggctttttaagaggattttaactggttgtggggagggaagagaaggacagggtgttggggggatgaggacctcctacccccttggccccctcccctcccccagacctccacctcctccagaccccctcccctcctgtgtcccttgtaaatagaaccagcccagcccgtctcctcttcccttccctggcccccgggtgtaaatagattgttataatttttttcttaaagaaaacgtcgattcgcaccgtccaacctggccccgcccctcctacagctgtaactcccctcctgtcctctgcccccaaggtctactccctcctcaccccaccctggagggccaggggagtggagagagctcctgatgtcttagtttccacagtaaggtttgcctgtgtacagacctccgttcaataaattattggcatgaaaacctg

SEQ ID NO: 357303 - DNA, 1778 bp, Homo sapiens
gtagcctggccccgttgtacagttgcggtagccactctaggccaaggcccagagcgctcccaagaagtggcttacacggacatcaaagtgattggcaatggctcatttggggtcgtgtaccaggcacggctggcagagaccagggaactagtcgccatcaagaaggttctccaggacaagaggttcaagaaccgagagctgcagatcatgcgtaagctggaccactgcaatattgtgaggctgagatactttttctactccagtggcgagaagaaagacgagctttacctaaatctggtgctggaatatgtgcccgagacagtgtaccgggtggcccgccacttcaccaaggccaagttgaccatccctatcctctatgtcaaggtgtacatgtaccagctcttccgcagcttggcctacatccactcccagggcgtgtgtcaccgcgacatcaagccccagaacctgctggtggaccctgacactgctgtcctcaagctctgcgattttggcagtgcaaagcagttggtccgaggggagcccaatgtctcctacatctgttctcgctactaccgggccccagagctcatctttggagccactgattacacctcatccatcgatgtttggtcagctggctgtgtactggcagagctcctcttgggccagcccatcttccctggggacagtggggtggaccagctggtggagatcatcaaggtgctgggaacaccaacccgggaacaaatccgagagatgaaccccaactacacggagttcaagttccctcagattaaagctcacccctggacaaaggtgttcaaatctcgaacgccgccagaggccatcgcgctctgctctagcctgctggagtacaccccatcctcaaggctctccccactagaggcctgtgcgcacagcttctttgatgaactgcgatgtctgggaacccagctgcctaacaaccgcccacttccccctctcttcaacttcagtgctggtgaactctccatccaaccgtctctcaacgccattctcatccctcctcacttgaggtccccagcgggcactaccaccctcaccccgtcctcacaagctttaactgagactccgaccagctcagactggcagtcgaccgatgccacacctaccctcactaactcctcctgagggccccaccaagcacccttccacttccatctgggagccccaagaggggctgggaaggggggccatagcccatcaagctcctgccctggctgggcccctagactagagggcagaggtaaatgagtccctgtccccacctccagtccctccctcaccagcctcacccctgtggtgggctttttaagaggattttaactggttgtggggagggaagagaaggacagggtgttggggggatgaggacctcctacccccttggccccctcccctcccccagacctccacctcctccagaccccctcccctcctgtgtcccttgtaaatagaaccagcccagcccgtctcctcttcccttccctggcccccgggtgtaaatagattgttataatttttttcttaaagaaaacgtcgattcgcaccgtccaacctggccccgcccctcctacagctgtaactcccctcctgtcctctgcccccaaggtctactccctcctcaccccaccctggagggccaggggagtggagagagctcctgatgtcttagtttccacagtaaggtttgcctgtgtacagacctccgttcaataaattattggcatgaaaacctg

SEQ ID NO: 357304 - DNA, 1452 bp, Homo sapiens
taatgaggtcgggtgccgcacttcataaggcagtgacatccctatcctctatgtcgaggtgtacatgtaccagctcttccgcagcttggcctacatccactcccagggcgtgtgtcaccgcgacatcaagccccagaacctgctggtggaccctgacactgctgtcctcaagctctgcgattttggcagtgcaaagcagttggtccgaggggagcccaatgtctcctacatctgttctcgctactaccgggccccagagctcatctttggagccactgattacacctcatccatcgatgtttggtcagctggctgtgtactggcagagctcctcttgggccagcccatcttccctggggacagtggggtggaccagctggtggagatcatcaaggtgctgggaacaccaacccgggaacaaatccgagagatgaaccccaactacacggagttcaagttccctcagattaaagctcacccctggacaaaggtgttcaaatctcgaacgccgccagaggccatcgcgctctgctctagcctgctggagtacaccccatcctcaaggctctccccactagaggcctgtgcgcacagcttctttgatgaactgcgatgtctgggaacccagctgcctaacaaccgcccacttccccctctcttcaacttcagtgctggtgaactctccatccaaccgtctctcaacgccattctcatccctcctcacttgaggtccccagcgggcactaccaccctcaccccgtcctcacaagctttaactgagactccgaccagctcagactggcagtcgaccgatgccacacctaccctcactaactcctcctgagggccccaccaagcacccttccacttccatctgggagccccaagaggggctgggaaggggggccatagcccatcaagctcctgccctggctgggcccctagactagagggcagaggtaaatgagtccctgtccccacctccagtccctccctcaccagcctcacccctgtggtgggctttttaagaggattttaactggttgtggggagggaagagaaggacagggtgttggggggatgaggacctcctacccccttggccccctcccctcccccagacctccacctcctccagaccccctcccctcctgtgtcccttgtaaatagaaccagcccagcccgtctcctcttcccttccctggcccccgggtgtaaatagattgttataatttttttcttaaagaaaacgtcgattcgcaccgtccaacctggccccgcccctcctacagctgtaactcccctcctgtcctctgcccccaaggtctactccctcctcaccccaccctggagggccaggggagtggagagagctcctgatgtcttagtttccacagtaaggtttgcctgtgtacagacctccgttcaataaattattggcatgaaaacctg

SEQ ID NO: 357305 - DNA, 2646 bp, Homo sapiens
tccggaactgcagtatccacctggggcttaaaaaccacctgagactccatttcccggcgtgctttaaaaatcgctttacacctgcaatgcggtgagggcgtggcgacgactccatttcccggcttgcctcacggcccgagacccgcaggttcacgcgggccgactcaatttcccagagcgcaccgagctctgggaggcatacacagctaatagactgagtgagtggactccgtttcccagcgtgcatcaggctctctgcttcctaaagtgcttcagggctccccgtcgtacagtcggctgacagattaccctggactccatttcccgacgtacagcgtgacccgtcattcccgcccatcattcccgcggtctactctgaggcttttgtggacttcatttcccggcgtgccacgcggctctctgtgcgggccgagggcggtgacggcggcgcggacgacagccggactgcatctcccggcgtgccccgcggcgggcgctgggccggagccggagcccaagccagagcggcgcggcctggaagaggccagggcccgggggaggcggcggcagcggcggcggctggggcagcccgggcagcccgagccccgcagcctgggcctgtgctcggcgccatgagcggcggcgggccttcgggaggcggccctgggggctcgggcagggcgcggactagctcgttcgcggacccggcggcggaggcggaggaggcggcggcggccccggaggctcggcctccggcccaggcggcaccggcggcggaaaggcatctgtcggggccatgggtgggggcgtcggggcctcgagctccgggggtggacccggcggcagcggcggaggaggcagcggaggccccggcgcaggcactagcttcccgccgcccggggtgaagctgggccgtgacagcgggaaggtgaccacagtcgtagccactctaggccaaggcccagagcgctcccaagaagtggcttacacggacatcaaagtgattggcaatggctcatttggggtcgtgtaccaggcacggctggcagagaccagggaactagtcgccatcaagaaggttctccaggacaagaggttcaagaaccgagagctgcagatcatgcgtaagctggaccactgcaatattgtgaggctgagatactttttctactccagtggcgagaagaaagacgagctttacctaaatctggtgctggaatatgtgcccgagacagtgtaccgggtggcccgccacttcaccaaggccaagttgaccatccctatcctctatgtcaaggtgtacatgtaccagctcttccgcagcttggcctacatccactcccagggcgtgtgtcaccgcgacatcaagccccagaacctgctggtggaccctgacactgctgtcctcaagctctgcgattttggcagtgcaaagcagttggtccgaggggagcccaatgtctcctacatctgttctcgctactaccgggccccagagctcatctttggagccactgattacacctcatccatcgatgtttggtcagctggctgtgtactggcagagctcctcttgggccagcccatcttccctggggacagtggggtggaccagctggtggagatcatcaaggtgctgggaacaccaacccgggaacaaatccgagagatgaaccccaactacacggagttcaagttccctcagattaaagctcacccctggacaaaggtgttcaaatctcgaacgccgccagaggccatcgcgctctgctctagcctgctggagtacaccccatcctcaaggctctccccactagaggcctgtgcgcacagcttctttgatgaactgcgatgtctgggaacccagctgcctaacaaccgcccacttccccctctcttcaacttcagtgctggtgaactctccatccaaccgtctctcaacgccattctcatccctcctcacttgaggtccccagcgggcactaccaccctcaccccgtcctcacaagctttaactgagactccgaccagctcagactggcagtcgaccgatgccacacctaccctcactaactcctcctgagggccccaccaagcacccttccacttccatctgggagccccaagaggggctgggaaggggggccatagcccatcaagctcctgccctggctgggcccctagactagagggcagaggtaaatgagtccctgtccccacctccagtccctccctcaccagcctcacccctgtggtgggctttttaagaggattttaactggttgtggggagggaagagaaggacagggtgttggggggatgaggacctcctacccccttggccccctcccctcccccagacctccacctcctccagaccccctcccctcctgtgtcccttcccgggtgtaaatagattgttataatttttttcttaaagaaaacgtcgattcgcaccgtccaacctggccccgcccctcctacagctgtaactcccctcctgtcctctgcccccaaggtctactccctcctcaccccaccctggagggccaggggagtggagagagctcctgatgtcttagtttccacagtaaggtttgcctgtgtacagacctccgttcaataaattattggcatgaaaacctg

SEQ ID NO: 357306 - DNA, 1228 bp, Homo sapiens
tgaggaataaaagcattgggaggttggtggccctactcgcctagccctgacgctccctccatttcccctcagatgtttggtcagctggctgtgtactggcagagctcctcttgggccagcccatcttccctggggacagtggggtggaccagctggtggagatcatcaaggtgctgggaacaccaacccgggaacaaatccgagagatgaaccccaactacacggagttcaagttccctcagattaaagctcacccctggacaaaggtgttcaaatctcgaacgccgccagaggccatcgcgctctgctctagcctgctggagtacaccccatcctcaaggctctccccactagaggcctgtgcgcacagcttctttgatgaactgcgatgtctgggaacccagctgcctaacaaccgcccacttccccctctcttcaacttcagtgctggtgaactctccatccaaccgtctctcaacgccattctcatccctcctcacttgaggtccccagcgggcactaccaccctcaccccgtcctcacaagctttaactgagactccgaccagctcagactggcagtcgaccgatgccacacctaccctcactaactcctcctgagggccccaccaagcacccttccacttccatctgggagccccaagaggggctgggaaggggggccatagcccatcaagctcctgccctggctgggcccctagactagagggcagaggtaaatgagtccctgtccccacctccagtccctccctcaccagcctcacccctgtggtgggctttttaagaggattttaactggttgtggggagggaagagaaggacagggtgttggggggatgaggacctcctacccccttggccccctcccctcccccagacctccacctcctccagaccccctcccctcctgtgtcccttgtaaatagaaccagcccagcccgtctcctcttcccttccctggcccccgggtgtaaatagattgttataatttttttcttaaagaaaacgtcgattcgcaccgtccaacctggccccgcccctcctacagctgtaactcccctcctgtcctctgcccccaaggtctactccctcctcaccccaccctggagggccaggggagtggagagagctcctgatgtcttagtttccacagtaaggtttgcctgtgtacagacctccgttcaataaattattggcatgaaaacctg

SEQ ID NO: 357307 - DNA, 2115 bp, Homo sapiens
tccggaactgcagtatccacctggggcttaaaaaccacctgagactccatttcccggcgtgctttaaaaatcgctttacacctgcaatgcggtgagggcgtggcgacgactccatttcccggcttgcctcacggcccgagacccgcaggttcacgcgggccgactcaatttcccagagcgcaccgagctctgggaggcatacacagctaatagactgagtgagtggactccgtttcccagcgtgcatcaggctctctgcttcctaaagtgcttcagggctccccgtcgtacagtcggctgacagattaccctggactccatttcccgacgtacagcgtgacccgtcattcccgcccatcattcccgcggtctactctgaggcttttgtggacttcatttcccggcgtgccacgcggctctctgtgcgggccgagggcggtgacggcggcgcggacgacagccggactgcatctcccggcgtgccccgcggcgggcgctgggccggagccggagcccaagccagagcggcgcggcctggaagaggccagggcccgggggaggcggcggcagcggcggcggctggggcagcccgggcagcccgagccccgcagcctgggcctgtgctcggcgccatgagcggcggcgggccttcgggaggcggccctgggggctcgggcagggcgcggactagctcgttcgcggacccggcggcggaggcggaggaggcggcggcggccccggaggctcggcctccggcccaggcggcaccggcggcggaaaggcatctgtcggggccatgggtgggggcgtcggggcctcgagctccgggggtggacccggcggcagcggcggaggaggcagcggaggccccggcgcaggcactagcttcccgccgcccggggtgaagctgggccgtgacagcgggaaggtgaccacagtcgtagccactctaggccaaggcccagagcgctcccaagaagtggcttacacggacatcaaagtgattggcaatggctcatttggggtcgtgtaccaggcacggctggcagagaccagggaactagtcgccatcaagaaggttctccaggacaagaggttcaagaaccgagagctgcagatcatgcgtaagctggaccactgcaatattgtgaggctgagatactttttctactccagtggcgagaagaaagacgagctttacctaaatctggtgctggaatatgtgcccgagacagtgtaccgggtggcccgccacttcaccaaggccaagttgaccatccctatcctctatgtcaaggtgtacatgtaccagctcttccgcagcttggcctacatccactcccagggcgtgtgtcaccgcgacatcaagccccagaacctgctggtggaccctgacactgctgtcctcaagctctgcgattttggcagtgcaaagcagttggtccgaggggagcccaatgtctcctacatctgttctcgctactaccgggccccagagctcatctttggagccactgattacacctcatccatcgatgtttggtcagctggctgtgtactggcagagctcctcttgggccagcccatcttccctggggacagtggggtggaccagctggtggagatcatcaaggtgctgggaacaccaacccgggaacaaatccgagagatgaaccccaactacacggagttcaagttccctcagattaaagctcacccctggacaaaggtgttcaaatctcgaacgccgccagaggccatcgcgctctgctctagcctgctggagtacaccccatcctcaaggctctccccactagaggcctgtgcgcacagcttctttgatgaactgcgatgtctgggaacccagctgcctaacaaccgcccacttccccctctcttcaacttcagtgctggtgaactctccatccaaccgtctctcaacgccattctcatccctcctcacttgaggtccccagcgggcactaccaccctcaccccgtcctcacaagctttaactgagactccgaccagctcagactggcagtcgaccgatgccacacctaccctcactaactcctcctgagggcctctagcggcaaccggggtaaaagctcg

SEQ ID NO: 357308 - DNA, 2258 bp, Homo sapiens
tccggaactgcagtatccacctggggcttaaaaaccacctgagactccatttcccggcgtgctttaaaaatcgctttacacctgcaatgcggtgagggcgtggcgacgactccatttcccggcttgcctcacggcccgagacccgcaggttcacgcgggccgactcaatttcccagagcgcaccgagctctgggaggcatacacagctaatagactgagtgagtggactccgtttcccagcgtgcatcaggctctctgcttcctaaagtgcttcagggctccccgtcgtacagtcggctgacagattaccctggactccatttcccgacgtacagcgtgacccgtcattcccgcccatcattcccgcggtctactctgaggcttttgtggacttcatttcccggcgtgccacgcggctctctgtgcgggccgagggcggtgacggcggcgcggacgacagccggactgcatctcccggcgtgccccgcggcgggcgctgggccggagccggagcccaagccagagcggcgcggcctggaagaggccagggcccgggggaggcggcggcagcggcggcggctggggcagcccgggcagcccgagccccgcagcctgggcctgtgctcggcgccatgagcggcggcgggccttcgggaggcggccctgggggctcgggcagggcgcggactagctcgttcgcggacccggcggcggaggcggaggaggcggcggcggccccggaggctcggcctccggcccaggcggcaccggcggcggaaaggcatctgtcggggccatgggtgggggcgtcggggcctcgagctccgggggtggacccggcggcagcggcggaggaggcagcggaggccccggcgcaggcactagcttcccgccgcccggggtgaagctgggccgtgacagcgggaaggtgaccacagtcgtagccactctaggccaaggcccagagcgctcccaagaagtggcttacacggacatcaaagtgattggcaatggctcatttggggtcgtgtaccaggcacggctggcagagaccagggaactagtcgccatcaagaaggttctccaggacaagaggttcaagaaccgagagctgcagatcatgcgtaagctggaccactgcaatattgtgaggctgagatactttttctactccagtggcgagaagaaagacgagctttacctaaatctggtgctggaatatgtgcccgagacagtgtaccgggtggcccgccacttcaccaaggccaagttgaccatccctatcctctatgtcaaggtgtacatgtaccagctcttccgcagcttggcctacatccactcccagggcgtgtgtcaccgcgacatcaagccccagaacctgctggtggaccctgacactgctgtcctcaagctctgcgattttggcagtgcaaagcagttggtccgaggggagcccaatgtctcctacatctgttctcgctactaccgggccccagagctcatctttggagccactgattacacctcatccatcgatgtttggtcagctggctgtgtactggcagagctcctcttgggccagcccatcttccctggggacagtggggtggaccagctggtggagatcatcaaggtgctgggaacaccaacccgggaacaaatccgagagatgaaccccaactacacggagttcaagttccctcagattaaagctcacccctggacaaaggtgttcaaatctcgaacgccgccagaggccatcgcgctctgctctagcctgctggagtacaccccatcctcaaggctctccccactagaggcctgtgcgcacagcttctttgatgaactgcgatgtctgggaacccagctgcctaacaaccgcccacttccccctctcttcaacttcagtgctggtgaactctccatccaaccgtctctcaacgccattctcatccctcctcacttgaggtccccagcgggcactaccaccctcaccccgtcctcacaagctttaactgagactccgaccagctcagactggcagtcgaccgatgccacacctaccctcactaactcctcctgagggcccctcctacagctgtaactcccctcctgtcctctgcccccaaggtctactccctcctcaccccaccctggagggccaggggagtggagagagctcctgatgtcttagtttccacagtaaggtttgcctgtgtacagacctccgttcaataaattattggcatgaaaacctg

SEQ ID NO: 357309 - DNA, 1117 bp, Homo sapiens
tccttagtggttgggccttagtttcttcatttggaaggtgggggtgtgggaagcaaccagtcataacttgccgcaggcactgtggcagtgagataacaggagtatgccagtgtccagggcatctcaccctcatgagccctgcacccatccctcaggtgttcaaatctcgaacgccgccagaggccatcgcgctctgctctagcctgctggagtacaccccatcctcaaggctctccccactagaggcctgtgcgcacagcttctttgatgaactgcgatgtctgggaacccagctgcctaacaaccgcccacttccccctctcttcaacttcagtgctggtgaactctccatccaaccgtctctcaacgccattctcatccctcctcacttgaggtccccagcgggcactaccaccctcaccccgtcctcacaagctttaactgagactccgaccagctcagactggcagtcgaccgatgccacacctaccctcactaactcctcctgagggccccaccaagcacccttccacttccatctgggagccccaagaggggctgggaaggggggccatagcccatcaagctcctgccctggctgggcccctagactagagggcagaggtaaatgagtccctgtccccacctccagtccctccctcaccagcctcacccctgtggtgggctttttaagaggattttaactggttgtggggagggaagagaaggacagggtgttggggggatgaggacctcctacccccttggccccctcccctcccccagacctccacctcctccagaccccctcccctcctgtgtcccttgtaaatagaaccagcccagcccgtctcctcttcccttccctggcccccgggtgtaaatagattgttataatttttttcttaaagaaaacgtcgattcgcaccgtccaacctggccccgcccctcctacagctgtaactcccctcctgtcctctgcccccaaggtctactccctcctcaccccaccctggagggccaggggagtggagagagctcctgatgtcttagtttccacagtaaggtttgcctgtgtacagacctccgttcaataaattattggcatgaaaacctg

SEQ ID NO: 357310 - DNA, 878 bp, Homo sapiens
tggagcctggcactctggtgtgtcactcagttactatcgtggccctttagcacttgagtttgcaacccttcacctaaagtaacagcttgtaacttttaatgtagcatctatgacaagagaattcctacttttgggttgggcgaaggggtgtctgaaaggcaaaggctaactctgctccttccctgcctccctccagctttaactgagactccgaccagctcagactggcagtcgaccgatgccacacctaccctcactaactcctcctgagggccccaccaagcacccttccacttccatctgggagccccaagaggggctgggaaggggggccatagcccatcaagctcctgccctggctgggcccctagactagagggcagaggtaaatgagtccctgtccccacctccagtccctccctcaccagcctcacccctgtggtgggctttttaagaggattttaactggttgtggggagggaagagaaggacagggtgttggggggatgaggacctcctacccccttggccccctcccctcccccagacctccacctcctccagaccccctcccctcctgtgtcccttgtaaatagaaccagcccagcccgtctcctcttcccttccctggcccccgggtgtaaatagattgttataatttttttcttaaagaaaacgtcgattcgcaccgtccaacctggccccgcccctcctacagctgtaactcccctcctgtcctctgcccccaaggtctactccctcctcaccccaccctggagggccaggggagtggagagagctcctgatgtcttagtttccacagtaaggtttgcctgtgtacagacctccgttcaataaattattggcatgaaaacctg

SEQ ID NO: 357311 - DNA, 771 bp, Homo sapiens
ggcctcatcatcaaaatcgatcatcatcatcatcttgcatcatcatcctcttcagtcatcatcgtcatcatcgtgtcatcagcagcaagctttaactgagactccgaccagctcagactggcagtcgaccgatgccacacctaccctcactaactcctcctgagggccccaccaagcacccttccacttccatctgggagccccaagaggggctgggaaggggggccatagcccatcaagctcctgccctggctgggcccctagactagagggcagaggtaaatgagtccctgtccccacctccagtccctccctcaccagcctcacccctgtggtgggctttttaagaggattttaactggttgtggggagggaagagaaggacagggtgttggggggatgaggacctcctacccccttggccccctcccctcccccagacctccacctcctccagaccccctcccctcctgtgtcccttgtaaatagaaccagcccagcccgtctcctcttcccttccctggcccccgggtgtaaatagattgttataatttttttcttaaagaaaacgtcgattcgcaccgtccaacctggccccgcccctcctacagctgtaactcccctcctgtcctctgcccccaaggtctactccctcctcaccccaccctggagggccaggggagtggagagagctcctgatgtcttagtttccacagtaaggtttgcctgtgtacagacctccgttcaataaattattggcatgaaaacctg

SEQ ID NO: 357312 - DNA, 1487 bp, Homo sapiens
tccggaactgcagtatccacctggggcttaaaaaccacctgagactccatttcccggcgtgctttaaaaatcgctttacacctgcaatgcggtgagggcgtggcgacgactccatttcccggcttgcctcacggcccgagacccgcaggttcacgcgggccgactcaatttcccagagcgcaccgagctctgggaggcatacacagctaatagactgagtgagtggactccgtttcccagcgtgcatcaggctctctgcttcctaaagtgcttcagggctccccgtcgtacagtcggctgacagattaccctggactccatttcccgacgtacagcgtgacccgtcattcccgcccatcattcccgcggtctactctgaggcttttgtggacttcatttcccggcgtgccacgcggctctctgtgcgggccgagggcggtgacggcggcgcggacgacagccggactgcatctcccggcgtgccccgcggcgggcgctgggccggagccggagcccaagccagagcggcgcggcctggaagaggccagggcccgggggaggcggcggcagcggcggcggctggggcagcccgggcagcccgagccccgcagcctgggcctgtgctcggcgccatgagcggcggcgggccttcgggaggcggccctgggggctcgggcagggcgcggactagctcgttcgcggacccggcggcggaggcggaggaggcggcggcggccccggaggctcggcctccggcccaggcggcaccggcggcggaaaggcatctgtcggggccatgggtgggggcgtcggggcctcgagctccgggggtggacccggcggcagcggcggaggaggcagcggaggccccggcgcaggcactagcttcccgccgcccggggtgaagctgggccgtgacagcgggaaggtgaccacagtcgtagccactctaggccaaggcccagagcgctcccaagaagtggcttacacggacatcaaagtgattggcaatggctcatttggggtcgtgtaccaggcacggctggcagagaccagggaactagtcgccatcaagaaggttctccaggacaagaggttcaagaaccgagagctgcagatcatgcgtaagctggaccactgcaatattgtgaggctgagatactttttctactccagtggcgagaagaaagacgagctttacctaaatctggtgctggaatatgtgcccgagacagtgtaccgggtggcccgccacttcaccaaggccaagttgaccatccctatcctctatgtcaaggtgtacatgtaccagctcttccgcagcttggcctacatccactcccagggcgtgtgtcaccgcgacatcaagccccagaacctgcctggagggccaggggagtggagagagctcctgatgtcttagtttccacagtaaggtttgcctgtgtacagacctccgttcaataaattattggcatgaaaacctg

SEQ ID NO: 357313 - DNA, 263 bp, Homo sapiens
gacatcaagccccagaacctgctggtggaccctgacactgctgtcctcaagctctgcgattttggcaggtgggcctggggcatgttgggtggctgaagaggcaggggggaccccaacccttgcctcacgtgtacccctgcccatctcttcccacagtgcaaagcagttggtccgaggggagcccaatgtctcctacatctgttctcgctactaccgggccccagagctcatctttggagccactgattacacctcatccatcg

SEQ ID NO: 357314 - DNA, 190 bp, Homo sapiens
gggttcccatttggtgcccatcataaccctgctgtagtctaccctgactagcatgtcaattcctgtttctagaactctccatccaaccgtctctcaacgccattctcatccctcctcacttgaggtccccagcgggcactaccaccctcaccccgtcctcacaaggtaagtggggaccatctgctggggg

SEQ ID NO: 357315 - DNA, 1731 bp, Homo sapiens
tccggaactgcagtatccacctggggcttaaaaaccacctgagactccatttcccggcgtgctttaaaaatcgctttacacctgcaatgcggtgagggcgtggcgacgactccatttcccggcttgcctcacggcccgagacccgcaggttcacgcgggccgactcaatttcccagagcgcaccgagctctgggaggcatacacagctaatagactgagtgagtggactccgtttcccagcgtgcatcaggctctctgcttcctaaagtgcttcagggctccccgtcgtacagtcggctgacagattaccctggactccatttcccgacgtacagcgtgacccgtcattcccgcccatcattcccgcggtctactctgaggcttttgtggacttcatttcccggcgtgccacgcggctctctgtgcgggccgagggcggtgacggcggcgcggacgacagccggactgcatctcccggcgtgccccgcggcgggcgctgggccggagccggagcccaagccagagcggcgcggcctggaagaggccagggcccgggggaggcggcggcagcggcggcggctggggcagcccgggcagcccgagccccgcagcctgggcctgtgctcggcgccatgagcggcggcgggccttcgggaggcggccctgggggctcgggcagggcgcggactagctcgttcgcggacccggcggcggaggcggaggaggcggcggcggccccggaggctcggcctccggcccaggcggcaccggcggcggaaaggcatctgtcggggccatgggtgggggcgtcggggcctcgagctccgggggtggacccggcggcagcggcggaggaggcagcggaggccccggcgcaggcactagcttcccgccgcccggggtgaagctgggccgtgagtactagtggcgcccgtgtagggtggtgattagggttcccaaagctcctcagacatccatcagattctttcatgtgcttagataggagctcgaggtcactgtgcctccccataccggggatccgagccctcttcctcccaggaaaaggagtcttggggttaccatctcttggagatcagaattactcgtggatcagaattactaacacttaaagaaacgggttacaagtctctgttcttccattattgaggtcttgggtccttgagccttaagaacaggtatctgatgttgctattcattataatattggatcagaggtcacagtcgcttgcaaatggggatctagggttattgtctcctaagagaacaagaataagaccaaccccgaaaaagagggatctgcattcgctgtccttcagaagatggggatttggagcgaatatcacttagaagcagggctttgaggttactgtgttttgtccccaaagaatagggccaggctttccaaacctggtactcagatcatcttccctattaaaaccaagacctggcatcattacccaccctaaatcttgttgagctgtactgccaatggtgagaattaatagttactgccttttagatataaagacattgggagtcagcatatccttcaaaccaagtccatagtccatgttttaaaatacatggcttggtgtgtctcctttaacaaaaatggaatggagcagggtaggtcacagtttcctacagaatatggatctaaggttatacttttttaataattgttctaaggtatggtgtcattggctctga

SEQ ID NO: 357316 - DNA, 2065 bp, Homo sapiens
atcaggcgaagactgtggggccaatctgtggagcctcttgacagcctctgtttccctgggagtggcagtggccggccctggctcaggacagggagttgtgaggatcaaatgaatggacggttgcaaaaagtgacaggaacattcactaccattactcactgggagcaggactctcgattttacagcccactcgaccacagtcttcgcctgatcgaagactgtggggtcgtgtaccaggcacggctggcagagaccagggatggatcgtgtatcccctttgttccccaggtgacagcgggaaggtgaccacagtcgtagccactctaggccaaggcccagagcgctcccaagaagtggcttacacggacatcaaagtgattggcaatggctcatttggggtcgtgtaccaggcacggctggcagagaccagggaactagtcgccatcaagaaggttctccaggacaagaggttcaagaaccgagagctgcagatcatgcgtaagctggaccactgcaatattgtgaggctgagatactttttctactccagtggcgagaagaaagacgagctttacctaaatctggtgctggaatatgtgcccgagacagtgtaccgggtggcccgccacttcaccaaggccaagttgaccatccctatcctctatgtcaaggtgtacatgtaccagctcttccgcagcttggcctacatccactcccagggcgtgtgtcaccgcgacatcaagccccagaacctgctggtggaccctgacactgctgtcctcaagctctgcgattttggcagtgcaaagcagttggtccgaggggagcccaatgtctcctacatctgttctcgctactaccgggccccagagctcatctttggagccactgattacacctcatccatcgatgtttggtcagctggctgtgtactggcagagctcctcttgggccagcccatcttccctggggacagtggggtggaccagctggtggagatcatcaaggtgctgggaacaccaacccgggaacaaatccgagagatgaaccccaactacacggagttcaagttccctcagattaaagctcacccctggacaaaggtgttcaaatctcgaacgccgccagaggccatcgcgctctgctctagcctgctggagtacaccccatcctcaaggctctccccactagaggcctgtgcgcacagcttctttgatgaactgcgatgtctgggaacccagctgcctaacaaccgcccacttccccctctcttcaacttcagtgctggtgaactctccatccaaccgtctctcaacgccattctcatccctcctcacttgaggtccccagcgggcactaccaccctcaccccgtcctcacaagctttaactgagactccgaccagctcagactggcagtcgaccgatgccacacctaccctcactaactcctcctgagggccccaccaagcacccttccacttccatctgggagccccaagaggggctgggaaggggggccatagcccatcaagctcctgccctggctgggcccctagactagagggcagaggtaaatgagtccctgtccccacctccagtccctccctcaccagcctcacccctgtggtgggctttttaagaggattttaactggttgtggggagggaagagaaggacagggtgttggggggatgaggacctcctacccccttggccccctcccctcccccagacctccacctcctccagaccccctcccctcctgtgtcccttgtaaatagaaccagcccagcccgtctcctcttcccttccctggcccccgggtgtaaatagattgttataatttttttcttaaagaaaacgtcgattcgcaccgtccaacctggccccgcccctcctacagctgtaactcccctcctgtcctctgcccccaaggtctactccctcctcaccccaccctggagggccaggggagtggagagagctcctgatgtcttagtttccacagtaaggtttgcctgtgtacagacctccgttcaataaattattggcatgaaaacctg

SEQ ID NO: 357317 - DNA, 2854 bp, Homo sapiens
tccggaactgcagtatccacctggggcttaaaaaccacctgagactccatttcccggcgtgctttaaaaatcgctttacacctgcaatgcggtgagggcgtggcgacgactccatttcccggcttgcctcacggcccgagacccgcaggttcacgcgggccgactcaatttcccagagcgcaccgagctctgggaggcatacacagctaatagactgagtgagtggactccgtttcccagcgtgcatcaggctctctgcttcctaaagtgcttcagggctccccgtcgtacagtcggctgacagattaccctggactccatttcccgacgtacagcgtgacccgtcattcccgcccatcattcccgcggtctactctgaggcttttgtggacttcatttcccggcgtgccacgcggctctctgtgcgggccgagggcggtgacggcggcgcggacgacagccggactgcatctcccggcgtgccccgcggcgggcgctgggccggagccggagcccaagccagagcggcgcggcctggaagaggccagggcccgggggaggcggcggcagcggcggcggctggggcagcccgggcagcccgagccccgcagcctgggcctgtgctcggcgccatgagcggcggcgggccttcgggaggcggccctgggggctcgggcagggcgcggactagctcgttcgcggacccggcggcggaggcggaggaggcggcggcggccccggaggctcggcctccggcccaggcggcaccggcggcggaaaggcatctgtcggggccatgggtgggggcgtcggggcctcgagctccgggggtggacccggcggcagcggcggaggaggcagcggaggccccggcgcaggcactagcttcccgccgcccggggtgaagctgggccgtgacagcgggaaggtgaccacagtcgtagccactctaggccaaggcccagagcgctcccaagaagtggcttacacggacatcaaagtgattggcaatggctcatttggggtcgtgtaccaggcacggctggcagagaccagggaactagtcgccatcaagaaggttctccaggacaagaggttcaagaaccgagagctgcagatcatgcgtaagctggaccactgcaatattgtgaggctgagatactttttctactccagtggcgagaagaaagacgagctttacctaaatctggtgctggaatatgtgcccgagacagtgtaccgggtggcccgccacttcaccaaggccaagttgaccatccctatcctctatgtcaaggtgtacatgtaccagctcttccgcagcttggcctacatccactcccagggcgtgtgtcaccgcgacatcaagccccagaacctgctggtggaccctgacactgctgtcctcaagctctgcgattttggcagtgcaaagcagttggtccgaggggagcccaatgtctcctacatctgttctcgctactaccgggccccagagctcatctttggagccactgattacacctcatccatcgatgtttggtcagctggctgtgtactggcagagctcctcttgggccagcccatcttccctggggacagtggggtggaccagctggtggagatcatcaaggtgctgggaacaccaacccgggaacaaatccgagagatgaaccccaactacacggagttcaagttccctcagattaaagctcacccctggacaaaggtgttcaaatctcgaacgccgccagaggccatcgcgctctgctctagcctgctggagtacaccccatcctcaaggctctccccactagaggcctgtgcgcacagcttctttgatgaactgcgatgtctgggaacccagctgcctaacaaccgcccacttccccctctcttcaacttcagtgctggtgaactctccatccaaccgtctctcaacgccattctcatccctcctcacttgaggtccccagcgggcactaccaccctcaccccgtcctcacaagctttaactgagactccgaccagctcagactggcagtcgaccgatgccacacctaccctcactaactcctcctgagggccccaccaagcacccttccacttccatctgggagccccaagaggggctgggaaggggggccatagcccatcaagctcctgccctggctgggcccctagactagagggcagaggtaaatgagtccctgtccccacctccagtccctccctcaccagcctcacccctgtggtgggctttttaagaggattttaactggttgtggggagggaagagaaggacagggtgttggggggatgaggacctcctacccccttggccccctcccctcccccagacctccacctcctccagaccccctcccctcctgtgtcccttgtaaatagaaccagcccagcccgtctcctcttcccttccctggcccccgggtgtaaatagattgttataatttttttcttaaagaaaacgtcgattcgcaccgtccaacctggccccgcccctcctacagctgtaactcccctcctgtcctctgcccccaaggtctactccctcctcaccccaccctggagggccaggggagtggagagagctcctgatgtcttagtttccacagtaaggtttgcctgtgtacagacctccgttcaataaattattggcatgaaaacctgctttctgtccggctgcctgtttccgctgaggtggtgggggcttccggtggggggactgttctgggacgggagtgagctgcatctcaggcagagggctgtccgaaggccctggctcaggtgcccaaccttctcacaccgtggctttctctgcacgtgtggtgat

SEQ ID NO: 357318 - DNA, 2591 bp, Homo sapiens
tccggaactgcagtatccacctggggcttaaaaaccacctgagactccatttcccggcgtgctttaaaaatcgctttacacctgcaatgcggtgagggcgtggcgacgactccatttcccggcttgcctcacggcccgagacccgcaggttcacgcgggccgactcaatttcccagagcgcaccgagctctgggaggcatacacagctaatagactgagtgagtggactccgtttcccagcgtgcatcaggctctctgcttcctaaagtgcttcagggctccccgtcgtacagtcggctgacagattaccctggactccatttcccgacgtacagcgtgacccgtcattcccgcccatcattcccgcggtctactctgaggcttttgtggacttcatttcccggcgtgccacgcggctctctgtgcgggccgagggcggtgacggcggcgcggacgacagccggactgcatctcccggcgtgccccgcggcgggcgctgggccggagccggagcccaagccagagcggcgcggcctggaagaggccagggcccgggggaggcggcggcagcggcggcggctggggcagcccgggcagcccgagccccgcagcctgggcctgtgctcggcgccatgagcggcggcgggccttcgggaggcggccctgggggctcgggcagggcgcggactagctcgttcgcggacccggcggcggaggcggaggaggcggcggcggccccggaggctcggcctccggcccaggcggcaccggcggcggaaaggcatctgtcggggccatgggtgggggcgtcggggcctcgagctccgggggtggacccggcggcagcggcggaggaggcagcggaggccccggcgcaggcactagcttcccgccgcccggggtgaagctgggccgtgacagcgggaaggtgaccacagtcgtagccactctaggccaaggcccagagcgctcccaagaagtggcttacacggacatcaaagtgattggcaatggctcatttggggtcgtgtaccaggcacggctggcagagaccagggaactagtcgccatcaagaaggttctccaggacaagaggttcaagaaccgagagctgcagatcatgcgtaagctggaccactgcaatattgtgaggctgagatactttttctactccagtggcgagaagaaagacgagctttacctaaatctggtgctggaatatgtgcccgagacagtgtaccgggtggcccgccacttcaccaaggccaagttgaccatccctatcctctatgtcaaggtgtacatgtaccagctcttccgcagcttggcctacatccactcccagggcgtgtgtcaccgcgacatcaagccccagaacctgctggtggaccctgacactgctgtcctcaagctctgcgattttggcagtgcaaagcagttggtccgaggggagcccaatgtctcctacatctgttctcgctactaccgggccccagagctcatctttggagccactgattacacctcatccatcgatgtttggtcagctggctgtgtactggcagagctcctcttgggccagcccatcttccctggggacagtggggtggaccagctggtggagatcatcaaggtgctgggaacaccaacccgggaacaaatccgagagatgaaccccaactacacggagttcaagttccctcagattaaagctcacccctggacaaaggtgttcaaatctcgaacgccgccagaggccatcgcgctctgctctagcctgctggagtacaccccatcctcaaggctctccccactagaggcctgtgcgcacagcttctttgatgaactgcgatgtctgggaacccagctgcctaacaaccgcccacttccccctctcttcaacttcagtgctggtgaactctccatccaaccgtctctcaacgccattctcatccctcctcacttgaggtccccagcgggcactaccaccctcaccccgtcctcacaagctttaactgagactccgaccagctcagactggcagtcgaccgatgccacacctaccctcactaactcctcctgagggccccaccaagcacccttccacttccatctgggagccccaagaggggctgggaaggggggccatagcccatcaagctcctgccctggctgggcccctagactagagggcagaggtaaatgagtccctgtccccacctccagtccctccctcaccagcctcacccctgtggtgggctttttaagaggattttaactggttgtggggagggaagagaaggacagggtgttggggggatgaggacctcctacccccttggccccctcccctcccccagacctccacctcctccagaccccctcccctcctgtgtcccttgtaaatagaaccagcccagcccgtctcctcttcccttccctggcctgtcctctgcccccaaggtctactccctcctcaccccaccctggagggccaggggagtggagagagctcctgatgtcttagtttccacagtaaggtttgcctgtgtacagacctccgttcaataaattattggcatgaaaacctg

SEQ ID NO: 357319 - DNA, 2396 bp, Homo sapiens
tccggaactgcagtatccacctggggcttaaaaaccacctgagactccatttcccggcgtgctttaaaaatcgctttacacctgcaatgcggtgagggcgtggcgacgactccatttcccggcttgcctcacggcccgagacccgcaggttcacgcgggccgactcaatttcccagagcgcaccgagctctgggaggcatacacagctaatagactgagtgagtggactccgtttcccagcgtgcatcaggctctctgcttcctaaagtgcttcagggctccccgtcgtacagtcggctgacagattaccctggactccatttcccgacgtacagcgtgacccgtcattcccgcccatcattcccgcggtctactctgaggcttttgtggacttcatttcccggcgtgccacgcggctctctgtgcgggccgagggcggtgacggcggcgcggacgacagccggactgcatctcccggcgtgccccgcggcgggcgctgggccggagccggagcccaagccagagcggcgcggcctggaagaggccagggcccgggggaggcggcggcagcggcggcggctggggcagcccgggcagcccgagccccgcagcctgggcctgtgctcggcgccatgagcggcggcgggccttcgggaggcggccctgggggctcgggcagggcgcggactagctcgttcgcggacccggcggcggaggcggaggaggcggcggcggccccggaggctcggcctccggcccaggcggcaccggcggcggaaaggcatctgtcggggccatgggtgggggcgtcggggcctcgagctccgggggtggacccggcggcagcggcggaggaggcagcggaggccccggcgcaggcactagcttcccgccgcccggggtgaagctgggccgtgacagcgggaaggtgaccacagtcgtagccactctaggccaaggcccagagcgctcccaagaagtggcttacacggacatcaaagtgattggcaatggctcatttggggtcgtgtaccaggcacggctggcagagaccagggaactagtcgccatcaagaaggttctccaggacaagaggttcaagaaccgagagctgcagatcatgcgtaagctggaccactgcaatattgtgaggctgagatactttttctactccagtggcgagaagaaagacgagctttacctaaatctggtgctggaatatgtgcccgagacagtgtaccgggtggcccgccacttcaccaaggccaagttgaccatccctatcctctatgtcaaggtgtacatgtaccagctcttccgcagcttggcctacatccactcccagggcgtgtgtcaccgcgacatcaagccccagaacctgctggtggaccctgacactgctgtcctcaagctctgcgattttggcagtgcaaagcagttggtccgaggggagcccaatgtctcctacatctgttctcgctactaccgggccccagagctcatctttggagccactgattacacctcatccatcgatgtttggtcagctggctgtgtactggcagagctcctcttgggccagcccatcttccctggggacagtggggtggaccagctggtggagatcatcaaggtgctgggaacaccaacccgggaacaaatccgagagatgaaccccaactacacggagttcaagttccctcagattaaagctcacccctggacaaaggtgttcaaatctcgaacgccgccagaggccatcgcgctctgctctagcctgctggagtacaccccatcctcaaggctctccccactagaggcctgtgcgcacagcttctttgatgaactgcgatgtctgggaacccagctgcctaacaaccgcccacttccccctctcttcaacttcagtgctggtgaactctccatccaaccgtctctcaacgccattctcatccctcctcacttgaggtccccagcgggcactaccaccctcaccccgtcctcacaagctttaactgagactccgaccagctcagactggcagtcgaccgatgccacacctaccctcactaactcctcctgagggccccaccaagcacccttccacttccatctgggagccccaagaggggctgggaaggggggccatagcccatcaagctcctgccctggctgggcccctagactagagggcagaggattcgcaccgtccaacctggccccgcccctcctacagctgtaactcccctcctgtcctctgcccccaaggtctactccctcctcaccccaccctggagggccaggggagtggagagagctcctgatgtcttagtttccacagtaaggtttgcctgtgtacagacctccgttcaataaattattggcatgaaaacctg

SEQ ID NO: 357320 - DNA, 2233 bp, Homo sapiens
tccggaactgcagtatccacctggggcttaaaaaccacctgagactccatttcccggcgtgctttaaaaatcgctttacacctgcaatgcggtgagggcgtggcgacgactccatttcccggcttgcctcacggcccgagacccgcaggttcacgcgggccgactcaatttcccagagcgcaccgagctctgggaggcatacacagctaatagactgagtgagtggactccgtttcccagcgtgcatcaggctctctgcttcctaaagtgcttcagggctccccgtcgtacagtcggctgacagattaccctggactccatttcccgacgtacagcgtgacccgtcattcccgcccatcattcccgcggtctactctgaggcttttgtggacttcatttcccggcgtgccacgcggctctctgtgcgggccgagggcggtgacggcggcgcggacgacagccggactgcatctcccggcgtgccccgcggcgggcgctgggccggagccggagcccaagccagagcggcgcggcctggaagaggccagggcccgggggaggcggcggcagcggcggcggctggggcagcccgggcagcccgagccccgcagcctgggcctgtgctcggcgccatgagcggcggcgggccttcgggaggcggccctgggggctcgggcagggcgcggactagctcgttcgcggacccggcggcggaggcggaggaggcggcggcggccccggaggctcggcctccggcccaggcggcaccggcggcggaaaggcatctgtcggggccatgggtgggggcgtcggggcctcgagctccgggggtggacccggcggcagcggcggaggaggcagcggaggccccggcgcaggcactagcttcccgccgcccggggtgaagctgggccgtgacagcgggaaggtgaccacagtcgtagccactctaggccaaggcccagagcgctcccaagaagtggcttacacggacatcaaagtgattggcaatggctcatttggggtcgtgtaccaggcacggctggcagagaccagggaactagtcgccatcaagaaggttctccaggacaagaggttcaagaaccgagagctgcagatcatgcgtaagctggaccactgcaatattgtgaggctgagatactttttctactccagtggcgagaagaaagacgagctttacctaaatctggtgctggaatatgtgcccgagacagtgtaccgggtggcccgccacttcaccaaggccaagttgaccatccctatcctctatgtcaaggtgtacatgtaccagctcttccgcagcttggcctacatccactcccagggcgtgtgtcaccgcgacatcaagccccagaacctgctggtggaccctgacactgctgtcctcaagctctgcgattttggcagtgcaaagcagttggtccgaggggagcccaatgtctcctacatctgttctcgctactaccgggccccagagctcatctttggagccactgattacacctcatccatcgatgtttggtcagctggctgtgtactggcagagctcctcttgggccagcccatcttccctggggacagtggggtggaccagctggtggagatcatcaaggtgctgggaacaccaacccgggaacaaatccgagagatgaaccccaactacacggagttcaagttccctcagattaaagctcacccctggacaaaggtgttcaaatctcgaacgccgccagaggccatcgcgctctgctctagcctgctggagtacaccccatcctcaaggctctccccactagaggcctgtgcgcacagcttctttgatgaactgcgatgtctgggaacccagctgcctaacaaccgcccacttccccctctcttcaacttcagtgctggtgaactctccatccaaccgtctctcaacgccattctcatccctcctcacttgaggtccccagcgggcactaccaccctcaccccgtcctcacaagctttaactgagactccgaccagctcagactggcagtcgaccgatgccacacctaccctcactaactcctcctgagggcctgtcctctgcccccaaggtctactccctcctcaccccaccctggagggccaggggagtggagagagctcctgatgtcttagtttccacagtaaggtttgcctgtgtacagacctccgttcaataaattattggcatgaaaacctg

SEQ ID NO: 357321 - DNA, 1749 bp, Homo sapiens
tccggaactgcagtatccacctggggcttaaaaaccacctgagactccatttcccggcgtgctttaaaaatcgctttacacctgcaatgcggtgagggcgtggcgacgactccatttcccggcttgcctcacggcccgagacccgcaggttcacgcgggccgactcaatttcccagagcgcaccgagctctgggaggcatacacagctaatagactgagtgagtggactccgtttcccagcgtgcatcaggctctctgcttcctaaagtgcttcagggctccccgtcgtacagtcggctgacagattaccctggactccatttcccgacgtacagcgtgacccgtcattcccgcccatcattcccgcggtctactctgaggcttttgtggacttcatttcccggcgtgccacgcggctctctgtgcgggccgagggcggtgacggcggcgcggacgacagccggactgcatctcccggcgtgccccgcggcgggcgctgggccggagccggagcccaagccagagcggcgcggcctggaagaggccagggcccgggggaggcggcggcagcggcggcggctggggcagcccgggcagcccgagccccgcagcctgggcctgtgctcggcgccatgagcggcggcgggccttcgggaggcggccctgggggctcgggcagggcgcggactagctcgttcgcggacccggcggcggaggcggaggaggcggcggcggccccggaggctcggcctccggcccaggcggcaccggcggcggaaaggcatctgtcggggccatgggtgggggcgtcggggcctcgagctccgggggtggacccggcggcagcggcggaggaggcagcggaggccccggcgcaggcactagcttcccgccgcccggggtgaagctgggccgtgacagcgggaaggtgaccacagtcgtagccactctaggccaaggcccagagcgctcccaagaagtggcttacacggacatcaaagtgattggcaatggctcatttggggtcgtgtaccaggcacggctggcagagaccagggaactagtcgccatcaagaaggttctccaggacaagaggttcaagaaccgagagctgcagatcatgcgtaagctggaccactgcaatattgtgaggctgagatactttttctactccagtggcgagaagaaagacgagctttacctaaatctggtgctggaatatgtgcccgagacagtgtaccgggtggcccgccacttcaccaaggccaagttgaccatccctatcctctatgtcaaggtgtacatgtaccagctcttccgcagcttggcctacatccactcccagggcgtgtgtcaccgcgacatcaagccccagaacctgctggtggaccctgacactgctgtcctcaagctctgcgattttggcagtgcaaagcagttggtccgaggggagcccaatgtctcctacatctgttctcgctactaccgggccccagagctcatctttggagccactgattacacctcatccatcgatgtttggtcagctggctgtgtactggcagagctcctcttgggccagcccatcttccctggggacagtggggtggaccagctggtggagatcatcaaggtgctgggaacaccaacccgggaacaaatccgagagatgaaccccaactacacggagttcaagttccctcagattaaagctcacccctggacaaaggtggggcagggctaggggct

SEQ ID NO: 357322 - DNA, 1420 bp, Homo sapiens
tccggaactgcagtatccacctggggcttaaaaaccacctgagactccatttcccggcgtgctttaaaaatcgctttacacctgcaatgcggtgagggcgtggcgacgactccatttcccggcttgcctcacggcccgagacccgcaggttcacgcgggccgactcaatttcccagagcgcaccgagctctgggaggcatacacagctaatagactgagtgagtggactccgtttcccagcgtgcatcaggctctctgcttcctaaagtgcttcagggctccccgtcgtacagtcggctgacagattaccctggactccatttcccgacgtacagcgtgacccgtcattcccgcccatcattcccgcggtctactctgaggcttttgtggacttcatttcccggcgtgccacgcggctctctgtgcgggccgagggcggtgacggcggcgcggacgacagccggactgcatctcccggcgtgccccgcggcgggcgctgggccggagccggagcccaagccagagcggcgcggcctggaagaggccagggcccgggggaggcggcggcagcggcggcggctggggcagcccgggcagcccgagccccgcagcctgggcctgtgctcggcgccatgagcggcggcgggccttcgggaggcggccctgggggctcgggcagggcgcggactagctcgttcgcggacccggcggcggaggcggaggaggcggcggcggccccggaggctcggcctccggcccaggcggcaccggcggcggaaaggcatctgtcggggccatgggtgggggcgtcggggcctcgagctccgggggtggacccggcggcagcggcggaggaggcagcggaggccccggcgcaggcactagcttcccgccgcccggggtgaagctgggccgtgacagcgggaaggtgaccacagtcgtagccactctaggccaaggcccagagcgctcccaagaagtggcttacacggacatcaaagtgattggcaatggctcatttggggtcgtgtaccaggcacggctggcagagaccagggaactagtcgccatcaagaaggttctccaggacaagaggttcaagaaccgagagctgcagatcatgcgtaagctggaccactgcaatattgtgaggctgagatactttttctactccagtggcgagaagaaagacgagctttacctaaatctggtgctggaatatgtgcccgagacagtgtaccgggtggcccgccacttcaccaaggccaagttgaccatccctatcctctatgtcaggtgtacatgtaccagctcttccgcaactgtacggcgggcccgccgtaccagttgcgcatccaaactctacatttacaaaacgaattcagggtgaggaagtaaaaacaggtcatctattcacaaa

SEQ ID NO: 357323 - DNA, 369 bp, Homo sapiens
tcaagattccaatttttatggagggtcagcagggctcatatagtcccagacctgggctgcctgcttacccgatacaaactgacctctccttagtggttgggccttagtttcttcatttggaaggtgggggtgtgggaagcaaccagtcataacttgccgcaggcactgtggcagtgagataacaggagtatgccagtgtccagggcatctcaccctcatgagccctgcacccatccctcaggtgttcaaatctcgaacgccgccagaggccatcgcgctctgctctagcctgctggagtacaccccatcctcaaggctctccccactagaggcctgtgcgcacagcttctttgatgaactgcgatgtct

SEQ ID NO: 357324 - DNA, 674 bp, Homo sapiens
aagtaacatacaatggagctcccattcatctggcagcagactttacagtggaagactaacaggacaggagagagtgatgttacatatttaaagtgctgaaggcaaaaaaaaagaaaagtacaatatgcatgtttattagtctgaatataaattagtacctttaccattttccagacaatgctaagatctctgagcactttaaccccactcaaccctttttactttttgtgttagaaccatgcattataaacctacatatattattatgtatatgcatgttatatttaagaagacattagtatttatttatagtcaaaatgaatttagaaatacatctttatcctttctcttattctttgtccctttctcttattctttgttctgtactgtatttccatgtttctttttgaaattatttttattcttcctttagtatttcctttactgcaggtctgctgcgatatattttctcagttttgatggtctgaaatatctttattttgcctgtacttttgaataatattttcactgggtatagaattctaagtggacagttctgttttttccatattttaaaatgtcactgcatcaccatctggcttccattgttccattgagaaatcagctttcagtcttactatcaatcttttcatgctatcatgtctttctctcta

SEQ ID NO: 357325 - DNA, 354 bp, Homo sapiens
acaaacaaagtaacttggggttactttgtttattttgtgatatattttgttattccttgtgacatactgtatttccatgtttctttttgaaattatttttattcttcctttagtatttcctttactgcaggtctgctgcgatatattttctcagttttgatggtctgaaatatctttattttgcctgtacttttgaataatattttcactgggtatagaattctaagtggacagttctgttttttccatattttaaaatgtcactgcatcaccatctggcttccattgttccattgagaaatcagctttcagtcttactatcaatcttttcatgctatcatgtctttctctcta

SEQ ID NO: 357326 - DNA, 968 bp, Homo sapiens
  misc_feature (741)..(741): n is a, c, g, or t
  misc_feature (748)..(748): n is a, c, g, or t
  misc_feature (752)..(752): n is a, c, g, or t
gggtgactggctgtgactcaggacccagaggagtagagggagccaggcaggggtccctccacctcggggaagagctggatgggctcttcgggagctcagaaaggctaagccttgagggacggtgacgcagagccgcctgcctgcccgggcctctgcatacctgggatcggggtgaaggacctttgcctcctagaggcctgcctgagccggggctggtggttggaaggctgctgcggcggcccacggtgccccacagcaggaggtgcttcccaaggaccgtagatgcctctctagagcatgagctcaggcaagagtgcccgctacaaccgcttctccggggggcccagcaatcttcccaccccagacgtcaccacagggaccagaatggaaacgaccttcggacccgccttttcagccgtcaccaccatcacaaaagctgacgggaccagcacctacaagcagcactgcaggacaccctcctcctccagcacccttgcctactccccgcgggacgaggaggacagcatgccccccatcagcactccccgccgctccgactccgccatctctgtccgctccctgcactcagagtccagcatgtctctgcgctccacattctcactgcccgaggaggaggaggagccggagccactggtgtttgcggagcagccctcggtgaagctgtgctgtcagctctgctgcagcgtcttcaaagaccccgtgatcaccacgtgtgggacncgtctgnaganatggcctgaaccagacaacgtgtccggtggccaagcaaacgaccggcggtgacaaatcgagagccgagcactgggcacacgaacatgcggcaggcaggaagaaggggagacccaccagaggtgccgaggcgccaacacactaacggagacaaggatgacaagccgaggcaaaacaacaggaagaaggacgccggagcaacccaggacgacaaaaca

SEQ ID NO: 357327 - DNA, 512 bp, Homo sapiens
cccactgatacacaaataggcaggtacgaggctgggtggtgaataggcagaggcccccccatcagcactccccgccgctccgactccgccatctctgtccgctccctgcactcagagtccagcatgtctctgcgctccacattctcactgcccgaggaggaggaggagccggagccactggtgtttgcggagcagccctcggtgaagctgtgctgtcagctctgctgcagcgtcttcaaagaccccgtgatcaccacgtgtgggcacacgttctgtaggagatgcgccttgaagtcagagaagtgtcccgtggacaacgtcaaactgaccgtggtggtgaacaacatcgcggtggccgagcagatcggggagctcttcatccactgccggcacggctgccgggtagcgggcagcgggaagccccccatctttgaggtggacccccgagggtgccccttcaccatcaagctcagcgcccggaaggaccactgatgtgtgcatgattgtgacta

SEQ ID NO: 357328 - DNA, 3700 bp, Homo sapiens
gaggcagccgtccgggcccggagaggcggggaactacacgtcccggcgggcgcagcggcctggcgcttccggctcgcgcgtctagtccctttcccggccggcggccgagggggcatcatgaagcgggctggcggcgctgccgctcccgggcggccgcgggcgggaggtgcttcccaaggaccgtagatgcctctctagagcatgagctcaggcaagagtgcccgctacaaccgcttctccggggggcccagcaatcttcccaccccagacgtcaccacagggaccagaatggaaacgaccttcggacccgccttttcagccgtcaccaccatcacaaaagctgacgggaccagcacctacaagcagcactgcaggacaccctcctcctccagcacccttgcctactccccgcgggacgaggaggacagcatgccccccatcagcactccccgccgctccgactccgccatctctgtccgctccctgcactcagagtccagcatgtctctgcgctccacattctcactgcccgaggaggaggaggagccggagccactggtgtttgcggagcagccctcggtgaagctgtgctgtcagctctgctgcagcgtcttcaaagaccccgtgatcaccacgtgtgggcacacgttctgtaggagatgcgccttgaagtcagagaagtgtcccgtggacaacgtcaaactgaccgtggtggtgaacaacatcgcggtggccgagcagatcggggagctcttcatccactgccggcacggctgccgggtagcgggcagcgggaagccccccatctttgaggtggacccccgagggtgccccttcaccatcaagctcagcgcccggaaggaccacgagggcagctgtgactacaggcctgtgcggtgtcccaacaaccccagctgccccccgctgctcaggatgaacctggaggcccacctcaaggagtgcgagcacatcaaatgcccccactccaagtacgggtgcacgttcatcgggaaccaggacacttacgagacccacctggagacttgccgcttcgagggcctgaaggagtttctgcagcagacggatgaccgcttccacgagatgcacgtggctctggcccagaaggaccaggagatcgccttcctgcgctccatgctgggaaagctctcggagaagatcgaccagctagagaagagcctggagctcaagtttgacgtcctggacgaaaaccagagcaagctcagcgaggacctcatggagttccggcgggacgcatccatgttaaatgacgagctgtcccacatcaacgcgcggctgaacatgggcatcctaggctcctacgaccctcagcagatcttcaagtgcaaagggacctttgtgggccaccagggccctgtgtggtgtctctgcgtctactccatgggtgacctgctcttcagtggctcctctgacaagaccatcaaggtgtgggacacatgtaccacctacaagtgtcagaagacactggagggccatgatggcatcgtgctggctctctgcatccaggggtgcaaactctacagcggctctgcagactgcaccatcattgtgtgggacatccagaacctgcagaaggtgaacaccatccgggcccatgacaacccggtgtgcacgctggtctcctcacacaacgtgctcttcagcggctccctgaaggccatcaaggtctgggacatcgtgggcactgagctgaagttgaagaaggagctcacaggcctcaaccactgggtgcgggccctggtggctgcccagagctacctgtacagcggctcctaccagacaatcaagatctgggacatccgaacccttgactgcatccacgtcctgcagacgtctggtggcagcgtctactccattgctgtgacaaatcaccacattgtctgtggcacctacgagaacctcatccacgtgtgggacattgagtccaaggagcaggtgcggaccctcacgggccacgtgggcaccgtgtatgccctggcggtcatctcgacgccagaccagaccaaagtcttcagtgcatcctacgaccggtccctcagggtctggagtatggacaacatgatctgcacgcagaccctgctgcgtcaccagggcagtgtcaccgcgctggctgtgtcccggggccgactcttctcaggggctgtggatagcactgtgaaggtttggacttgctaacaggatccaggccaggctgtggtttcccctgaaccagccctggacctttctgagccaggctggccacatggggtggtctcggggtttctgcctgccccgtgggcataggtggacaggctctggcagccgggcagtgccctccccgtcccatgctcggcgagcctccctctactcggcactgtccttgctgcccagcccctctctgggtgccaggtacgacgcttgccccggcccaccctccatccccaccctccatccccaccctagatggagcgagggcctttttactcaccttttctaccgtttttagactgtatgtagatttggttacctcctggttgaaataaatgctccacagactgtggctgtgagtggggacagctcctcgggacaagggggctgtgtgtggccttgaggttggtgtgcacaggcactggctgctgtgagtgggggggcatggggcagtttcctttggtggaccccaggacttcggcccactccggggcctcccctccctgctaggaggcaactcgtcacacccaagctgctggcctccagtcccatctcccccaacacatgtgcccccaaaaagtgagccaggcacctctgtttcctgctgtttattgacagccgacggcagcgccttgcccagacctcccctgcccacctgctggagcccagcctgtgccgccctctgaggagaggcctggggggacagctgggcacgtccactcgcagggaaacacggggtgagacagcaggaaggggccctgcacgccgggacgccacctccgccagccgcctccacccgccccacaccacaatcgctggttttcggcattttttaaattttttttttaagaaacgtcaaagttgtgcccaacactgtggatcagcaaacacgatagaggagaccagtcagtacttcttggagggggcaggaggagagaggaaaagggagggcgagaatgaccacacaacacagccttggaccatgagcagaagcgtccgtgggaactccactggggtggatgggctgcctgcacagcccctggagagggggccaggcacaccctcagaggagctgcaagcccgtggcctggcctgctacatgccctgcttccacgtggctgccacgctgacacacccacattcaccaaacccacccgcgccctgggacgcagccacgccaggaggaggacacggccgccgagagcaaggcacaacctcgagttcttggggcgcagagaacttaggagagaagcacggaggagcccccggcagagcacccgcccccgggccccagccttccacctgtgctagcagcctggggcctccactctggccggaggaaggaccgcaggcagacagcctgggcctctaacagcttttgtccggagctagacttcgtgtcctttcagttggtaaatggttttctatagaatcaataatatttctttctttaaatatatatttgttaaagtta

SEQ ID NO: 357329 - DNA, 3507 bp, Homo sapiens
aatatttttaatgtttaatagttaagacccgggagcaatttttctgtgaaagggccacccatcttcccaccccaaacttcaccacagggaccagaatggaaacgaccttcggacccgccttttcagccgtcaccaccatcacaaaagctgacgggaccagcacctacaagcagcactgcaggacaccctcctcctccagcacccttgcctactccccgcgggacgaggaggacagcatgccccccatcagcactccccgccgctccgactccgccatctctgtccgctccctgcactcagagtccagcatgtctctgcgctccacattctcactgcccgaggaggaggaggagccggagccactggtgtttgcggagcagccctcggtgaagctgtgctgtcagctctgctgcagcgtcttcaaagaccccgtgatcaccacgtgtgggcacacgttctgtaggagatgcgccttgaagtcagagaagtgtcccgtggacaacgtcaaactgaccgtggtggtgaacaacatcgcggtggccgagcagatcggggagctcttcatccactgccggcacggctgccgggtagcgggcagcgggaagccccccatctttgaggtggacccccgagggtgccccttcaccatcaagctcagcgcccggaaggaccacgagggcagctgtgactacaggcctgtgcggtgtcccaacaaccccagctgccccccgctgctcaggatgaacctggaggcccacctcaaggagtgcgagcacatcaaatgcccccactccaagtacgggtgcacgttcatcgggaaccaggacacttacgagacccacctggagacttgccgcttcgagggcctgaaggagtttctgcagcagacggatgaccgcttccacgagatgcacgtggctctggcccagaaggaccaggagatcgccttcctgcgctccatgctgggaaagctctcggagaagatcgaccagctagagaagagcctggagctcaagtttgacgtcctggacgaaaaccagagcaagctcagcgaggacctcatggagttccggcgggacgcatccatgttaaatgacgagctgtcccacatcaacgcgcggctgaacatgggcatcctaggctcctacgaccctcagcagatcttcaagtgcaaagggacctttgtgggccaccagggccctgtgtggtgtctctgcgtctactccatgggtgacctgctcttcagtggctcctctgacaagaccatcaaggtgtgggacacatgtaccacctacaagtgtcagaagacactggagggccatgatggcatcgtgctggctctctgcatccaggggtgcaaactctacagcggctctgcagactgcaccatcattgtgtgggacatccagaacctgcagaaggtgaacaccatccgggcccatgacaacccggtgtgcacgctggtctcctcacacaacgtgctcttcagcggctccctgaaggccatcaaggtctgggacatcgtgggcactgagctgaagttgaagaaggagctcacaggcctcaaccactgggtgcgggccctggtggctgcccagagctacctgtacagcggctcctaccagacaatcaagatctgggacatccgaacccttgactgcatccacgtcctgcagacgtctggtggcagcgtctactccattgctgtgacaaatcaccacattgtctgtggcacctacgagaacctcatccacgtgtgggacattgagtccaaggagcaggtgcggaccctcacgggccacgtgggcaccgtgtatgccctggcggtcatctcgacgccagaccagaccaaagtcttcagtgcatcctacgaccggtccctcagggtctggagtatggacaacatgatctgcacgcagaccctgctgcgtcaccagggcagtgtcaccgcgctggctgtgtcccggggccgactcttctcaggggctgtggatagcactgtgaaggtttggacttgctaacaggatccaggccaggctgtggtttcccctgaaccagccctggacctttctgagccaggctggccacatggggtggtctcggggtttctgcctgccccgtgggcataggtggacaggctctggcagccgggcagtgccctccccgtcccatgctcggcgagcctccctctactcggcactgtccttgctgcccagcccctctctgggtgccaggtacgacgcttgccccggcccaccctccatccccaccctccatccccaccctagatggagcgagggcctttttactcaccttttctaccgtttttagactgtatgtagatttggttacctcctggttgaaataaatgctccacagactgtggctgtgagtggggacagctcctcgggacaagggggctgtgtgtggccttgaggttggtgtgcacaggcactggctgctgtgagtgggggggcatggggcagtttcctttggtggaccccaggacttcggcccactccggggcctcccctccctgctaggaggcaactcgtcacacccaagctgctggcctccagtcccatctcccccaacacatgtgcccccaaaaagtgagccaggcacctctgtttcctgctgtttattgacagccgacggcagcgccttgcccagacctcccctgcccacctgctggagcccagcctgtgccgccctctgaggagaggcctggggggacagctgggcacgtccactcgcagggaaacacggggtgagacagcaggaaggggccctgcacgccgggacgccacctccgccagccgcctccacccgccccacaccacaatcgctggttttcggcattttttaaattttttttttaagaaacgtcaaagttgtgcccaacactgtggatcagcaaacacgatagaggagaccagtcagtacttcttggagggggcaggaggagagaggaaaagggagggcgagaatgaccacacaacacagccttggaccatgagcagaagcgtccgtgggaactccactggggtggatgggctgcctgcacagcccctggagagggggccaggcacaccctcagaggagctgcaagcccgtggcctggcctgctacatgccctgcttccacgtggctgccacgctgacacacccacattcaccaaacccacccgcgccctgggacgcagccacgccaggaggaggacacggccgccgagagcaaggcacaacctcgagttcttggggcgcagagaacttaggagagaagcacggaggagcccccggcagagcacccgcccccgggccccagccttccacctgtgctagcagcctggggcctccactctggccggaggaaggaccgcaggcagacagcctgggcctctaacagcttttgtccggagctagacttcgtgtcctttcagttggtaaatggttttctatagaatcaataatatttctttctttaaatatatatttgttaaagtta

SEQ ID NO: 357330 - DNA, 4090 bp, Homo sapiens
gaggcagccgtccgggcccggagaggcggggaactacacgtcccggcgggcgcagcggcctggcgcttccggctcgcgcgtctagtccctttcccggccggcggccgagggggcatcatgaagcgggctggcggcgctgccgctcccgggcggccgcgggcgggaggtgcttcccaaggaccgtagatgcctctctagagcatgagctcaggcaagagtgcccgctacaaccgcttctccggggggcccagcaatcttcccaccccagacgtcaccacagggaccagaatggaaacgaccttcggacccgccttttcagccgtcaccaccatcacaaaagctgacgggaccagcacctacaagcagcactgcaggacaccctcctcctccagcacccttgcctactccccgcgggacgaggaggacagcatgccccccatcagcactccccgccgctccgactccgccatctctgtccgctccctgcactcagagtccagcatgtctctgcgctccacattctcactgcccgaggaggaggaggagccggagccactggtgtttgcggagcagccctcggtgaagctgtgctgtcagctctgctgcagcgtcttcaaagaccccgtgatcaccacgtgtgggcacacgttctgtaggagatgcgccttgaagtcagagaagtgtcccgtggacaacgtcaaactgaccgtggtggtgaacaacatcgcggtggccgagcagatcggggagctcttcatccactgccggcacggctgccgggtagcgggcagcgggaagccccccatctttgaggtggacccccgagggtgccccttcaccatcaagctcagcgcccggaaggaccacgagggcagctgtgactacaggcctgtgcggtgtcccaacaaccccagctgccccccgctgctcaggatgaacctggaggcccacctcaaggagtgcgagcacatcaaatgcccccactccaagtacgggtgcacgttcatcgggaaccaggacacttacgagacccacctggagacttgccgcttcgagggcctgaaggagtttctgcagcagacggatgaccgcttccacgagatgcacgtggctctggcccagaaggaccaggagatcgccttcctgcgctccatgctgggaaagctctcggagaagatcgaccagctagagaagagcctggagctcaagtttgacgtcctggacgaaaaccagagcaagctcagcgaggacctcatggagttccggcgggacgcatccatgttaaatgacgagctgtcccacatcaacgcgcggctgaacatgggcatcctaggctcctacgaccctcagcagatcttcaagtgcaaagggacctttgtgggccaccagggccctgtgtggtgtctctgcgtctactccatgggtgacctgctcttcagtggctcctctgacaagaccatcaaggtgtgggacacatgtaccacctacaagtgtcagaagacactggagggccatgatggcatcgtgctggctctctgcatccaggggtgcaaactctacagcggctctgcagactgcaccatcattgtgtgggacatccagaacctgcagaaggtgaacaccatccgggcccatgacaacccggtgtgcacgctggtctcctcacacaacgtgctcttcagcggctccctgaaggccatcaaggtctgggacatcgtgggcactgagctgaagttgaagaaggagctcacaggcctcaaccactgggtgcgggccctggtggctgcccagagctacctgtacagcggctcctaccagacaatcaagatctgggacatccgaacccttgactgcatccacgtcctgcagacgtctggtggcagcgtctactccattgctgtgacaaatcaccacattgtctgtggcacctacgagaacctcatccacgtgtgggacattgagtccaaggagcaggtgcggaccctcacgggccacgtgggcaccgtgtatgccctggcggtcatctcgacgccagaccagaccaaagtcttcagtgcatcctacgaccggtccctcagggtctggagtatggacaacatgatctgcacgcagaccctgctgcgtcaccagggcagtgtcaccgcgctggctgtgtcccggggccgactcttctcaggggctgtggatagcactgtgaaggtttggacttgctaacaggatccaggccaggctgtggtttcccctgaaccagccctggacctttctgagccaggctggccacatggggtggtctcggggtttctgcctgccccgtgggcataggtggacaggctctggcagccgggcagtgccctccccgtcccatgctcggcgagcctccctctactcggcactgtccttgctgcccagcccctctctgggtgccaggtacgacgcttgccccggcccaccctccatccccaccctccatccccaccctagatggagcgagggcctttttactcaccttttctaccgtttttagactgtatgtagatttggttacctcctggttgaaataaatgctccacagactgtggctgtgagtggggacagctcctcgggacaagggggctgtgtgtggccttgaggttggtgtgcacaggcactggctgctgtgagtgggggggcatggggcagtttcctttggtggaccccaggacttcggcccactccggggcctcccctccctgctaggaggcaactcgtcacacccaagctgctggcctccagtcccatctcccccaacacatgtgcccccaaaaagtgagccaggcacctctgtttcctgctgtttattgacagccgacggcagcgccttgcccagacctcccctgcccacctgctggagcccagcctgtgccgccctctgaggagaggcctggggggacagctgggcacgtccactcgcagggaaacacggggtgagacagcaggaaggggccctgcacgccgggacgccacctccgccagccgcctccacccgccccacaccacaatcgctggttttcggcattttttaaattttttttttaagaaacgtcaaagttgtgcccaacactgtggatcagcaaacacgatagaggagaccagtcagtacttcttggagggggcaggaggagagaggaaaagggagggcgagaatgaccacacaacacagccttggaccatgagcagaagcgtccgtgggaactccactggggtggatgggctgcctgcacagcccctggagagggggccaggcacaccctcagaggagctgcaagcccgtggcctggcctgctacatgccctgcttccacgtggctgccacgctgacacacccacattcaccaaacccacccgcgccctgggacgcagccacgccaggaggaggacacggccgccgagagcaaggcacaacctcgagttcttggggcgcagagaacttaggagagaagcacggaggagcccccggcagagcacccgcccccgggccccagccttccacctgtgctagcagcctggggcctccactctggccggaggaaggaccgcaggcagacagcctgggcctctaacagcttttgtccggagctagacttcgtgtcctttcagttggtaaatggttttctatagaatcaataatatttctttctttaaatatatatttgttaaagttatacctttttgtttctctggggaaatccgcctcagctcattcccaataaattaatactcttgatagcttatattctgggggtgcggtggggcaggggggccctgaccttggtcccctgtcccttgtgctgcgcccgagcggctggccgggcgtcccgatgggcagttctgtgctgggcccgggcctgtgcgctgccccatccctggtcccggggcgccctcccctcccgcgcgggcaggaggcccagcaggtattgcacggggagcagcaggtggggaggacccgcgggcgcagggtctgcctagagcccttggagcccccggccaggcggtccccggtgggcgccccggcccgggtccaggggccggagttgtgcttctgcagggccctg

SEQ ID NO: 357331 - DNA, 2577 bp, Homo sapiens
accaaagaacacagaaaactacggctaggtacgaggtctgggtggtgaagaagatcgaccagctagagaagagcctggagctcaagtttgacgtcctggacgaaaaccagagcaagctcagcgaggacctcatggagttccggcgggacgcatccatgttaaatgacgagctgtcccacatcaacgcgcggctgaacatgggcatcctaggctcctacgaccctcagcagatcttcaagtgcaaagggacctttgtgggccaccagggccctgtgtggtgtctctgcgtctactccatgggtgacctgctcttcagtggctcctctgacaagaccatcaaggtgtgggacacatgtaccacctacaagtgtcagaagacactggagggccatgatggcatcgtgctggctctctgcatccaggggtgcaaactctacagcggctctgcagactgcaccatcattgtgtgggacatccagaacctgcagaaggtgaacaccatccgggcccatgacaacccggtgtgcacgctggtctcctcacacaacgtgctcttcagcggctccctgaaggccatcaaggtctgggacatcgtgggcactgagctgaagttgaagaaggagctcacaggcctcaaccactgggtgcgggccctggtggctgcccagagctacctgtacagcggctcctaccagacaatcaagatctgggacatccgaacccttgactgcatccacgtcctgcagacgtctggtggcagcgtctactccattgctgtgacaaatcaccacattgtctgtggcacctacgagaacctcatccacgtgtgggacattgagtccaaggagcaggtgcggaccctcacgggccacgtgggcaccgtgtatgccctggcggtcatctcgacgccagaccagaccaaagtcttcagtgcatcctacgaccggtccctcagggtctggagtatggacaacatgatctgcacgcagaccctgctgcgtcaccagggcagtgtcaccgcgctggctgtgtcccggggccgactcttctcaggggctgtggatagcactgtgaaggtttggacttgctaacaggatccaggccaggctgtggtttcccctgaaccagccctggacctttctgagccaggctggccacatggggtggtctcggggtttctgcctgccccgtgggcataggtggacaggctctggcagccgggcagtgccctccccgtcccatgctcggcgagcctccctctactcggcactgtccttgctgcccagcccctctctgggtgccaggtacgacgcttgccccggcccaccctccatccccaccctccatccccaccctagatggagcgagggcctttttactcaccttttctaccgtttttagactgtatgtagatttggttacctcctggttgaaataaatgctccacagactgtggctgtgagtggggacagctcctcgggacaagggggctgtgtgtggccttgaggttggtgtgcacaggcactggctgctgtgagtgggggggcatggggcagtttcctttggtggaccccaggacttcggcccactccggggcctcccctccctgctaggaggcaactcgtcacacccaagctgctggcctccagtcccatctcccccaacacatgtgcccccaaaaagtgagccaggcacctctgtttcctgctgtttattgacagccgacggcagcgccttgcccagacctcccctgcccacctgctggagcccagcctgtgccgccctctgaggagaggcctggggggacagctgggcacgtccactcgcagggaaacacggggtgagacagcaggaaggggccctgcacgccgggacgccacctccgccagccgcctccacccgccccacaccacaatcgctggttttcggcattttttaaattttttttttaagaaacgtcaaagttgtgcccaacactgtggatcagcaaacacgatagaggagaccagtcagtacttcttggagggggcaggaggagagaggaaaagggagggcgagaatgaccacacaacacagccttggaccatgagcagaagcgtccgtgggaactccactggggtggatgggctgcctgcacagcccctggagagggggccaggcacaccctcagaggagctgcaagcccgtggcctggcctgctacatgccctgcttccacgtggctgccacgctgacacacccacattcaccaaacccacccgcgccctgggacgcagccacgccaggaggaggacacggccgccgagagcaaggcacaacctcgagttcttggggcgcagagaacttaggagagaagcacggaggagcccccggcagagcacccgcccccgggccccagccttccacctgtgctagcagcctggggcctccactctggccggaggaaggaccgcaggcagacagcctgggcctctaacagcttttgtccggagctagacttcgtgtcctttcagttggtaaatggttttctatagaatcaataatatttctttctttaaatatatatttgttaaagtta

SEQ ID NO: 357332 - DNA, 2026 bp, Homo sapiens
gaggcagccgtccgggcccggagaggcggggaactacacgtcccggcgggcgcagcggcctggcgcttccggctcgcgcgtctagtccctttcccggccggcggccgagggggcatcatgaagcgggctggcggcgctgccgctcccgggcggccgcgggcgggaggtgcttcccaaggaccgtagatgcctctctagagcatgagctcaggcaagagtgcccgctacaaccgcttctccggggggcccagcaatcttcccaccccagacgtcaccacagggaccagaatggaaacgaccttcggacccgccttttcagccgtcaccaccatcacaaaagctgacgggaccagcacctacaagcagcactgcaggacaccctcctcctccagcacccttgcctactccccgcgggacgaggaggacagcatgccccccatcagcactccccgccgctccgactccgccatctctgtccgctccctgcactcagagtccagcatgtctctgcgctccacattctcactgcccgaggaggaggaggagccggagccactggtgtttgcggagcagccctcggtgaagctgtgctgtcagctctgctgcagcgtcttcaaagaccccgtgatcaccacgtgtgggcacacgttctgtaggagatgcgccttgaagtcagagaagtgtcccgtggacaacgtcaaactgaccgtggtggtgaacaacatcgcggtggccgagcagatcggggagctcttcatccactgccggcacggctgccgggtagcgggcagcgggaagccccccatctttgaggtggacccccgagggtgccccttcaccatcaagctcagcgcccggaaggaccacgagggcagctgtgactacaggcctgtgcggtgtcccaacaaccccagctgccccccgctgctcaggatgaacctggaggcccacctcaaggagtgcgagcacatcaaatgcccccactccaagtacgggtgcacgttcatcgggaaccaggacacttacgagacccacctggagacttgccgcttcgagggcctgaaggagtttctgcagcagacggatgaccgcttccacgagatgcacgtggctctggcccagaaggaccaggagatcgccttcctgcgctccatgctgggaaagctctcggagaagatcgaccagctagagaagagcctggagctcaagtttgacgtcctggacgaaaaccagagcaagctcagcgaggacctcatggagttccggcgggacgcatccatgttaaatgacgagctgtcccacatcaacgcgcggctgaacatgggcatcctaggctcctacgaccctcagcagatcttcaagtgcaaagggacctttgtgggccaccagggccctgtgtggtgtctctgcgtctactccatgggtgacctgctcttcagtggctcctctgacaagaccatcaaggtgtgggacacatgtaccacctacaagtgtcagaagacactggagggccatgatggcatcgtgctggctctctgcatccaggggtgcaaactctacagcggctctgcagactgcaccatcattgtgtgggacatccagaacctgcagaaggtgaacaccatccgggcccatgacaacccggtgtgcacgctggtctcctcacacaacgtgctcttcagcggctccctgaaggccatcaaggtctgggacatcgtgggcactgagctgaagttgaagaaggagctcacaggcctcaaccactgggtgcgggccctggtggctgcccagagctacctgtacagcggctcctaccagacaatcaagatctggaacatccgacttgatgtcacgtcgaaagttgtgggcgctcatcatgtgtgcaaccccttgtgggctagaacctccggtgagggacaggacgggacccggcaggacggttcggggacagaaacaatgagtaacgccggtgggataacgacaagaacgggggccaggaagaaacgcacaggggggggacacacaa

SEQ ID NO: 357333 - DNA, 1892 bp, Homo sapiens
gaggcagccgtccgggcccggagaggcggggaactacacgtcccggcgggcgcagcggcctggcgcttccggctcgcgcgtctagtccctttcccggccggcggccgagggggcatcatgaagcgggctggcggcgctgccgctcccgggcggccgcgggcgggaggtgcttcccaaggaccgtagatgcctctctagagcatgagctcaggcaagagtgcccgctacaaccgcttctccggggggcccagcaatcttcccaccccagacgtcaccacagggaccagaatggaaacgaccttcggacccgccttttcagccgtcaccaccatcacaaaagctgacgggaccagcacctacaagcagcactgcaggacaccctcctcctccagcacccttgcctactccccgcgggacgaggaggacagcatgccccccatcagcactccccgccgctccgactccgccatctctgtccgctccctgcactcagagtccagcatgtctctgcgctccacattctcactgcccgaggaggaggaggagccggagccactggtgtttgcggagcagccctcggtgaagctgtgctgtcagctctgctgcagcgtcttcaaagaccccgtgatcaccacgtgtgggcacacgttctgtaggagatgcgccttgaagtcagagaagtgtcccgtggacaacgtcaaactgaccgtggtggtgaacaacatcgcggtggccgagcagatcggggagctcttcatccactgccggcacggctgccgggtagcgggcagcgggaagccccccatctttgaggtggacccccgagggtgccccttcaccatcaagctcagcgcccggaaggaccacgagggcagctgtgactacaggcctgtgcggtgtcccaacaaccccagctgccccccgctgctcaggatgaacctggaggcccacctcaaggagtgcgagcacatcaaatgcccccactccaagtacgggtgcacgttcatcgggaaccaggacacttacgagacccacctggagacttgccgcttcgagggcctgaaggagtttctgcagcagacggatgaccgcttccacgagatgcacgtggctctggcccagaaggaccaggagatcgccttcctgcgctccatgctgggaaagctctcggagaagatcgaccagctagagaagagcctggagctcaagtttgacgtcctggacgaaaaccagagcaagctcagcgaggacctcatggagttccggcgggacgcatccatgttaaatgacgagctgtcccacatcaacgcgcggctgaacatgggcatcctaggctcctacgaccctcagcagatcttcaagtgcaaagggacctttgtgggccaccagggccctgtgtggtgtctctgcgtctactccatgggtgactgcaagcccgtggcctggcctgctacatgccctgcttccacgtggctgccacgctgacacacccacattcaccaaacccacccgcgccctgggacgcagccacgccaggaggaggacacggccgccgagagcaaggcacaacctcgagttcttggggcgcagagaacttaggagagaagcacggaggagcccccggcagagcacccgcccccgggccccagccttccacctgtgctagcagcctggggcctccactctggccggaggaaggaccgcaggcagacagcctgggcctctaacagcttttgtccggagctagacttcgtgtcctttcagttggtaaatggttttctatagaatcaataatatttctttctttaaatatatatttgttaaagttatacctttttgtttctctggggaaatccgcctcagctcattcccaataaattaatactcttgat

SEQ ID NO: 357334 - DNA, 733 bp, Homo sapiens
gaggcagccgtccgggcccggagaggcggggaactacacgtcccggcgggcgcagcggcctggcgcttccggctcgcgcgtctagtccctttcccggccggcggccgagggggcatcatgaagcgggctggcggcgctgccgctcccgggcggccgcgggcgggaggtgcttcccaaggaccgtagatgcctctctagagcatgagctcaggcaagagtgcccgctacaaccgcttctccggggggcccagcaatcttcccaccccagacgtcaccacagggaccagaatggaaacgaccttcggacccgccttttcagccgtcaccaccatcacaaaagctgacgggaccagcacctacaagcagcactgcaggacaccctcctcctccagcacccttgcctactccccgcgggacgaggaggacagcatgccccccatcagcactccccgccgctccgactccgccatctctgtccgctccctgcactcagaagaacttaggagagaagcacggaggagcccccggcagagcacccgcccccgggccccagccttccacctgtgctagcagcctggggcctccactctggccggaggaaggaccgcaggcagacagcctgggcctctaacagcttttgtccggagctagacttcgtgtcctttcagttggtaaatggttttctatagaatcaataatatttctttctttaaatatatatttgttaaagtta

SEQ ID NO: 357335 - DNA, 444 bp, Homo sapiens
gaggcagccgtccgggcccggagaggcggggaactacacgtcccggcgggcgcagcggcctggcgcttccggctcgcgcgtctagtccctttcccggccggcggccgagggggcatcatgaagcgggctggcggcgctgccgctcccgggcggccgcgggcgggaggtgcttcccaaggaccgtagatgcctctctagagcatgagctcaggcaagagtgcccgctacaaccgcttctccggggggcccagcaatcttcccaccccagacgtcaccacaggggtaagggtgtgcccctctgcaagcccaacatccccaggacccccagcatgccccagggatctggtgttgcctgcagagctcccagcgcagtcccgtcccgagctggggtctcaggggagctcggtgggggggggtgtggtgtgtgtgtgtgtgtgtgtgcgc

SEQ ID NO: 357336 - DNA, 260 bp, Homo sapiens
gtcgcatggttaagtgtgtgagtgctgcgtggcctggcctggtcgcgtgttaggcatgtgagtgggctccacatgtgcacgtcctccttgtgtcccggaatgaggccaggtctcctccgtcctccctctagaccagaatggaaacgaccttcggacccgccttttcagccgtcaccaccatcacaaaaggtgagcccttaagccaaggccagcccaggctgggaataaccggggcacccccatgcccaccctgctaagga

SEQ ID NO: 357337 - DNA, 3711 bp, Homo sapiens
gaggcagccgtccgggcccggagaggcggggaactacacgtcccggcgggcgcagcggcctggcgcttccggctcgcgcgtctagtccctttcccggccggcggccgagggggcatcatgaagcgggctggcggcgctgccgctcccgggcggccgcgggcgggaggtgcttcccaaggaccgtagatgcctctctagagcatgagctcaggcaagagtgcccgctacaaccgcttctccggggggcccagcaatcttcccaccccagacgtcaccacagggaccagaatggaaacgaccttcggacccgccttttcagccgtcaccaccatcacaaaagctgacgggaccagcacctacaagcagcactgcaggacaccccccccatcagcactccccgccgctccgactccgccatctctgtccgctccctgcactcagagtccagcatgtctctgcgctccacattctcactgcccgaggaggaggaggagccggagccactggtgtttgcggagcagccctcggtgaagctgtgctgtcagctctgctgcagcgtcttcaaagaccccgtgatcaccacgtgtgggcacacgttctgtaggagatgcgccttgaagtcagagaagtgtcccgtggacaacgtcaaactgaccgtggtggtgaacaacatcgcggtggccgagcagatcggggagctcttcatccactgccggcacggctgccgggtagcgggcagcgggaagccccccatctttgaggtggacccccgagggtgccccttcaccatcaagctcagcgcccggaaggaccacgagggcagctgtgactacaggcctgtgcggtgtcccaacaaccccagctgccccccgctgctcaggatgaacctggaggcccacctcaaggagtgcgagcacatcaaatgcccccactccaagtacgggtgcacgttcatcgggaaccaggacacttacgagacccacctggagacttgccgcttcgagggcctgaaggagtttctgcagcagacggatgaccgcttccacgagatgcacgtggctctggcccagaaggaccaggagatcgccttcctgcgctccatgctgggaaagctctcggagaagatcgaccagctagagaagagcctggagctcaagtttgacgtcctggacgaaaaccagagcaagctcagcgaggacctcatggagttccggcgggacgcatccatgttaaatgacgagctgtcccacatcaacgcgcggctgaacatgggcatcctaggctcctacgaccctcagcagatcttcaagtgcaaagggacctttgtgggccaccagggccctgtgtggtgtctctgcgtctactccatgggtgacctgctcttcagtggctcctctgacaagaccatcaaggtgtgggacacatgtaccacctacaagtgtcagaagacactggagggccatgatggcatcgtgctggctctctgcatccaggggtgcaaactctacagcggctctgcagactgcaccatcattgtgtgggacatccagaacctgcagaaggtgaacaccatccgggcccatgacaacccggtgtgcacgctggtctcctcacacaacgtgctcttcagcggctccctgaaggccatcaaggtctgggacatcgtgggcactgagctgaagttgaagaaggagctcacaggcctcaaccactgggtgcgggccctggtggctgcccagagctacctgtacagcggctcctaccagacaatcaagatctgggacatccgaacccttgactgcatccacgtcctgcagacgtctggtggcagcgtctactccattgctgtgacaaatcaccacattgtctgtggcacctacgagaacctcatccacgtgtgggacattgagtccaaggagcaggtgcggaccctcacgggccacgtgggcaccgtgtatgccctggcggtcatctcgacgccagaccagaccaaagtcttcagtgcatcctacgaccggtccctcagggtctggagtatggacaacatgatctgcacgcagaccctgctgcgtcaccagggcagtgtcaccgcgctggctgtgtcccggggccgactcttctcaggggctgtggatagcactgtgaaggtttggacttgctaacaggatccaggccaggctgtggtttcccctgaaccagccctggacctttctgagccaggctggccacatggggtggtctcggggtttctgcctgccccgtgggcataggtggacaggctctggcagccgggcagtgccctccccgtcccatgctcggcgagcctccctctactcggcactgtccttgctgcccagcccctctctgggtgccaggtacgacgcttgccccggcccaccctccatccccaccctccatccccaccctagatggagcgagggcctttttactcaccttttctaccgtttttagactgtatgtagatttggttacctcctggttgaaataaatgctccacagactgtggctgtgagtggggacagctcctcgggacaagggggctgtgtgtggccttgaggttggtgtgcacaggcactggctgctgtgagtgggggggcatggggcagtttcctttggtggaccccaggacttcggcccactccggggcctcccctccctgctaggaggcaactcgtcacacccaagctgctggcctccagtcccatctcccccaacacatgtgcccccaaaaagtgagccaggcacctctgtttcctgctgtttattgacagccgacggcagcgccttgcccagacctcccctgcccacctgctggagcccagcctgtgccgccctctgaggagaggcctggggggacagctgggcacgtccactcgcagggaaacacggggtgagacagcaggaaggggccctgcacgccgggacgccacctccgccagccgcctccacccgccccacaccacaatcgctggttttcggcattttttaaattttttttttaagaaacgtcaaagttgtgcccaacactgtggatcagcaaacacgatagaggagaccagtcagtacttcttggagggggcaggaggagagaggaaaagggagggcgagaatgaccacacaacacagccttggaccatgagcagaagcgtccgtgggaactccactggggtggatgggctgcctgcacagcccctggagagggggccaggcacaccctcagaggagctgcaagcccgtggcctggcctgctacatgccctgcttccacgtggctgccacgctgacacacccacattcaccaaacccacccgcgccctgggacgcagccacgccaggaggaggacacggccgccgagagcaaggcacaacctcgagttcttggggcgcagagaacttaggagagaagcacggaggagcccccggcagagcacccgcccccgggccccagccttccacctgtgctagcagcctggggcctccactctggccggaggaaggaccgcaggcagacagcctgggcctctaacagcttttgtccggagctagacttcgtgtcctttcagttggtaaatggttttctatagaatcaataatatttctttctttaaatatatatttgttaaagttatacctttttgtttctctggggaaatccgcctcagctcattcccaataaattaatactcttgat

SEQ ID NO: 357338 - DNA, 796 bp, Homo sapiens
gaggcagccgtccgggcccggagaggcggggaactacacgtcccggcgggcgcagcggcctggcgcttccggctcgcgcgtctagtccctttcccggccggcggccgagggggcatcatgaagcgggctggcggcgctgccgctcccgggcggccgcgggcgggaggtgcttcccaaggaccgtagatgcctctctagagcatgagctcaggcaagagtgcccgctacaaccgcttctccggggggcccagcaatcttcccaccccagacgtcaccacaggggtctcctccgtcctccctctagaccagaatggaaacgaccttcggacccgccttttcagccgtcaccaccatcacaaaagctgacgggaccagcacctacaagcagcactgcaggacaccctcctcctccagcacccttgcctactccccgcgggacgaggaggacagcatggtaggtccctacccccaggagcccgtgtgagcctcagcctccccccatcctccctcctgggggaaccaggtcccaggaggagttgacagtgagctggtgaggcacaggagaagaagagcacctgtggataccctgaggcctcggcagacatggcaagtctgtgagaaaggaggctcctgtggctggactgtgggtggcagggggcagccagtgagggcagctgggtcagagggcctggcccctgcaggccaggatgaggcatatttggctccatcttaagggaggtggaaaccacagaaagttcagtcaggaggatagcacaataaaatacatgctttgaaa

SEQ ID NO: 357339 - DNA, 3872 bp, Homo sapiens
catggttaagcgtgttagtgctgcgtggcctggcctggtcgcatggttaagcgtgtgagtgctgtgtggcgcagcctggtcgcatggttaaacgtgtgagtgctgcgtggcctggcctggtcgcatggtttagcgtgttagtgctgcgtggcctggcctggtcgcatggttaagcgtgtgagtgctgtgtggcgcagcctggtcgcatggttaagcgtgtgagtgctgcgtggcctggcctggtcgcatggttaagcgtgttagcgctgcgtgcgcggcctggtcgcatgattaagcgtgtgagtgctgcgtggcgtggcctggtcgcatggttaagtgtgtgagtgctgcgtggcctggcctggtcgcgtgttaggcatgtgagtgggctccacatgtgcacgtcctccttgtgtcccggaatgaggccaggtctcctccgtcctccctctagaccagaatggaaacgaccttcggacccgccttttcagccgtcaccaccatcacaaaagctgacgggaccagcacctacaagcagcactgcaggacaccctcctcctccagcacccttgcctactccccgcgggacgaggaggacagcatgccccccatcagcactccccgccgctccgactccgccatctctgtccgctccctgcactcagagtccagcatgtctctgcgctccacattctcactgcccgaggaggaggaggagccggagccactggtgtttgcggagcagccctcggtgaagctgtgctgtcagctctgctgcagcgtcttcaaagaccccgtgatcaccacgtgtgggcacacgttctgtaggagatgcgccttgaagtcagagaagtgtcccgtggacaacgtcaaactgaccgtggtggtgaacaacatcgcggtggccgagcagatcggggagctcttcatccactgccggcacggctgccgggtagcgggcagcgggaagccccccatctttgaggtggacccccgagggtgccccttcaccatcaagctcagcgcccggaaggaccacgagggcagctgtgactacaggcctgtgcggtgtcccaacaaccccagctgccccccgctgctcaggatgaacctggaggcccacctcaaggagtgcgagcacatcaaatgcccccactccaagtacgggtgcacgttcatcgggaaccaggacacttacgagacccacctggagacttgccgcttcgagggcctgaaggagtttctgcagcagacggatgaccgcttccacgagatgcacgtggctctggcccagaaggaccaggagatcgccttcctgcgctccatgctgggaaagctctcggagaagatcgaccagctagagaagagcctggagctcaagtttgacgtcctggacgaaaaccagagcaagctcagcgaggacctcatggagttccggcgggacgcatccatgttaaatgacgagctgtcccacatcaacgcgcggctgaacatgggcatcctaggctcctacgaccctcagcagatcttcaagtgcaaagggacctttgtgggccaccagggccctgtgtggtgtctctgcgtctactccatgggtgacctgctcttcagtggctcctctgacaagaccatcaaggtgtgggacacatgtaccacctacaagtgtcagaagacactggagggccatgatggcatcgtgctggctctctgcatccaggggtgcaaactctacagcggctctgcagactgcaccatcattgtgtgggacatccagaacctgcagaaggtgaacaccatccgggcccatgacaacccggtgtgcacgctggtctcctcacacaacgtgctcttcagcggctccctgaaggccatcaaggtctgggacatcgtgggcactgagctgaagttgaagaaggagctcacaggcctcaaccactgggtgcgggccctggtggctgcccagagctacctgtacagcggctcctaccagacaatcaagatctgggacatccgaacccttgactgcatccacgtcctgcagacgtctggtggcagcgtctactccattgctgtgacaaatcaccacattgtctgtggcacctacgagaacctcatccacgtgtgggacattgagtccaaggagcaggtgcggaccctcacgggccacgtgggcaccgtgtatgccctggcggtcatctcgacgccagaccagaccaaagtcttcagtgcatcctacgaccggtccctcagggtctggagtatggacaacatgatctgcacgcagaccctgctgcgtcaccagggcagtgtcaccgcgctggctgtgtcccggggccgactcttctcaggggctgtggatagcactgtgaaggtttggacttgctaacaggatccaggccaggctgtggtttcccctgaaccagccctggacctttctgagccaggctggccacatggggtggtctcggggtttctgcctgccccgtgggcataggtggacaggctctggcagccgggcagtgccctccccgtcccatgctcggcgagcctccctctactcggcactgtccttgctgcccagcccctctctgggtgccaggtacgacgcttgccccggcccaccctccatccccaccctccatccccaccctagatggagcgagggcctttttactcaccttttctaccgtttttagactgtatgtagatttggttacctcctggttgaaataaatgctccacagactgtggctgtgagtggggacagctcctcgggacaagggggctgtgtgtggccttgaggttggtgtgcacaggcactggctgctgtgagtgggggggcatggggcagtttcctttggtggaccccaggacttcggcccactccggggcctcccctccctgctaggaggcaactcgtcacacccaagctgctggcctccagtcccatctcccccaacacatgtgcccccaaaaagtgagccaggcacctctgtttcctgctgtttattgacagccgacggcagcgccttgcccagacctcccctgcccacctgctggagcccagcctgtgccgccctctgaggagaggcctggggggacagctgggcacgtccactcgcagggaaacacggggtgagacagcaggaaggggccctgcacgccgggacgccacctccgccagccgcctccacccgccccacaccacaatcgctggttttcggcattttttaaattttttttttaagaaacgtcaaagttgtgcccaacactgtggatcagcaaacacgatagaggagaccagtcagtacttcttggagggggcaggaggagagaggaaaagggagggcgagaatgaccacacaacacagccttggaccatgagcagaagcgtccgtgggaactccactggggtggatgggctgcctgcacagcccctggagagggggccaggcacaccctcagaggagctgcaagcccgtggcctggcctgctacatgccctgcttccacgtggctgccacgctgacacacccacattcaccaaacccacccgcgccctgggacgcagccacgccaggaggaggacacggccgccgagagcaaggcacaacctcgagttcttggggcgcagagaacttaggagagaagcacggaggagcccccggcagagcacccgcccccgggccccagccttccacctgtgctagcagcctggggcctccactctggccggaggaaggaccgcaggcagacagcctgggcctctaacagcttttgtccggagctagacttcgtgtcctttcagttggtaaatggttttctatagaatcaataatatttctttctttaaatatatatttgttaaagtta

SEQ ID NO: 357340 - DNA, 3852 bp, Homo sapiens
gaggcagccgtccgggcccggagaggcggggaactacacgtcccggcgggcgcagcggcctggcgcttccggctcgcgcgtctagtccctttcccggccggcggccgagggggcatcatgaagcgggctggcggcgctgccgctcccgggcggccgcgggcgggaggtgcttcccaaggaccgtagatgcctctctagagcatgagctcaggcaagagtgcccgctacaaccgcttctccggggggcccagcaatcttcccaccccagacgtcaccacagggaccagaatggaaacgaccttcggacccgccttttcagccgtcaccaccatcacaaaagctgacgggaccagcacctacaagcagcactgcaggacaccctcctcctccagcacccttgcctactccccgcgggacgaggaggacagcatggtaggtccctacccccaggagcccgtgtgagcctcagcctccccccatcctccctcctgggggaaccaggtcccaggaggagttgacagtgagctggtgaggcacaggagaagaagagcacctgtggataccctgaggcctcggcagacatgccccccatcagcactccccgccgctccgactccgccatctctgtccgctccctgcactcagagtccagcatgtctctgcgctccacattctcactgcccgaggaggaggaggagccggagccactggtgtttgcggagcagccctcggtgaagctgtgctgtcagctctgctgcagcgtcttcaaagaccccgtgatcaccacgtgtgggcacacgttctgtaggagatgcgccttgaagtcagagaagtgtcccgtggacaacgtcaaactgaccgtggtggtgaacaacatcgcggtggccgagcagatcggggagctcttcatccactgccggcacggctgccgggtagcgggcagcgggaagccccccatctttgaggtggacccccgagggtgccccttcaccatcaagctcagcgcccggaaggaccacgagggcagctgtgactacaggcctgtgcggtgtcccaacaaccccagctgccccccgctgctcaggatgaacctggaggcccacctcaaggagtgcgagcacatcaaatgcccccactccaagtacgggtgcacgttcatcgggaaccaggacacttacgagacccacctggagacttgccgcttcgagggcctgaaggagtttctgcagcagacggatgaccgcttccacgagatgcacgtggctctggcccagaaggaccaggagatcgccttcctgcgctccatgctgggaaagctctcggagaagatcgaccagctagagaagagcctggagctcaagtttgacgtcctggacgaaaaccagagcaagctcagcgaggacctcatggagttccggcgggacgcatccatgttaaatgacgagctgtcccacatcaacgcgcggctgaacatgggcatcctaggctcctacgaccctcagcagatcttcaagtgcaaagggacctttgtgggccaccagggccctgtgtggtgtctctgcgtctactccatgggtgacctgctcttcagtggctcctctgacaagaccatcaaggtgtgggacacatgtaccacctacaagtgtcagaagacactggagggccatgatggcatcgtgctggctctctgcatccaggggtgcaaactctacagcggctctgcagactgcaccatcattgtgtgggacatccagaacctgcagaaggtgaacaccatccgggcccatgacaacccggtgtgcacgctggtctcctcacacaacgtgctcttcagcggctccctgaaggccatcaaggtctgggacatcgtgggcactgagctgaagttgaagaaggagctcacaggcctcaaccactgggtgcgggccctggtggctgcccagagctacctgtacagcggctcctaccagacaatcaagatctgggacatccgaacccttgactgcatccacgtcctgcagacgtctggtggcagcgtctactccattgctgtgacaaatcaccacattgtctgtggcacctacgagaacctcatccacgtgtgggacattgagtccaaggagcaggtgcggaccctcacgggccacgtgggcaccgtgtatgccctggcggtcatctcgacgccagaccagaccaaagtcttcagtgcatcctacgaccggtccctcagggtctggagtatggacaacatgatctgcacgcagaccctgctgcgtcaccagggcagtgtcaccgcgctggctgtgtcccggggccgactcttctcaggggctgtggatagcactgtgaaggtttggacttgctaacaggatccaggccaggctgtggtttcccctgaaccagccctggacctttctgagccaggctggccacatggggtggtctcggggtttctgcctgccccgtgggcataggtggacaggctctggcagccgggcagtgccctccccgtcccatgctcggcgagcctccctctactcggcactgtccttgctgcccagcccctctctgggtgccaggtacgacgcttgccccggcccaccctccatccccaccctccatccccaccctagatggagcgagggcctttttactcaccttttctaccgtttttagactgtatgtagatttggttacctcctggttgaaataaatgctccacagactgtggctgtgagtggggacagctcctcgggacaagggggctgtgtgtggccttgaggttggtgtgcacaggcactggctgctgtgagtgggggggcatggggcagtttcctttggtggaccccaggacttcggcccactccggggcctcccctccctgctaggaggcaactcgtcacacccaagctgctggcctccagtcccatctcccccaacacatgtgcccccaaaaagtgagccaggcacctctgtttcctgctgtttattgacagccgacggcagcgccttgcccagacctcccctgcccacctgctggagcccagcctgtgccgccctctgaggagaggcctggggggacagctgggcacgtccactcgcagggaaacacggggtgagacagcaggaaggggccctgcacgccgggacgccacctccgccagccgcctccacccgccccacaccacaatcgctggttttcggcattttttaaattttttttttaagaaacgtcaaagttgtgcccaacactgtggatcagcaaacacgatagaggagaccagtcagtacttcttggagggggcaggaggagagaggaaaagggagggcgagaatgaccacacaacacagccttggaccatgagcagaagcgtccgtgggaactccactggggtggatgggctgcctgcacagcccctggagagggggccaggcacaccctcagaggagctgcaagcccgtggcctggcctgctacatgccctgcttccacgtggctgccacgctgacacacccacattcaccaaacccacccgcgccctgggacgcagccacgccaggaggaggacacggccgccgagagcaaggcacaacctcgagttcttggggcgcagagaacttaggagagaagcacggaggagcccccggcagagcacccgcccccgggccccagccttccacctgtgctagcagcctggggcctccactctggccggaggaaggaccgcaggcagacagcctgggcctctaacagcttttgtccggagctagacttcgtgtcctttcagttggtaaatggttttctatagaatcaataatatttctttctttaaatatatatttgttaaagtta

SEQ ID NO: 357341 - DNA, 2578 bp, Homo sapiens
gaggcagccgtccgggcccggagaggcggggaactacacgtcccggcgggcgcagcggcctggcgcttccggctcgcgcgtctagtccctttcccggccggcggccgagggggcatcatgaagcgggctggcggcgctgccgctcccgggcggccgcgggcgggaggtgcttcccaaggaccgtagatgcctctctagagcatgagctcaggcaagagtgcccgctacaaccgcttctccggggggcccagcaatcttcccaccccagacgtcaccacagggaccagaatggaaacgaccttcggacccgccttttcagccgtcaccaccatcacaaaagctgacgggaccagcacctacaagcagcactgcaggacaccctcctcctccagcacccttgcctactccccgcgggacgaggaggacagcatgccccccatcagcactccccgccgctccgactccgccatctctgtccgctccctgcactcagagtccagcatgtctctgcgctccacattctcactgcccgaggaggaggaggagccggagccactggtgtttgcggagcagccctcggtgaagctgtgctgtcagctctgctgcagcgtcttcaaagaccccgtgatcaccacgtgtgggcacacgttctgtaggagatgcgccttgaagtcagagaagtgtcccgtggacaacgtcaaactgaccgtggtggtgaacaacatcgcggtggccgagcagatcggggagctcttcatccactgccggcacggctgccgggtagcgggcagcgggaagccccccatctttgaggtggacccccgagggtgccccttcaccatcaagctcagcgcccggaaggaccacgagggcagctgtgactacaggcctgtgcggtgtcccaacaaccccagctgccccccgctgctcaggatgaacctggaggcccacctcaaggagtgcgagcacatcaaatgcccccactccaagtacgggtgcacgttcatcgggaaccaggacacttacgagacccacctggagacttgccgcttcgagggcctgaaggagtttctgcagcagacggatgaccgcttccacgagatgcacgtggctctggcccagaaggaccaggagatcgccttcctgcgctccatgctgggaaagctctcggagaagatcgaccagctagagaagagcctggagctcaagtttgacgtcctggacgaaaaccagagcaagctcagcgaggacctcatggagttccggcgggacgcatccatgttaaatgacgagctgtcccacatcaacgcgcggctgaacatgggcatcctaggctcctacgaccctcagcagatcttcaagtgcaaagggacctttgtgggccaccagggccctgtgtggtgtctctgcgtctactccatgggtgacctgctcttcagtggctcctctgacaagaccatcaaggtgtgggacacatgtaccacctacaagtgtcagaagacactggagggccatgatggcatcgtgctggctctctgcatccaggggtgcaaactctacagcggctctgcagactgcaccatcattgtgtgggacatccagaacctgcagaaggtgaacaccatccgggcccatgacaacccggtgtgcacgctggtctcctcacacaacgtgctcttcagcggctccctgaaggccatcaaggtctgggacatcgtgggcactgagctgaagttgaagaaggagctcacaggcctcaaccactgggtgcgggccctggtggctgcccagagctacctgtacagcggctcctaccagacaatcaagatctgggacatccgaacccttgactgcatccacgtcctgcagacgtctggtggcagcgtctactccattgctgtgacaaatcaccacattgtctgtggcacctacgagaacctcatccacgtgtgggacattgagtccaaggagcaggtgcggaccctcacgggccacgtgggcaccgtgtatgccctggcggtcatctcgacgccagaccagaccaaagtcttcagtgcatcctacgaccggtccctcagggtctggagtatggacaacatgatctgcacgcagaccctgctgcgtcaccagggcagtgtcaccgcgctggctgtgtcccggggccgactcttctcaggggctgtggatagcactgtgaaggtttggacttgctaacaggatccaggccaggctgtggtttcccctgaaccagccctggacctttctgagccaggctggccacatggggtggtctcggggtttctgcctgccccgtgggcataggtggacaggctctggcagccgggcagtgccctccccgtcccatgctcggcgagcctccctctactcggcactgtccttgctgcccagcccctctctgggtgccaggtacgacgcttgccccggcccaccctccatccccaccctccatccccaccctagatggagcgagggcctttttactcaccttttctaccgtttttagactgtatgtagatttggttacctcctggttgaaataaatgctccacagactgtg

SEQ ID NO: 357342 - DNA, 1829 bp, Homo sapiens
gaggcagccgtccgggcccggagaggcggggaactacacgtcccggcgggcgcagcggcctggcgcttccggctcgcgcgtctagtccctttcccggccggcggccgagggggcatcatgaagcgggctggcggcgctgccgctcccgggcggccgcgggcgggaggtgcttcccaaggaccgtagatgcctctctagagcatgagctcaggcaagagtgcccgctacaaccgcttctccggggggcccagcaatcttcccaccccagacgtcaccacagggaccagaatggaaacgaccttcggacccgccttttcagccgtcaccaccatcacaaaagctgacgggaccagcacctacaagcagcactgcaggacaccctcctcctccagcacccttgcctactccccgcgggacgaggaggacagcatgccccccatcagcactccccgccgctccgactccgccatctctgtccgctccctgcactcagagtccagcatgtctctgcgctccacattctcactgcccgaggaggaggaggagccggagccactggtgtttgcggagcagccctcggtgaagctgtgctgtcagctctgctgcagcgtcttcaaagaccccgtgatcaccacgtgtgggcacacgttctgtaggagatgcgccttgaagtcagagaagtgtcccgtggacaacgtcaaactgaccgtggtggtgaacaacatcgcggtggccgagcagatcggggagctcttcatccactgccggcacggctgccgggtagcgggcagcgggaagccccccatctttgaggtggacccccgagggtgccccttcaccatcaagctcagcgcccggaaggaccacgagggcagctgtgactacaggcctgtgcggtgtcccaacaaccccagctgccccccgctgctcaggatgaacctggaggcccacctcaaggagtgcgagcacatcaaatgcccccactccaagtacgggtgcacgttcatcgggaaccaggacacttacgagacccacctggagacttgccgcttcgagggcctgaaggagtttctgcagcagacggatgaccgcttccacgagatgcacgtggctctggcccagaaggaccaggagatcgccttcctgcgctccatgctgggaaagctctcggagaagatcgaccagctagagaagagcctggagctcaagtttgacgtcctggacgaaaaccagagcaagctcagcgaggacctcatggagttccggcgggacgcatccatgttaaatgacgagctgtcccacatcaacgcgcggctgaacatgggcatcctaggctcctacgaccctcagcagatcttcaagtgcaaagggacctttgtgggccaccagggccctgtgtggtgtctctgcgtctactccatgggtgactgcaagcccgtggcctggcctgctacatgccctgcttccacgtggctgccacgctgacacacccacattcaccaaacccacccgcgccctgggacgcagccacgccaggaggaggacacggccgccgagagcaaggcacaacctcgagttcttggggcgcagagaacttaggagagaagcacggaggagcccccggcagagcacccgcccccgggccccagccttccacctgtgctagcagcctggggcctccactctggccggaggaaggaccgcaggcagacagcctgggcctctaacagcttttgtccggagctagacttcgtgtcctttcagttggtaaatggttttctatagaatcaataatatttctttctttaaatatatatttgttaaagtta

SEQ ID NO: 357343 - DNA, 1573 bp, Homo sapiens
gaggcagccgtccgggcccggagaggcggggaactacacgtcccggcgggcgcagcggcctggcgcttccggctcgcgcgtctagtccctttcccggccggcggccgagggggcatcatgaagcgggctggcggcgctgccgctcccgggcggccgcgggcgggaggtgcttcccaaggaccgtagatgcctctctagagcatgagctcaggcaagagtgcccgctacaaccgcttctccggggggcccagcaatcttcccaccccagacgtcaccacagggaccagaatggaaacgaccttcggacccgccttttcagccgtcaccaccatcacaaaagctgacgggaccagcacctacaagcagcactgcaggacaccctcctcctccagcacccttgcctactccccgcgggacgaggaggacagcatgccccccatcagcactccccgccgctccgactccgccatctctgtccgctccctgcactcagagtccagcatgtctctgcgctccacattctcactgcccgaggaggaggaggagccggagccactggtgtttgcggagcagccctcggtgaagctgtgctgtcagctctgctgcagcgtcttcaaagaccccgtgatcaccacgtgtgggcacacgttctgtaggagatgcgccttgaagtcagagaagtgtcccgtggacaacgtcaaactgaccgtggtggtgaacaacatcgcggtggccgagcagatcggggagctcttcatccactgccggcacggctgccgggtagcgggcagcgggaagccccccatctttgaggtggacccccgagggtgccccttcaccatcaagctcagcgcccggaaggaccacgagggcagctgtgactacaggcctgtgcggtgtcccaacaaccccagctgccccccgctgctcaggatgaacctggaggcccacctcaaggagtgcgagcacatcaaatgcccccactccaagtacgggtgcacgttcatcgggaaccaggacacttacgagacccacctggagacttgccgcttcgagggcctgaaggagtttctgcagcagacggatgaccgcttccacgagatgcacgtggctctggcccagaaggaccaggagatcgccttcctgcgctccatgctgggaaagctctcggagaagatcgaccagctagagaagagcctggagctcaagtttgacgtcctggacgaaaaccagagcaagctcagcgaggacctcatggagttccggcgggacgcatccatgttaaatgacgagctgtcccccatcaacgccgcggcttaaacatgggcatcctaagctcctacgaccttagccgatctgcagtgccaaggacctttgtggccccccggcccgtgtggtgtttctgcgctctccccgggtgaccgctctccggccccctgtgcaggccccgggtgcccttccccccttttctagccgcggccctggctcgggccccccggggaccacaggcacgcccttgtggcccccggcaccccgcccggcgttccgttccccccgagtgggtaaaattccc

SEQ ID NO: 357344 - DNA, 774 bp, Homo sapiens
gaggcagccgtccgggcccggagaggcggggaactacacgtcccggcgggcgcagcggcctggcgcttccggctcgcgcgtctagtccctttcccggccggcggccgagggggcatcatgaagcgggctggcggcgctgccgctcccgggcggccgcgggcgggaggtgcttcccaaggaccgtagatgcctctctagagcatgagctcaggcaagagtgcccgctacaaccgcttctccggggggcccagcaatcttcccaccccagacgtcaccacagggaccagaatggaaacgaccttcggacccgccttttcagccgtcaccaccatcacaaaagctgacgggaccagcacctacaagcagcactgcaggacaccctcctcctccagcacccttgcctactccccgcgggacgaggaggacagcatggtaggtccctacccccaggagcccgtgtgagcctcagcctccccccatcctccctcctgggggaaccaggtcccaggaggagttgacagtgagctggtgaggcacaggagaagaagagcacctgtggataccctgaggcctcggcagacatggcaagtctgtgagaaaggaggctcctgtggctggactgtgggtggcagggggcagccagtgagggcagctgggtcagagggcctggcccctgcaggccaggatgaggcatatttggctccatcttaagggaggtggaaaccacagaaagttcagtcaggaggatagcacaataaaatacatgctttgaaa

SEQ ID NO: 357345 - DNA, 852 bp, Homo sapiens
ccagctgtaacattctgaggcttaaaaaagctcataggagacaggctgttcttcgccatattttccataccggaagtataaagccttgagctccacgctttagacttcctcatcttcttcctcttctgctctgagtatcgcccaaaaatcaaaggagaacatcctggcctgtccattggtgatgttgcgaagaaactgggagagatgtggaataacactgctgcagatgacaagcagccttatgaaaagaaggctgcgaagctgaaggaaaaatacgaaaaggatattgctgcatatcgagctaaaggaaagcctgatgcagcaaaaaagggagttgtcaaggctgaaaaaagcaagaaaaagaaggaagaggaggaagatgaggaagatgaagaggatgaggaggaggaggaagatgaagaagatgaagatgaagaagaagatgatgatgatgaataagttggttctagcgcagttttttttttcttgtctataaagcatttaacccaccctgtacacaactcactccttttaaagaaaaaaattgaaatgtaaggctgtgtaagatttgtttttaaactgtacagtgtctttttttgtatagttaacacactaccgaatgtgtctttagatagccctgtcctggtggtattttcaatagccactaaccttgcttggtacagtatgggggttgtaaattggcatggaaatttaaagcaggttcttgttggtgcacagcacaaattagttatatatggggatggtagttttttcatcttcagttgtctctgatgcagcttatacgaaataattgttgttctgttaactgaataccactctgtaattgcaaaa

SEQ ID NO: 357346 - DNA, 759 bp, Homo sapiens
cccaagaggcctccttcggccttcttcctcttctgctctgagtatcgcccaaaaatcaaaggagaacatcctggcctgtccattggtgatgttgcgaagaaactgggagagatgtggaataacactgctgcagatgacaagcagccttatgaaaagaaggctgcgaagctgaaggaaaaatacgaaaaggatattgctgcatatcgagctaaaggaaagcctgatgcagcaaaaaagggagttgtcaaggctgaaaaaagcaagaaaaagaaggaagaggaggaagatgaggaagatgaagaggatgaggaggaggaggaagatgaagaagatgaagatgaagaagaagatgatgatgatgaataagttggttctagcgcagttttttttttcttgtctataaagcatttaacccaccctgtacacaactcactccttttaaagaaaaaaattgaaatgtaaggctgtgtaagatttgtttttaaactgtacagtgtctttttttgtatagttaacacactaccgaatgtgtctttagatagccctgtcctggtggtattttcaatagccactaaccttgcttggtacagtatgggggttgtaaattggcatggaaatttaaagcaggttcttgttggtgcacagcacaaattagttatatatggggatggtagttttttcatcttcagttgtctctgatgcagcttatacgaaataattgttgttctgttaactgaataccactctgtaattgcaaaa

SEQ ID NO: 357347 - DNA, 334 bp, Homo sapiens
ttacaggaaaaaggctcttgctatgaaagttaatccataaaattacaaaaatgactgttttggcagtacattgagctccacagagacagcgccagggcaagtgagagccggacgggcactgggcgactctgtgcctcgctgaggaaaaataactaaacatgggcaaaggagatcctaagaagctgagaggcaaaatgtcatcatatgcattttttgtgcaaacgtcgggaggagcataagaagaagcacccagatgcttcagtcaacttctcaagagttttctaagaagtgctcagagaggtggaagaccatttctgctaaagacaaaggaaaa

SEQ ID NO: 357348 - DNA, 720 bp, Homo sapiens
  misc_feature (44)..(44): n is a, c, g, or t
ggttacagagcggagagagtgaggaggctgcgtctggctcccgntctcacagccattgtacattgagctccacagagacagcgccagggcaagtgagagccggacgggcactgggcgactctgtgcctcgctgaggaaaaatacgaaaaggatattgctgcatatcgagctaaaggaaagcctgatgcagcaaaaaagggagttgtcaaggctgaaaaaagcaagaaaaagaaggaagaggaggaagatgaggaagatgaagaggatgaggaggaggaggaagatgaagaagatgaagatgaagaagaagatgatgatgatgaataagttggttctagcgcagttttttttttcttgtctataaagcatttaacccaccctgtacacaactcactccttttaaagaaaaaaattgaaatgtaaggctgtgtaagatttgtttttaaactgtacagtgtctttttttgtatagttaacacactaccgaatgtgtctttagatagccctgtcctggtggtattttcaatagccactaaccttgcttggtacagtatgggggttgtaaattggcatggaaatttaaagcaggttcttgttggtgcacagcacaaattagttatatatggggatggtagttttttcatcttcagttgtctctgatgcagcttatacgaaataattgttgttctgttaactgaataccactctgtaattgcaaaa

SEQ ID NO: 357349 - DNA, 828 bp, Homo sapiens
  misc_feature (20)..(21): n is a, c, g, or t
  misc_feature (24)..(25): n is a, c, g, or t
  misc_feature (29)..(29): n is a, c, g, or t
  misc_feature (31)..(31): n is a, c, g, or t
  misc_feature (53)..(53): n is a, c, g, or t
  misc_feature (73)..(73): n is a, c, g, or t
tctctatatcaaccgaatannttnnaagnangaagtataaagcgttgagctcnaccctttatacttcctcaangctttatacttcctctcttcttcctcttctgctctgagtatcgcccaaaaatcaaaggagaacatcctggcctgtccattggtgatgttgcgaagaaactgggagagatgtggaataacactgctgcagatgacaagcagccttatgaaaagaaggctgcgaagctgaaggaaaaatacgaaaaggatattgctgcatatcgagctaaaggaaagcctgatgcagcaaaaaagggagttgtcaaggctgaaaaaagcaagaaaaagaaggaagaggaggaagatgaggaagatgaagaggatgaggaggaggaggaagatgaagaagatgaagatgaagaagaagatgatgatgatgaataagttggttctagcgcagttttttttttcttgtctataaagcatttaacccaccctgtacacaactcactccttttaaagaaaaaaattgaaatgtaaggctgtgtaagatttgtttttaaactgtacagtgtctttttttgtatagttaacacactaccgaatgtgtctttagatagccctgtcctggtggtattttcaatagccactaaccttgcttggtacagtatgggggttgtaaattggcatggaaatttaaagcaggttcttgttggtgcacagcacaaattagttatatatggggatggtagttttttcatcttcagttgtctctgatgcagcttatacgaaataattgttgttctgttaactgaataccactctgtaattgcaaaa

SEQ ID NO: 357350 - DNA, 676 bp, Homo sapiens
  misc_feature (44)..(44): n is a, c, g, or t
ggttacagagcggagagagtgaggaggctgcgtctggctcccgntctcacagccattgcagccttatgaaaagaaggctgcgaagctgaaggaaaaatacgaaaaggatattgctgcatatcgagctaaaggaaagcctgatgcagcaaaaaagggagttgtcaaggctgaaaaaagcaagaaaaagaaggaagaggaggaagatgaggaagatgaagaggatgaggaggaggaggaagatgaagaagatgaagatgaagaagaagatgatgatgatgaataagttggttctagcgcagttttttttttcttgtctataaagcatttaacccaccctgtacacaactcactccttttaaagaaaaaaattgaaatgtaaggctgtgtaagatttgtttttaaactgtacagtgtctttttttgtatagttaacacactaccgaatgtgtctttagatagccctgtcctggtggtattttcaatagccactaaccttgcttggtacagtatgggggttgtaaattggcatggaaatttaaagcaggttcttgttggtgcacagcacaaattagttatatatggggatggtagttttttcatcttcagttgtctctgatgcagcttatacgaaataattgttgttctgttaactgaataccactctgtaattgcaaaa

SEQ ID NO: 357351 - DNA, 662 bp, Homo sapiens
  misc_feature (8)..(8): n is a, c, g, or t
  misc_feature (32)..(32): n is a, c, g, or t
taagcttnggctaggtacgaggctgggtgttnctcagaacagaggcttgaagaactaaaacagcagcagaaacttgacaggcagaaggaactagaaaagaaaagaaaacttgaaactaatcctgatattaagccatcaaatgtggaacctatggaaaaggagtttgggctttgcaaaactgagaacaaagccaagtcgggcaaacagaattcaaagaagctgtactgccaagaacttaaaaaggtgattgaagcctccgatgttgtcctagaggtgttggatgccagagatcctcttggttgcagatgtcctcaggtagaagaggccattgtccagagtggacagaaaaagctggtacttatattaaataaatcagatctggtaccaaaggagaatttggagagctggctaaattatttgaagaaagaattgccaacagtggtgttcagagcctcaacaaaaccaaaggataaagggaagataaccaagcgtgtgaaggcaaagaagaatgctgctccattcagaagtgaagtctgctttgggaaagagggcctttggaaacttcttggaggttttcaggaaacttgcagcaaagccattcgggttggagtaattggtgagtttcagttcattactttttactttttaagtgttgaaatagt

SEQ ID NO: 357352 - DNA, 781 bp, Homo sapiens
tgctatggctacagcacgaacgagtgtagtgcaccgaaaataggtaggaactccgcaacatcgtatgacatggtagcatagccacaaactagcatgtgggtactcgacgctgtcgacagtgctagccctctagtctagacgtataacatagtatgcgcaatacctctccattaacgactactctgggcatcatcgcgttcgcgtcacagtaattctgtacagtgcagaacgctacttagagtagggctacgaacgatgaaaagcggcttcaatctggaagaactggaaaagaacaatgcacagagcataagagccatcaagggccctcatttggccaatagcatccttttccagtcttccggtctgacaaatggaataatagaagaaaaggacatacatgaagaattgccaaaacggaaagaaaggaagcaggaggagagggaggatgacaaagacagtgaccaggaaactgttgatgaagaagttgatgaaaacagctcaggcatgtttgctgcagaagagacaggggaggcactgtctgaggagactacagcaggtgaacagtctacaaggtcttttatcttggataaaatcattgaagaggatgatgcttatgacttcagtacagattatgtgtaacagaacaatggctttttatgattttttttttaacattttaagcagactgctaaactgttctctgtataagttatggtatgcatgagctgtgtaaattttgtgaatatgtattatattaaaaccaggcaacttggaatcccta

SEQ ID NO: 357353 - DNA, 2134 bp, Homo sapiens
gcggccgccaagcgatccctgctccgcgcgacactgcgtgcccgcgcacgcagagaggcggtgacgcactttacggcggcagcgtaagtgcgtgacgctcgtcagtggcttcagttcacacgtggcgccagcggaggcaggttgctgtgtttgtgcttccttctacagccaatatgaaaaggcctagtaagtggggtcgggaggcgggcgtggagggacccacgtctggaagttgctgcagccaccacgacgctcttctacggctacggctttgtctctgctgagttaaagaaagcaagtaaacgcatgacctgccataagcggtataaaatccaaaaaaaggttcgagaacatcatcgaaaattaagaaaggaggctaaaaagcggggtcacaagaagcctaggaaagacccaggagttccaaacagtgctccctttaaggaggctcttcttagggaagctgagctaaggaaacagaggcttgaagaactaaaacagcagcagaaacttgacaggcagaaggaactagaaaagaaaagaaaacttgaaactaatcctgatattaagccatcaaatgtggaacctatggaaaaggagtttgggctttgcaaaactgagaacaaagccaagtcgggcaaacagaattcaaagaagctgtactgccaagaacttaaaaaggtgattgaagcctccgatgttgtcctagaggtgttggatgccagagatcctcttggttgcagatgtcctcaggtagaagaggccattgtccagagtggacagaaaaagctggtacttatattaaataaatcagatctggtaccaaaggagaatttggagagctggctaaattatttgaagaaagaattgccaacagtggtgttcagagcctcaacaaaaccaaaggataaagggaagataaccaagcgtgtgaaggcaaagaagaatgctgctccattcagaagtgaagtctgctttgggaaagagggcctttggaaacttcttggaggttttcaggaaacttgcagcaaagccattcgggttggagtaattggtttcccaaatgtggggaaaagcagcattatcaatagcttaaaacaagaacagatgtgtaatgttggtgtatccatggggcttacaaggagcatgcaagttgtccccttggacaaacagatcacaatcatagatagtccgagcttcatcgtatctccacttaattcctcctctgcgcttgctctgcgaagtccagcaagtattgaagtagtaaaaccgatggaggctgccagtgccatcctttcccaggctgatgctcgacaggtagtactgaaatatactgtcccaggctacaggaattctctggaattttttactgtgcttgctcagagaagaggtatgcaccaaaaaggtggaatcccaaatgttgaaggtgctgccaaactgctgtggtctgagtggacaggtgcctcattagcttactattgccatccccctacatcttggactcctcctccatattttaatgagagtattgtggtagacatgaaaagcggcttcaatctggaagaactggaaaagaacaatgcacagagcataagagccatcaagggccctcatttggccaatagcatccttttccagtcttccggtctgacaaatggaataatagaagaaaaggacatacatgaagaattgccaaaacggaaagaaaggaagcaggaggagagggaggatgacaaagacagtgaccaggaaactgttgatgaagaagttgatgaaaacagctcaggcatgtttgctgcagaagagacaggggaggcactgtctgaggagactacagcaggtgaacagtctacaaggtcttttatcttggataaaatcattgaagaggatgatgcttatgacttcagtacagattatgtgtaacagaacaatggctttttatgattttttttttaacattttaagcagactgctaaactgttctctgtataagttatggtatgcatgagctgtgtaaattttgtgaatatgtattatattaaaaccaggcaacttggaatccctaaattctgtaaaaagacaattcatctcattgtgagtggaagtagttatctggaataaaaaaagaagataccta

SEQ ID NO: 357354 - DNA, 4443 bp, Homo sapiens
gcggccgccaagcgatccctgctccgcgcgacactgcgtgcccgcgcacgcagagaggcggtgacgcactttacggcggcagcgtaagtgcgtgacgctcgtcagtggcttcagttcacacgtggcgccagcggaggcaggttgctgtgtttgtgcttccttctacagccaatatgaaaaggcctagtaagtggggtcgggaggcgggcgtggagggacccacgtctggaagttgctgcagccaccacgacgctcttctacggctacggctttgtctctgctggtatgggggtgggagcctacgcgtaggccttggccctatttcctggtagaaccgagagttggaagtccctacggcgatcatgttaaccgcgcgggctcattctgcggaacgaagccgggcagagggtggggaagactaggctagattttcgtaaggaagcagcgtctgagccaggtttgaggcccaatattttctttccgtggccacgtgcagactggcccaggtgagagctgagaatcgcctcccagactcagtgttcctctcctgccttatgattcgtgctgtttgacacgaagtggttgtcgttttgtgtctcatacgctgttgtgtatgatcccattctaatattgtgagggtaagtgcagggaattttgactccattctggatctactgaatttaattctctgggatttgaaagtagcacgtatgtttgcattaggcatttcgcattagacttaacgttaggtttggtagccaataacacaagaaaaggatataactccatagtgcgttaacccagaactaatcatttgggttaacagatttgtgatgtgtttctttgtagagttaaagaaagcaagtaaacgcatgacctgccataagcggtataaaatccaaaaaaaggttcgagaacatcatcgaaaattaagaaaggaggctaaaaagcggggtcacaagaagcctaggaaagacccaggagttccaaacagtgctccctttaaggaggctcttcttagggaagctgagctaaggaaacagaggcttgaagaactaaaacagcagcagaaacttgacaggcagaaggaactagaaaagaaaagaaaacttgaaactaatcctgatattaagccatcaaatgtggaacctatggaaaaggagtttgggctttgcaaaactgagaacaaagccaagtcgggcaaacagaattcaaagaagctgtactgccaagaacttaaaaaggtgattgaagcctccgatgttgtcctagaggtgttggatgccagagatcctcttggttgcagatgtcctcaggtagaagaggccattgtccagagtggacagaaaaagctggtacttatattaaataaatcagatctggtaccaaaggagaatttggagagctggctaaattatttgaagaaagaattgccaacagtggtgttcagagcctcaacaaaaccaaaggataaagggaagataaccaagcgtgtgaaggcaaagaagaatgctgctccattcagaagtgaagtctgctttgggaaagagggcctttggaaacttcttggaggttttcaggaaacttgcagcaaagccattcgggttggagtaattggtttcccaaatgtggggaaaagcagcattatcaatagcttaaaacaagaacagatgtgtaatgttggtgtatccatggggcttacaaggagcatgcaagttgtccccttggacaaacagatcacaatcatagatagtccgagcttcatcgtatctccacttaattcctcctctgcgcttgctctgcgaagtccagcaagtattgaagtagtaaaaccgatggaggctgccagtgccatcctttcccaggctgatgctcgacaggtagtactgaaatatactgtcccaggctacaggaattctctggaattttttactgtgcttgctcagagaagaggtatgcaccaaaaaggtggaatcccaaatgttgaaggtgctgccaaactgctgtggtctgagtggacaggtgcctcattagcttactattgccatccccctacatcttggactcctcctccatattttaatgagagtattgtggtagacatgaaaagcggcttcaatctggaagaactggaaaagaacaatgcacagagcataagagccatcaagggccctcatttggccaatagcatccttttccagtcttccggtctgacaaatggaataatagaagaaaaggacatacatgaagaattgccaaaacggaaagaaaggaagcaggaggagagggaggatgacaaagacagtgaccaggaaactgttgatgaagaagttgatgaaaacagctcaggcatgtttgctgcagaagagacaggggaggcactgtctgaggagactacagcaggtgaacagtctacaaggtcttttatcttggataaaatcattgaagaggatgatgcttatgacttcagtacagattatgtgtaacagaacaatggctttttatgattttttttttaacattttaagcagactgctaaactgttctctgtataagttatggtatgcatgagctgtgtaaattttgtgaatatgtattatattaaaaccaggcaacttggaatccctaaattctgtaaaaagacaattcatctcattgtgagtggaagtagttatctggaataaaaaaagaagatacctattgaaaaatgtaagttttatttacagatcaggccacaggttacaaaattaaaaccaacagcagttttgaattatctgtaccagctagctgaactagccatatcagttcttctttccagtcattcagcattgtagtaagaaaacacttggtaaggcagatggagacatatttatagtctatagtctgtctgggaagctgactgccagacagggcagtttgtcatctttacctagctgacacatctttttccatggcttgctaccgataggcattgaagcctagcaactgttacttcccacgcatgctatcttccaggacttcctgagaaatgcttgcttacagttcaaattctgtttcactttatgtttgagatctcggtatatcttcggattaggttgaatttgcctgttgggtctggaatataccatttttcccaaacatcagtatatgaagcagtccttccccatggcttcaaatgtccattccaatggagtaacttggcagcctttacaaactgaggtgaatatcgttttccagcactggaaccttacatttgagacaaaaatagccacatcgttgcgccatgtgaaattgtgcagaaaacttacttaagggaaacaaagaatataccccatccctgaggatagttctttagataccaattctttactagcttatgccactggttaattctacttaccaaggtggcggacattccacataggatcgatggtagagtgctgttgataaaatacgataagcagaggaggtgttgtgatgctaccagccagggttctgctatacagtccctctcttggtgggacagaaaacaaatgtttgttagtgaaaagtactgactaactcctgttagtcaagactctaggaattgaaatacaacagtttttcacagctaggccagttacatacttactctacattgagtttcatccatttttccagttggttagttatattctgtcgtttccattccgtcaggtttgcaacaaaaactccaggattaaatgagcaagtgctggctttcatggaaagcttacgaattctttcctttttatagtcaagatagccaatgtaattgtactaaaaacacaaataggatatatgtacttactgcttcaaacaaaatagatacaattttatagccagtagagagaagagctgttaaactgacttcttcagattagaaaataaatatttgaaattccaagttagaataggaacctagatgttgacataataaaccagatgttcaagaacaattaggctgtcaagtccatgaagaagtctacagaaaagcaggcttgagttttgggatgaaatgattggggagtgtaaattgcagcaaaagagttccctgaatttgcaacctcttcccattaaacaatattgtaggaagaggggtgtttggtaagcaatttacctggtttcctgctccacggatgacaactttagtagaggctgaatcacaatcttctgaaaatgcagctgcatgtcctggcttcagtgctgtattgtaaagggcaagaatatcacctgaaatagacaagatgttaagatttacatttccgttgccttgagagttccctgttactcccacttctccctatggtgaccttttatagaagaccataaataaaccactacagcccactgtagcccattgttttatttagcaattgtacccaatctgggtggagacagcactcatggtgacatttttgatac

SEQ ID NO: 357355 - DNA, 4289 bp, Homo sapiens
gcggccgccaagcgatccctgctccgcgcgacactgcgtgcccgcgcacgcagagaggcggtgacgcactttacggcggcagcgtaagtgcgtgacgctcgtcagtggcttcagttcacacgtggcgccagcggaggcaggttgctgtgtttgtgcttccttctacagccaatatgaaaaggcctagtaagtggggtcgggaggcgggcgtggagggacccacgtctggaagttgctgcagccaccacgacgctcttctacggctacggctttgtctctgctggtatgggggtgggagcctacgcgtaggccttggccctatttcctggtagaaccgagagttggaagtccctacggcgatcatgttaaccgcgcgggctcattctgcggaacgaagccgggcagagggtggggaagactaggctagattttcgtaaggaagcagcgtctgagccaggtttgaggcccaatattttctttccgtggccacgtgcagactggcccaggtgagagctgagaatcgcctcccagactcagtgttcctctcctgccttatgattcgtgctgtttgacacgaagtggttgtcgttttgtgtctcatacgctgttgtgtatgatcccattctaatattgtgagggtaagtgcagggaattttgactccattctggatctactgaatttaattctctgggatttgaaagtagcacgtatgtttgcattaggcatttcgcattagacttaacgttaggtttggtagccaataacacaagaaaaggatataactccatagtgcgttaacccagaactaatcatttgggttaacagatttgtgatgtgtttctttgtagagttaaagaaagcaagtaaacgcatgacctgccataagcggtataaaatccaaaaaaaggttcgagaacatcatcgaaaattaagaaaggaggctaaaaagcggggtcacaagaagcctaggaaagacccaggagttccaaacagtgctccctttaaggaggctcttcttagggaagctgagctaaggaaacagaggcttgaagaactaaaacagcagcagaaacttgacaggcagaaggaactagaaaagaaaagaaaacttgaaactaatcctgatattaagccatcaaatgtggaacctatggaaaaggagtttgggctttgcaaaactgagaacaaagccaagtcgggcaaacagaattcaaagaagctgtactgccaagaacttaaaaaggtgattgaagcctccgatgttgtcctagaggtgttggatgccagagatcctcttggttgcagatgtcctcaggtagaagaggccattgtccagagtggacagaaaaagctggtacttatattaaataaatcagatctggtaccaaaggagaatttggagagctggctaaattatttgaagaaagaattgccaacagtggtgttcagagcctcaacaaaaccaaaggataaagggaagataaccaagcgtgtgaaggcaaagaagaatgctgctccattcagaagtgaagtctgctttgggaaagagggcctttggaaacttcttggaggttttcaggaaacttgcagcaaagccattcgggttggagtaattggtttcccaaatgtggggaaaagcagcattatcaatagcttaaaacaagaacagatgtgtaatgttggtgtatccatggggcttacaaggagcatgcaagttgtccccttggacaaacagatcacaatcatagatagtccgagcttcatcgtatctccacttaattcctcctctgcgcttgctctgcgaagtccagcaagtattgaagtagtaaaaccgatggaggctgccagtgccatcctttcccaggctgatgctcgacaggtagtactgaaatatactgtcccaggctacaggaattctctggaattttttactgtgcttgctcagagaagaggtatgcaccaaaaaggtggaatcccaaatgttgaaggtgctgccaaactgctgtggtctgagtggacaggtgcctcattagcttactattgccatccccctacatcttggactcctcctccatattttaatgagagtattgtggtagacatgaaaagcggcttcaatctggaagaactggaaaagaacaatgcacagagcataagagccatcaagggccctcatttggccaatagcatccttttccagtcttccggtctgacaaatggaataatagaagaaaaggacatacatgaagaattgccaaaacggaaagaaaggaagcaggaggagagggaggatgacaaagacagtgaccaggaaactgttgatgaagaagttgatgaaaacagctcaggcatgtttgctgcagaagagacaggggaggcactgtctgaggagactacagcaggtgaacagtctacaaggtcttttatcttggataaaatcattgaagaggatgatgcttatgacttcagtacagattatgtgtaacagaacaatggctttttatgattttttttttaacattttaagcagactgctaaactgttctctgtataagttatggtatgcatgagctgtgtaaattttgtgaatatgtattatattaaaaccaggcaacttggaatccctaaattctgtaaaaagacaattcatctcattgtgagtggaagtagttatctggaataaaaaaagaagatacctattgaaaaatgtaagttttatttacagatcaggccacaggttacaaaattaaaaccaacagcagttttgaattatctgtaccagctagctgaactagccatatcagttcttctttccagtcattcagcattgtagtaagaaaacacttggtaaggcagatggagacatatttatagtctatagtctgtctgggaagctgactgccagacagggcagtttgtcatctttacctagctgacacatctttttccatggcttgctaccgataggcattgaagcctagcaactgttacttcccacgcatgctatcttccaggacttcctgagaaatgcttgcttacagttcaaattctgtttcactttatgtttgagatctcggtatatcttcggattaggttgaatttgcctgttgggtctggaatataccatttttcccaaacatcagtatatgaagcagtccttccccatggcttcaaatgtccattccaatggagtaacttggcagcctttacaaactgaggtgaatatcgttttccagcactggaaccaaggtggcggacattccacataggatcgatggtagagtgctgttgataaaatacgataagcagaggaggtgttgtgatgctaccagccagggttctgctatacagtccctctcttggtgggacagaaaacaaatgtttgttagtgaaaagtactgactaactcctgttagtcaagactctaggaattgaaatacaacagtttttcacagctaggccagttacatacttactctacattgagtttcatccatttttccagttggttagttatattctgtcgtttccattccgtcaggtttgcaacaaaaactccaggattaaatgagcaagtgctggctttcatggaaagcttacgaattctttcctttttatagtcaagatagccaatgtaattgtactaaaaacacaaataggatatatgtacttactgcttcaaacaaaatagatacaattttatagccagtagagagaagagctgttaaactgacttcttcagattagaaaataaatatttgaaattccaagttagaataggaacctagatgttgacataataaaccagatgttcaagaacaattaggctgtcaagtccatgaagaagtctacagaaaagcaggcttgagttttgggatgaaatgattggggagtgtaaattgcagcaaaagagttccctgaatttgcaacctcttcccattaaacaatattgtaggaagaggggtgtttggtaagcaatttacctggtttcctgctccacggatgacaactttagtagaggctgaatcacaatcttctgaaaatgcagctgcatgtcctggcttcagtgctgtattgtaaagggcaagaatatcacctgaaatagacaagatgttaagatttacatttccgttgccttgagagttccctgttactcccacttctccctatggtgaccttttatagaagaccataaataaaccactacagcccactgtagcccattgttttatttagcaattgtacccaatctgggtggagacagcactcatggtgacatttttgatac

SEQ ID NO: 357356 - DNA, 4100 bp, Homo sapiens
gcggccgccaagcgatccctgctccgcgcgacactgcgtgcccgcgcacgcagagaggcggtgacgcactttacggcggcagcgtaagtgcgtgacgctcgtcagtggcttcagttcacacgtggcgccagcggaggcaggttgctgtgtttgtgcttccttctacagccaatatgaaaaggcctagtaagtggggtcgggaggcgggcgtggagggacccacgtctggaagttgctgcagccaccacgacgctcttctacggctacggctttgtctctgctggtatgggggtgggagcctacgcgtaggccttggccctatttcctggtagaaccgagagttggaagtccctacggcgatcatgttaaccgcgcgggctcattctgcggaacgaagccgggcagagggtggggaagactaggctagattttcgtaaggaagcagcgtctgagccaggtttgaggcccaatattttctttccgtggccacgtgcagactggcccagagttaaagaaagcaagtaaacgcatgacctgccataagcggtataaaatccaaaaaaaggttcgagaacatcatcgaaaattaagaaaggaggctaaaaagcggggtcacaagaagcctaggaaagacccaggagttccaaacagtgctccctttaaggaggctcttcttagggaagctgagctaaggaaacagaggcttgaagaactaaaacagcagcagaaacttgacaggcagaaggaactagaaaagaaaagaaaacttgaaactaatcctgatattaagccatcaaatgtggaacctatggaaaaggagtttgggctttgcaaaactgagaacaaagccaagtcgggcaaacagaattcaaagaagctgtactgccaagaacttaaaaaggtgattgaagcctccgatgttgtcctagaggtgttggatgccagagatcctcttggttgcagatgtcctcaggtagaagaggccattgtccagagtggacagaaaaagctggtacttatattaaataaatcagatctggtaccaaaggagaatttggagagctggctaaattatttgaagaaagaattgccaacagtggtgttcagagcctcaacaaaaccaaaggataaagggaagataaccaagcgtgtgaaggcaaagaagaatgctgctccattcagaagtgaagtctgctttgggaaagagggcctttggaaacttcttggaggttttcaggaaacttgcagcaaagccattcgggttggagtaattggtttcccaaatgtggggaaaagcagcattatcaatagcttaaaacaagaacagatgtgtaatgttggtgtatccatggggcttacaaggagcatgcaagttgtccccttggacaaacagatcacaatcatagatagtccgagcttcatcgtatctccacttaattcctcctctgcgcttgctctgcgaagtccagcaagtattgaagtagtaaaaccgatggaggctgccagtgccatcctttcccaggctgatgctcgacaggtagtactgaaatatactgtcccaggctacaggaattctctggaattttttactgtgcttgctcagagaagaggtatgcaccaaaaaggtggaatcccaaatgttgaaggtgctgccaaactgctgtggtctgagtggacaggtgcctcattagcttactattgccatccccctacatcttggactcctcctccatattttaatgagagtattgtggtagacatgaaaagcggcttcaatctggaagaactggaaaagaacaatgcacagagcataagagccatcaagggccctcatttggccaatagcatccttttccagtcttccggtctgacaaatggaataatagaagaaaaggacatacatgaagaattgccaaaacggaaagaaaggaagcaggaggagagggaggatgacaaagacagtgaccaggaaactgttgatgaagaagttgatgaaaacagctcaggcatgtttgctgcagaagagacaggggaggcactgtctgaggagactacagcaggtgaacagtctacaaggtcttttatcttggataaaatcattgaagaggatgatgcttatgacttcagtacagattatgtgtaacagaacaatggctttttatgattttttttttaacattttaagcagactgctaaactgttctctgtataagttatggtatgcatgagctgtgtaaattttgtgaatatgtattatattaaaaccaggcaacttggaatccctaaattctgtaaaaagacaattcatctcattgtgagtggaagtagttatctggaataaaaaaagaagatacctattgaaaaatgtaagttttatttacagatcaggccacaggttacaaaattaaaaccaacagcagttttgaattatctgtaccagctagctgaactagccatatcagttcttctttccagtcattcagcattgtagtaagaaaacacttggtaaggcagatggagacatatttatagtctatagtctgtctgggaagctgactgccagacagggcagtttgtcatctttacctagctgacacatctttttccatggcttgctaccgataggcattgaagcctagcaactgttacttcccacgcatgctatcttccaggacttcctgagaaatgcttgcttacagttcaaattctgtttcactttatgtttgagatctcggtatatcttcggattaggttgaatttgcctgttgggtctggaatataccatttttcccaaacatcagtatatgaagcagtccttccccatggcttcaaatgtccattccaatggagtaacttggcagcctttacaaactgaggtgaatatcgttttccagcactggaaccttacatttgagacaaaaatagccacatcgttgcgccatgtgaaattgtgcagaaaacttacttaagggaaacaaagaatataccccatccctgaggatagttctttagataccaattctttactagcttatgccactggttaattctacttaccaaggtggcggacattccacataggatcgatggtagagtgctgttgataaaatacgataagcagaggaggtgttgtgatgctaccagccagggttctgctatacagtccctctcttggtgggacagaaaacaaatgtttgttagtgaaaagtactgactaactcctgttagtcaagactctaggaattgaaatacaacagtttttcacagctaggccagttacatacttactctacattgagtttcatccatttttccagttggttagttatattctgtcgtttccattccgtcaggtttgcaacaaaaactccaggattaaatgagcaagtgctggctttcatggaaagcttacgaattctttcctttttatagtcaagatagccaatgtaattgtactaaaaacacaaataggatatatgtacttactgcttcaaacaaaatagatacaattttatagccagtagagagaagagctgttaaactgacttcttcagattagaaaataaatatttgaaattccaagttagaataggaacctagatgttgacataataaaccagatgttcaagaacaattaggctgtcaagtccatgaagaagtctacagaaaagcaggcttgagttttgggatgaaatgattggggagtgtaaattgcagcaaaagagttccctgaatttgcaacctcttcccattaaacaatattgtaggaagaggggtgtttggtaagcaatttacctggtttcctgctccacggatgacaactttagtagaggctgaatcacaatcttctgaaaatgcagctgcatgtcctggcttcagtgctgtattgtaaagggcaagaatatcacctgaaatagacaagatgttaagatttacatttccgttgccttgagagttccctgttactcccacttctccctatggtgaccttttatagaagaccataaataaaccactacagcccactgtagcccattgttttatttagcaattgtacccaatctgggtggagacagcactcatggtgacatttttgatac

SEQ ID NO: 357357 - DNA, 3667 bp, Homo sapiens
cacactaggcaggtggaggccgggggtatcggacgagggttgtgctccttctacagccaatatgaaaaggctaagttaaagaaagcaagtaaacgcatgacctgccataagcggtataaaatccaaaaaaaggttcgagaacatcatcgaaaattaagaaaggaggctaaaaagcggggtcacaagaagcctaggaaagacccaggagttccaaacagtgctccctttaaggaggctcttcttagggaagctgagctaaggaaacagaggcttgaagaactaaaacagcagcagaaacttgacaggcagaaggaactagaaaagaaaagaaaacttgaaactaatcctgatattaagccatcaaatgtggaacctatggaaaaggagtttgggctttgcaaaactgagaacaaagccaagtcgggcaaacagaattcaaagaagctgtactgccaagaacttaaaaaggtgattgaagcctccgatgttgtcctagaggtgttggatgccagagatcctcttggttgcagatgtcctcaggtagaagaggccattgtccagagtggacagaaaaagctggtacttatattaaataaatcagatctggtaccaaaggagaatttggagagctggctaaattatttgaagaaagaattgccaacagtggtgttcagagcctcaacaaaaccaaaggataaagggaagataaccaagcgtgtgaaggcaaagaagaatgctgctccattcagaagtgaagtctgctttgggaaagagggcctttggaaacttcttggaggttttcaggaaacttgcagcaaagccattcgggttggagtaattggtttcccaaatgtggggaaaagcagcattatcaatagcttaaaacaagaacagatgtgtaatgttggtgtatccatggggcttacaaggagcatgcaagttgtccccttggacaaacagatcacaatcatagatagtccgagcttcatcgtatctccacttaattcctcctctgcgcttgctctgcgaagtccagcaagtattgaagtagtaaaaccgatggaggctgccagtgccatcctttcccaggctgatgctcgacaggtagtactgaaatatactgtcccaggctacaggaattctctggaattttttactgtgcttgctcagagaagaggtatgcaccaaaaaggtggaatcccaaatgttgaaggtgctgccaaactgctgtggtctgagtggacaggtgcctcattagcttactattgccatccccctacatcttggactcctcctccatattttaatgagagtattgtggtagacatgaaaagcggcttcaatctggaagaactggaaaagaacaatgcacagagcataagagccatcaagggccctcatttggccaatagcatccttttccagtcttccggtctgacaaatggaataatagaagaaaaggacatacatgaagaattgccaaaacggaaagaaaggaagcaggaggagagggaggatgacaaagacagtgaccaggaaactgttgatgaagaagttgatgaaaacagctcaggcatgtttgctgcagaagagacaggggaggcactgtctgaggagactacagcaggtgaacagtctacaaggtcttttatcttggataaaatcattgaagaggatgatgcttatgacttcagtacagattatgtgtaacagaacaatggctttttatgattttttttttaacattttaagcagactgctaaactgttctctgtataagttatggtatgcatgagctgtgtaaattttgtgaatatgtattatattaaaaccaggcaacttggaatccctaaattctgtaaaaagacaattcatctcattgtgagtggaagtagttatctggaataaaaaaagaagatacctattgaaaaatgtaagttttatttacagatcaggccacaggttacaaaattaaaaccaacagcagttttgaattatctgtaccagctagctgaactagccatatcagttcttctttccagtcattcagcattgtagtaagaaaacacttggtaaggcagatggagacatatttatagtctatagtctgtctgggaagctgactgccagacagggcagtttgtcatctttacctagctgacacatctttttccatggcttgctaccgataggcattgaagcctagcaactgttacttcccacgcatgctatcttccaggacttcctgagaaatgcttgcttacagttcaaattctgtttcactttatgtttgagatctcggtatatcttcggattaggttgaatttgcctgttgggtctggaatataccatttttcccaaacatcagtatatgaagcagtccttccccatggcttcaaatgtccattccaatggagtaacttggcagcctttacaaactgaggtgaatatcgttttccagcactggaaccttacatttgagacaaaaatagccacatcgttgcgccatgtgaaattgtgcagaaaacttacttaagggaaacaaagaatataccccatccctgaggatagttctttagataccaattctttactagcttatgccactggttaattctacttaccaaggtggcggacattccacataggatcgatggtagagtgctgttgataaaatacgataagcagaggaggtgttgtgatgctaccagccagggttctgctatacagtccctctcttggtgggacagaaaacaaatgtttgttagtgaaaagtactgactaactcctgttagtcaagactctaggaattgaaatacaacagtttttcacagctaggccagttacatacttactctacattgagtttcatccatttttccagttggttagttatattctgtcgtttccattccgtcaggtttgcaacaaaaactccaggattaaatgagcaagtgctggctttcatggaaagcttacgaattctttcctttttatagtcaagatagccaatgtaattgtactaaaaacacaaataggatatatgtacttactgcttcaaacaaaatagatacaattttatagccagtagagagaagagctgttaaactgacttcttcagattagaaaataaatatttgaaattccaagttagaataggaacctagatgttgacataataaaccagatgttcaagaacaattaggctgtcaagtccatgaagaagtctacagaaaagcaggcttgagttttgggatgaaatgattggggagtgtaaattgcagcaaaagagttccctgaatttgcaacctcttcccattaaacaatattgtaggaagaggggtgtttggtaagcaatttacctggtttcctgctccacggatgacaactttagtagaggctgaatcacaatcttctgaaaatgcagctgcatgtcctggcttcagtgctgtattgtaaagggcaagaatatcacctgaaatagacaagatgttaagatttacatttccgttgccttgagagttccctgttactcccacttctccctatggtgaccttttatagaagaccataaataaaccactacagcccactgtagcccattgttttatttagcaattgtacccaatctgggtggagacagcactcatggtgacatttttgatac

SEQ ID NO: 357358 - DNA, 3638 bp, Homo sapiens
aagagcaagaagcagagcccaggacaaatgagtagtgcaaaaagagttaaagaaagcaagtaaacgcatgacctgccataagcggtataaaatccaaaaaaaggttcgagaacatcatcgaaaattaagaaaggaggctaaaaagcggggtcacaagaagcctaggaaagacccaggagttccaaacagtgctccctttaaggaggctcttcttagggaagctgagctaaggaaacagaggcttgaagaactaaaacagcagcagaaacttgacaggcagaaggaactagaaaagaaaagaaaacttgaaactaatcctgatattaagccatcaaatgtggaacctatggaaaaggagtttgggctttgcaaaactgagaacaaagccaagtcgggcaaacagaattcaaagaagctgtactgccaagaacttaaaaaggtgattgaagcctccgatgttgtcctagaggtgttggatgccagagatcctcttggttgcagatgtcctcaggtagaagaggccattgtccagagtggacagaaaaagctggtacttatattaaataaatcagatctggtaccaaaggagaatttggagagctggctaaattatttgaagaaagaattgccaacagtggtgttcagagcctcaacaaaaccaaaggataaagggaagataaccaagcgtgtgaaggcaaagaagaatgctgctccattcagaagtgaagtctgctttgggaaagagggcctttggaaacttcttggaggttttcaggaaacttgcagcaaagccattcgggttggagtaattggtttcccaaatgtggggaaaagcagcattatcaatagcttaaaacaagaacagatgtgtaatgttggtgtatccatggggcttacaaggagcatgcaagttgtccccttggacaaacagatcacaatcatagatagtccgagcttcatcgtatctccacttaattcctcctctgcgcttgctctgcgaagtccagcaagtattgaagtagtaaaaccgatggaggctgccagtgccatcctttcccaggctgatgctcgacaggtagtactgaaatatactgtcccaggctacaggaattctctggaattttttactgtgcttgctcagagaagaggtatgcaccaaaaaggtggaatcccaaatgttgaaggtgctgccaaactgctgtggtctgagtggacaggtgcctcattagcttactattgccatccccctacatcttggactcctcctccatattttaatgagagtattgtggtagacatgaaaagcggcttcaatctggaagaactggaaaagaacaatgcacagagcataagagccatcaagggccctcatttggccaatagcatccttttccagtcttccggtctgacaaatggaataatagaagaaaaggacatacatgaagaattgccaaaacggaaagaaaggaagcaggaggagagggaggatgacaaagacagtgaccaggaaactgttgatgaagaagttgatgaaaacagctcaggcatgtttgctgcagaagagacaggggaggcactgtctgaggagactacagcaggtgaacagtctacaaggtcttttatcttggataaaatcattgaagaggatgatgcttatgacttcagtacagattatgtgtaacagaacaatggctttttatgattttttttttaacattttaagcagactgctaaactgttctctgtataagttatggtatgcatgagctgtgtaaattttgtgaatatgtattatattaaaaccaggcaacttggaatccctaaattctgtaaaaagacaattcatctcattgtgagtggaagtagttatctggaataaaaaaagaagatacctattgaaaaatgtaagttttatttacagatcaggccacaggttacaaaattaaaaccaacagcagttttgaattatctgtaccagctagctgaactagccatatcagttcttctttccagtcattcagcattgtagtaagaaaacacttggtaaggcagatggagacatatttatagtctatagtctgtctgggaagctgactgccagacagggcagtttgtcatctttacctagctgacacatctttttccatggcttgctaccgataggcattgaagcctagcaactgttacttcccacgcatgctatcttccaggacttcctgagaaatgcttgcttacagttcaaattctgtttcactttatgtttgagatctcggtatatcttcggattaggttgaatttgcctgttgggtctggaatataccatttttcccaaacatcagtatatgaagcagtccttccccatggcttcaaatgtccattccaatggagtaacttggcagcctttacaaactgaggtgaatatcgttttccagcactggaaccttacatttgagacaaaaatagccacatcgttgcgccatgtgaaattgtgcagaaaacttacttaagggaaacaaagaatataccccatccctgaggatagttctttagataccaattctttactagcttatgccactggttaattctacttaccaaggtggcggacattccacataggatcgatggtagagtgctgttgataaaatacgataagcagaggaggtgttgtgatgctaccagccagggttctgctatacagtccctctcttggtgggacagaaaacaaatgtttgttagtgaaaagtactgactaactcctgttagtcaagactctaggaattgaaatacaacagtttttcacagctaggccagttacatacttactctacattgagtttcatccatttttccagttggttagttatattctgtcgtttccattccgtcaggtttgcaacaaaaactccaggattaaatgagcaagtgctggctttcatggaaagcttacgaattctttcctttttatagtcaagatagccaatgtaattgtactaaaaacacaaataggatatatgtacttactgcttcaaacaaaatagatacaattttatagccagtagagagaagagctgttaaactgacttcttcagattagaaaataaatatttgaaattccaagttagaataggaacctagatgttgacataataaaccagatgttcaagaacaattaggctgtcaagtccatgaagaagtctacagaaaagcaggcttgagttttgggatgaaatgattggggagtgtaaattgcagcaaaagagttccctgaatttgcaacctcttcccattaaacaatattgtaggaagaggggtgtttggtaagcaatttacctggtttcctgctccacggatgacaactttagtagaggctgaatcacaatcttctgaaaatgcagctgcatgtcctggcttcagtgctgtattgtaaagggcaagaatatcacctgaaatagacaagatgttaagatttacatttccgttgccttgagagttccctgttactcccacttctccctatggtgaccttttatagaagaccataaataaaccactacagcccactgtagcccattgttttatttagcaattgtacccaatctgggtggagacagcactcatggtgacatttttgatac

SEQ ID NO: 357359 - DNA, 3790 bp, Homo sapiens
gtggtaagactgcttgagcctgggtggtccaggttgcagtgagttgtgattgtgccactgcactcaggcccaagcaaaaaaaaccaaaatcaaaacgcctgatctctcattcataaagagacctaatcataccttttccataggttcgacattttataggcataactaaattgcagccagattggtttctcacttgaattctgcttaagtataaagatatttttgtaagcagacaaaatctctttattttaataggttcgagaacatcatcgaaaattaagaaaggaggctaaaaagcggggtcacaagaagcctaggaaagacccaggagttccaaacagtgctccctttaaggaggctcttcttagggaagctgagctaaggaaacagaggcttgaagaactaaaacagcagcagaaacttgacaggcagaaggaactagaaaagaaaagaaaacttgaaactaatcctgatattaagccatcaaatgtggaacctatggaaaaggagtttgggctttgcaaaactgagaacaaagccaagtcgggcaaacagaattcaaagaagctgtactgccaagaacttaaaaaggtgattgaagcctccgatgttgtcctagaggtgttggatgccagagatcctcttggttgcagatgtcctcaggtagaagaggccattgtccagagtggacagaaaaagctggtacttatattaaataaatcagatctggtaccaaaggagaatttggagagctggctaaattatttgaagaaagaattgccaacagtggtgttcagagcctcaacaaaaccaaaggataaagggaagataaccaagcgtgtgaaggcaaagaagaatgctgctccattcagaagtgaagtctgctttgggaaagagggcctttggaaacttcttggaggttttcaggaaacttgcagcaaagccattcgggttggagtaattggtttcccaaatgtggggaaaagcagcattatcaatagcttaaaacaagaacagatgtgtaatgttggtgtatccatggggcttacaaggagcatgcaagttgtccccttggacaaacagatcacaatcatagatagtccgagcttcatcgtatctccacttaattcctcctctgcgcttgctctgcgaagtccagcaagtattgaagtagtaaaaccgatggaggctgccagtgccatcctttcccaggctgatgctcgacaggtagtactgaaatatactgtcccaggctacaggaattctctggaattttttactgtgcttgctcagagaagaggtatgcaccaaaaaggtggaatcccaaatgttgaaggtgctgccaaactgctgtggtctgagtggacaggtgcctcattagcttactattgccatccccctacatcttggactcctcctccatattttaatgagagtattgtggtagacatgaaaagcggcttcaatctggaagaactggaaaagaacaatgcacagagcataagagccatcaagggccctcatttggccaatagcatccttttccagtcttccggtctgacaaatggaataatagaagaaaaggacatacatgaagaattgccaaaacggaaagaaaggaagcaggaggagagggaggatgacaaagacagtgaccaggaaactgttgatgaagaagttgatgaaaacagctcaggcatgtttgctgcagaagagacaggggaggcactgtctgaggagactacagcaggtgaacagtctacaaggtcttttatcttggataaaatcattgaagaggatgatgcttatgacttcagtacagattatgtgtaacagaacaatggctttttatgattttttttttaacattttaagcagactgctaaactgttctctgtataagttatggtatgcatgagctgtgtaaattttgtgaatatgtattatattaaaaccaggcaacttggaatccctaaattctgtaaaaagacaattcatctcattgtgagtggaagtagttatctggaataaaaaaagaagatacctattgaaaaatgtaagttttatttacagatcaggccacaggttacaaaattaaaaccaacagcagttttgaattatctgtaccagctagctgaactagccatatcagttcttctttccagtcattcagcattgtagtaagaaaacacttggtaaggcagatggagacatatttatagtctatagtctgtctgggaagctgactgccagacagggcagtttgtcatctttacctagctgacacatctttttccatggcttgctaccgataggcattgaagcctagcaactgttacttcccacgcatgctatcttccaggacttcctgagaaatgcttgcttacagttcaaattctgtttcactttatgtttgagatctcggtatatcttcggattaggttgaatttgcctgttgggtctggaatataccatttttcccaaacatcagtatatgaagcagtccttccccatggcttcaaatgtccattccaatggagtaacttggcagcctttacaaactgaggtgaatatcgttttccagcactggaaccttacatttgagacaaaaatagccacatcgttgcgccatgtgaaattgtgcagaaaacttacttaagggaaacaaagaatataccccatccctgaggatagttctttagataccaattctttactagcttatgccactggttaattctacttaccaaggtggcggacattccacataggatcgatggtagagtgctgttgataaaatacgataagcagaggaggtgttgtgatgctaccagccagggttctgctatacagtccctctcttggtgggacagaaaacaaatgtttgttagtgaaaagtactgactaactcctgttagtcaagactctaggaattgaaatacaacagtttttcacagctaggccagttacatacttactctacattgagtttcatccatttttccagttggttagttatattctgtcgtttccattccgtcaggtttgcaacaaaaactccaggattaaatgagcaagtgctggctttcatggaaagcttacgaattctttcctttttatagtcaagatagccaatgtaattgtactaaaaacacaaataggatatatgtacttactgcttcaaacaaaatagatacaattttatagccagtagagagaagagctgttaaactgacttcttcagattagaaaataaatatttgaaattccaagttagaataggaacctagatgttgacataataaaccagatgttcaagaacaattaggctgtcaagtccatgaagaagtctacagaaaagcaggcttgagttttgggatgaaatgattggggagtgtaaattgcagcaaaagagttccctgaatttgcaacctcttcccattaaacaatattgtaggaagaggggtgtttggtaagcaatttacctggtttcctgctccacggatgacaactttagtagaggctgaatcacaatcttctgaaaatgcagctgcatgtcctggcttcagtgctgtattgtaaagggcaagaatatcacctgaaatagacaagatgttaagatttacatttccgttgccttgagagttccctgttactcccacttctccctatggtgaccttttatagaagaccataaataaaccactacagcccactgtagcccattgttttatttagcaattgtacccaatctgggtggagacagcactcatggtgacatttttgatac

SEQ ID NO: 357360 - DNA, 3309 bp, Homo sapiens
gcggccgccaagcgatccctgctccgcgcgacactgcgtgcccgcgcacgcagagaggcggtgacgcactttacggcggcagcgtaagtgcgtgacgctcgtcagtggcttcagttcacacgtggcgccagcggaggcaggttgctgtgtttgtgcttccttctacagccaatatgaaaaggcctagtaagtggggtcgggaggcgggcgtggagggacccacgtctggaagttgctgcagccaccacgacgctcttctacggctacggctttgtctctgctggtatgggggtgggagcctacgcgtaggccttggccctatttcctggtagaaccgagagttggaagtccctacggcgatcatgttaaccgcgcgggctcattctgcggaacgaagccgggcagagggtggggaagactaggctagattttcgtaaggaagcagcgtctgagccaggtttgaggcccaatattttctttccgtggccacgtgcagactggcccaggtgagagctgagaatcgcctcccagactcagtgttcctctcctgccttatgattcgtgctgtttgacacgaagtggttgtcgttttgtgtctcatacgctgttgtgtatgatcccattctaatattgtgagggtaagtgcagggaattttgactccattctggatctactgaatttaattctctgggatttgaaagtagcacgtatgtttgcattaggcatttcgcattagacttaacgttaggtttggtagccaataacacaagaaaaggatataactccatagtgcgttaacccagaactaatcatttgggttaacagatttgtgatgtgtttctttgtagagttaaagaaagcaagtaaacgcatgacctgccataagcggtataaaatccaaaaaaaggttcgagaacatcatcgaaaattaagaaaggaggctaaaaagcggggtcacaagaagcctaggaaagacccaggagttccaaacagtgctccctttaaggaggctcttcttagggaagctgagctaaggaaacagaggcttgaagaactaaaacagcagcagaaacttgacaggcagaaggaactagaaaagaaaagaaaacttgaaactaatcctgatattaagccatcaaatgtggaacctatggaaaaggagtttgggctttgcaaaactgagaacaaagccaagtcgggcaaacagaattcaaagaagctgtactgccaagaacttaaaaaggtgattgaagcctccgatgttgtcctagaggtgttggatgccagagatcctcttggttgcagatgtcctcaggtagaagaggccattgtccagagtggacagaaaaagctggtacttatattaaataaatcagatctggtaccaaaggagaatttggagagctggctaaattatttgaagaaagaattgccaacagtggtgttcagagcctcaacaaaaccaaaggataaagggaagataaccaagcgtgtgaaggcaaagaagaatgctgctccattcagaagtgaagtctgctttgggaaagagggcctttggaaacttcttggaggttttcaggaaacttgcagcaaagccattcgggttggagtaattggtttcccaaatgtggggaaaagcagcattatcaatagcttaaaacaagaacagatgtgtaatgttggtgtatccatggggcttacaaggagcatgcaagttgtccccttggacaaacagatcacaatcatagatagtccgagcttcatcgtatctccacttaattcctcctctgcgcttgctctgcgaagtccagcaagtattgaagtagtaaaaccgatggaggctgccagtgccatcctttcccaggctgatgctcgacaggtagtactgaaatatactgtcccaggctacaggaattctctggaattttttactgtgcttgctcagagaagaggtatgcaccaaaaaggtggaatcccaaatgttgaaggtgctgccaaactgctgtggtctgagtggacaggtgcctcattagcttactattgccatccccctacatcttggactcctcctccatattttaatgagagtattgtggtagacatgaaaagcggcttcaatctggaagaactggaaaagaacaatgcacagagcataagagccatcaagggccctcatttggccaatagcatccttttccagtcttccggtctgacaaatggaataatagaagaaaaggacatacatgaagaattgccaaaacggaaagaaaggaagcaggaggagagggaggatgacaaagacagtgaccaggaaactgttgatgaagaagttgatgaaaacagctcaggcatgtttgctgcagaagagacaggggaggcactgtctgaggagactacagcaggtgaacagtctacaaggtcttttatcttggataaaatcattgaagaggatgatgcttatgacttcagtacagattatgtgtaacagaacaatggctttttatgattttttttttaacattttaagcagactgctaaactgttctctgtataagttatggtatgcatgagctgtgtaaattttgtgaatatgtattatattaaaaccaggcaacttggaatccctaaattctgtaaaaagacaattcatctcattgtgagtggaagtagttatctggaataaaaaaagaagatacctattgaaaaatgtaagttttatttacagatcaggccacaggttacaaaattaaaaccaacagcagttttgaattatctgtaccagctagctgaactagccatatcagttcttctttccagtcattcagcattgtagtaagaaaacacttggtaaggcagatggagacatatttatagtctatagtctgtctgggaagctgactgccagacagggcagtttgtcatctttacctagctgacacatctttttccatggcttgctaccgataggcattgaagcctagcaactgttacttcccacgcatgctatcttccaggacttcctgagaaatgcttgcttacagttcaaattctgtttcactttatgtttgagatctcggtatatcttcggattaggttgaatttgcctgttgggtctggaatataccatttttcccaaacatcagtatatgaagcagtccttccccatggcttcaaatgtccattccaatggagtaacttggcagcctttacaaactgaggtgaatattggtttttttccaaggcccaaacaccttttttgggggggggaaaaaaaaccccccccccaaaaaaagagggggggggggtgg

SEQ ID NO: 357361 - DNA, 4117 bp, Homo sapiens
gcggccgccaagcgatccctgctccgcgcgacactgcgtgcccgcgcacgcagagaggcggtgacgcactttacggcggcagcgtaagtgcgtgacgctcgtcagtggcttcagttcacacgtggcgccagcggaggcaggttgctgtgtttgtgcttccttctacagccaatatgaaaaggcctagtaagtggggtcgggaggcgggcgtggagggacccacgtctggaagttgctgcagccaccacgacgctcttctacggctacggctttgtctctgctgagttaaagaaagcaagtaaacgcatgacctgccataagcggtataaaatccaaaaaaaggttcgagaacatcatcgaaaattaagaaaggaggctaaaaagcggggtcacaagaagcctaggaaagacccaggagttccaaacagtgctccctttaaggaggctcttcttagggaagctgagctaaggaaacagaggcttgaagaactaaaacagcagcagaaacttgacaggcagaaggaactagaaaagaaaagaaaacttgaaactaatcctgatattaagccatcaaatgtggaacctatggaaaaggagtttgggctttgcaaaactgagaacaaagccaagtcgggcaaacagaattcaaagaagctgtactgccaagaacttaaaaaggtgattgaagcctccgatgttgtcctagaggtgttggatgccagagatcctcttggttgcagatgtcctcaggtagaagaggccattgtccagagtggacagaaaaagctggtacttatattaaataaatcagatctggtaccaaaggagaatttggagagctggctaaattatttgaagaaagaattgccaacagtggtgttcagagcctcaacaaaaccaaaggataaagggaagataaccaaggtatcctttattagtggtaagaaatgtgattctttcagattttggttgaaatatgatgagtgtacaaaatcttgatttaagtgaatgaaaaattacaagatccaactctgatttcagccagagatcatctgaaaggcaatgtagttatcttaagagctgggctctggagcctgattgcttggggtttgttgaaatttatcaggtaagttgccagaataattcaactatttggaattttagcgtgtgaaggcaaagaagaatgctgctccattcagaagtgaagtctgctttgggaaagagggcctttggaaacttcttggaggttttcaggaaacttgcagcaaagccattcgggttggagtaattggtttcccaaatgtggggaaaagcagcattatcaatagcttaaaacaagaacagatgtgtaatgttggtgtatccatggggcttacaaggagcatgcaagttgtccccttggacaaacagatcacaatcatagatagtccgagcttcatcgtatctccacttaattcctcctctgcgcttgctctgcgaagtccagcaagtattgaagtagtaaaaccgatggaggctgccagtgccatcctttcccaggctgatgctcgacaggtagtactgaaatatactgtcccaggctacaggaattctctggaattttttactgtgcttgctcagagaagaggtatgcaccaaaaaggtggaatcccaaatgttgaaggtgctgccaaactgctgtggtctgagtggacaggtgcctcattagcttactattgccatccccctacatcttggactcctcctccatattttaatgagagtattgtggtagacatgaaaagcggcttcaatctggaagaactggaaaagaacaatgcacagagcataagagccatcaagggccctcatttggccaatagcatccttttccagtcttccggtctgacaaatggaataatagaagaaaaggacatacatgaagaattgccaaaacggaaagaaaggaagcaggaggagagggaggatgacaaagacagtgaccaggaaactgttgatgaagaagttgatgaaaacagctcaggcatgtttgctgcagaagagacaggggaggcactgtctgaggagactacagcaggtgaacagtctacaaggtcttttatcttggataaaatcattgaagaggatgatgcttatgacttcagtacagattatgtgtaacagaacaatggctttttatgattttttttttaacattttaagcagactgctaaactgttctctgtataagttatggtatgcatgagctgtgtaaattttgtgaatatgtattatattaaaaccaggcaacttggaatccctaaattctgtaaaaagacaattcatctcattgtgagtggaagtagttatctggaataaaaaaagaagatacctattgaaaaatgtaagttttatttacagatcaggccacaggttacaaaattaaaaccaacagcagttttgaattatctgtaccagctagctgaactagccatatcagttcttctttccagtcattcagcattgtagtaagaaaacacttggtaaggcagatggagacatatttatagtctatagtctgtctgggaagctgactgccagacagggcagtttgtcatctttacctagctgacacatctttttccatggcttgctaccgataggcattgaagcctagcaactgttacttcccacgcatgctatcttccaggacttcctgagaaatgcttgcttacagttcaaattctgtttcactttatgtttgagatctcggtatatcttcggattaggttgaatttgcctgttgggtctggaatataccatttttcccaaacatcagtatatgaagcagtccttccccatggcttcaaatgtccattccaatggagtaacttggcagcctttacaaactgaggtgaatatcgttttccagcactggaaccttacatttgagacaaaaatagccacatcgttgcgccatgtgaaattgtgcagaaaacttacttaagggaaacaaagaatataccccatccctgaggatagttctttagataccaattctttactagcttatgccactggttaattctacttaccaaggtggcggacattccacataggatcgatggtagagtgctgttgataaaatacgataagcagaggaggtgttgtgatgctaccagccagggttctgctatacagtccctctcttggtgggacagaaaacaaatgtttgttagtgaaaagtactgactaactcctgttagtcaagactctaggaattgaaatacaacagtttttcacagctaggccagttacatacttactctacattgagtttcatccatttttccagttggttagttatattctgtcgtttccattccgtcaggtttgcaacaaaaactccaggattaaatgagcaagtgctggctttcatggaaagcttacgaattctttcctttttatagtcaagatagccaatgtaattgtactaaaaacacaaataggatatatgtacttactgcttcaaacaaaatagatacaattttatagccagtagagagaagagctgttaaactgacttcttcagattagaaaataaatatttgaaattccaagttagaataggaacctagatgttgacataataaaccagatgttcaagaacaattaggctgtcaagtccatgaagaagtctacagaaaagcaggcttgagttttgggatgaaatgattggggagtgtaaattgcagcaaaagagttccctgaatttgcaacctcttcccattaaacaatattgtaggaagaggggtgtttggtaagcaatttacctggtttcctgctccacggatgacaactttagtagaggctgaatcacaatcttctgaaaatgcagctgcatgtcctggcttcagtgctgtattgtaaagggcaagaatatcacctgaaatagacaagatgttaagatttacatttccgttgccttgagagttccctgttactcccacttctccctatggtgaccttttatagaagaccataaataaaccactacagcccactgtagcccattgttttatttagcaattgtacccaatctgggtggagacagcactcatggtgacatttttgatac

SEQ ID NO: 357362 - DNA, 4583 bp, Homo sapiens
gcggccgccaagcgatccctgctccgcgcgacactgcgtgcccgcgcacgcagagaggcggtgacgcactttacggcggcagcgtaagtgcgtgacgctcgtcagtggcttcagttcacacgtggcgccagcggaggcaggttgctgtgtttgtgcttccttctacagccaatatgaaaaggcctagtaagtggggtcgggaggcgggcgtggagggacccacgtctggaagttgctgcagccaccacgacgctcttctacggctacggctttgtctctgctggtatgggggtgggagcctacgcgtaggccttggccctatttcctggtagaaccgagagttggaagtccctacggcgatcatgttaaccgcgcgggctcattctgcggaacgaagccgggcagagggtggggaagactaggctagattttcgtaaggaagcagcgtctgagccaggtttgaggcccaatattttctttccgtggccacgtgcagactggcccaggtgagagctgagaatcgcctcccagactcagtgttcctctcctgccttatgattcgtgctgtttgacacgaagtggttgtcgttttgtgtctcatacgctgttgtgtatgatcccattctaatattgtgagggtaagtgcagggaattttgactccattctggatctactgaatttaattctctgggatttgaaagtagcacgtatgtttgcattaggcatttcgcattagacttaacgttaggtttggtagccaataacacaagaaaaggatataactccatagtgcgttaacccagaactaatcatttgggttaacagatttgtgatgtgtttctttgtagagttaaagaaagcaagtaaacgcatgacctgccataagcggtataaaatccaaaaaaaggttcgagaacatcatcgaaaattaagaaaggaggctaaaaagcggggtcacaagaagcctaggaaagacccaggagttccaaacagtgctccctttaaggaggctcttcttagggaagctgagctaaggaaacagaggcttgaagaactaaaacagcagcagaaacttgacaggcagaaggaactagaaaagaaaagaaaacttgaaactaatcctgatattaagccatcaaatgtggaacctatggaaaaggagtttgggctttgcaaaactgagaacaaagccaagtcgggcaaacagaattcaaagaagctgtactgccaagaacttaaaaaggtgattgaagcctccgatgttgtcctagaggtgttggatgccagagatcctcttggttgcagatgtcctcaggtagaagaggccattgtccagagtggacagaaaaagctggtacttatattaaataaatcagatctggtaccaaaggagaatttggagagctggctaaattatttgaagaaagaattgccaacagtggtgttcagagcctcaacaaaaccaaaggataaagggaagataaccaagcgtgtgaaggcaaagaagaatgctgctccattcagaagtgaagtctgctttgggaaagagggcctttggaaacttcttggaggttttcaggaaacttgcagcaaagccattcgggttggagtaattggtttcccaaatgtggggaaaagcagcattatcaatagcttaaaacaagaacagatgtgtaatgttggtgtatccatggggcttacaaggagcatgcaagttgtccccttggacaaacagatcacaatcatagatagtccgagcttcatcgtatctccacttaattcctcctctgcgcttgctctgcgaagtccagcaagtattgaagtagtaaaaccgatggaggctgccagtgccatcctttcccaggctgatgctcgacaggtaaaaggaccccttctcatgagctccttggagccatcttctttcatcataagcattttgagtagaaaaatcttggaagtgttttaaagtactggcatgtcagatgaaggacagctcctttgtttggttttttttttaaggtagtactgaaatatactgtcccaggctacaggaattctctggaattttttactgtgcttgctcagagaagaggtatgcaccaaaaaggtggaatcccaaatgttgaaggtgctgccaaactgctgtggtctgagtggacaggtgcctcattagcttactattgccatccccctacatcttggactcctcctccatattttaatgagagtattgtggtagacatgaaaagcggcttcaatctggaagaactggaaaagaacaatgcacagagcataagagccatcaagggccctcatttggccaatagcatccttttccagtcttccggtctgacaaatggaataatagaagaaaaggacatacatgaagaattgccaaaacggaaagaaaggaagcaggaggagagggaggatgacaaagacagtgaccaggaaactgttgatgaagaagttgatgaaaacagctcaggcatgtttgctgcagaagagacaggggaggcactgtctgaggagactacagcaggtgaacagtctacaaggtcttttatcttggataaaatcattgaagaggatgatgcttatgacttcagtacagattatgtgtaacagaacaatggctttttatgattttttttttaacattttaagcagactgctaaactgttctctgtataagttatggtatgcatgagctgtgtaaattttgtgaatatgtattatattaaaaccaggcaacttggaatccctaaattctgtaaaaagacaattcatctcattgtgagtggaagtagttatctggaataaaaaaagaagatacctattgaaaaatgtaagttttatttacagatcaggccacaggttacaaaattaaaaccaacagcagttttgaattatctgtaccagctagctgaactagccatatcagttcttctttccagtcattcagcattgtagtaagaaaacacttggtaaggcagatggagacatatttatagtctatagtctgtctgggaagctgactgccagacagggcagtttgtcatctttacctagctgacacatctttttccatggcttgctaccgataggcattgaagcctagcaactgttacttcccacgcatgctatcttccaggacttcctgagaaatgcttgcttacagttcaaattctgtttcactttatgtttgagatctcggtatatcttcggattaggttgaatttgcctgttgggtctggaatataccatttttcccaaacatcagtatatgaagcagtccttccccatggcttcaaatgtccattccaatggagtaacttggcagcctttacaaactgaggtgaatatcgttttccagcactggaaccttacatttgagacaaaaatagccacatcgttgcgccatgtgaaattgtgcagaaaacttacttaagggaaacaaagaatataccccatccctgaggatagttctttagataccaattctttactagcttatgccactggttaattctacttaccaaggtggcggacattccacataggatcgatggtagagtgctgttgataaaatacgataagcagaggaggtgttgtgatgctaccagccagggttctgctatacagtccctctcttggtgggacagaaaacaaatgtttgttagtgaaaagtactgactaactcctgttagtcaagactctaggaattgaaatacaacagtttttcacagctaggccagttacatacttactctacattgagtttcatccatttttccagttggttagttatattctgtcgtttccattccgtcaggtttgcaacaaaaactccaggattaaatgagcaagtgctggctttcatggaaagcttacgaattctttcctttttatagtcaagatagccaatgtaattgtactaaaaacacaaataggatatatgtacttactgcttcaaacaaaatagatacaattttatagccagtagagagaagagctgttaaactgacttcttcagattagaaaataaatatttgaaattccaagttagaataggaacctagatgttgacataataaaccagatgttcaagaacaattaggctgtcaagtccatgaagaagtctacagaaaagcaggcttgagttttgggatgaaatgattggggagtgtaaattgcagcaaaagagttccctgaatttgcaacctcttcccattaaacaatattgtaggaagaggggtgtttggtaagcaatttacctggtttcctgctccacggatgacaactttagtagaggctgaatcacaatcttctgaaaatgcagctgcatgtcctggcttcagtgctgtattgtaaagggcaagaatatcacctgaaatagacaagatgttaagatttacatttccgttgccttgagagttccctgttactcccacttctccctatggtgaccttttatagaagaccataaataaaccactacagcccactgtagcccattgttttatttagcaattgtacccaatctgggtggagacagcactcatggtgacatttttgatac

SEQ ID NO: 357363 - DNA, 4095 bp, Homo sapiens
gcggccgccaagcgatccctgctccgcgcgacactgcgtgcccgcgcacgcagagaggcggtgacgcactttacggcggcagcgtaagtgcgtgacgctcgtcagtggcttcagttcacacgtggcgccagcggaggcaggttgctgtgtttgtgcttccttctacagccaatatgaaaaggcctagtaagtggggtcgggaggcgggcgtggagggacccacgtctggaagttgctgcagccaccacgacgctcttctacggctacggctttgtctctgctgagttaaagaaagcaagtaaacgcatgacctgccataagcggtataaaatccaaaaaaaggttcgagaacatcatcgaaaattaagaaaggaggctaaaaagcggggtcacaagaagcctaggaaagacccaggagttccaaacagtgctccctttaaggaggctcttcttagggaagctgagctaaggaaacagaggcttgaagaactaaaacagcagcagaaacttgacaggcagaaggaactagaaaagaaaagaaaacttgaaactaatcctgatattaagccatcaaatgtggaacctatggaaaaggagtttgggctttgcaaaactgagaacaaagccaagtcgggcaaacagaattcaaagaagctgtactgccaagaacttaaaaaggtgattgaagcctccgatgttgtcctagaggtgttggatgccagagatcctcttggttgcagatgtcctcaggtagaagaggccattgtccagagtggacagaaaaagctggtacttatattaaataaatcagatctggtaccaaaggagaatttggagagctggctaaattatttgaagaaagaattgccaacagtggtgttcagagcctcaacaaaaccaaaggataaagggaagataaccaagcgtgtgaaggcaaagaagaatgctgctccattcagaagtgaagtctgctttgggaaagagggcctttggaaacttcttggaggttttcaggaaacttgcagcaaagccattcgggttggagtaattggtttcccaaatgtggggaaaagcagcattatcaatagcttaaaacaagaacagatgtgtaatgttggtgtatccatggggcttacaaggagcatgcaagttgtccccttggacaaacagatcacaatcatagatagtccgagcttcatcgtatctccacttaattcctcctctgcgcttgctctgcgaagtccagcaagtattgaagtagtaaaaccgatggaggctgccagtgccatcctttcccaggctgatgctcgacaggtaaaaggaccccttctcatgagctccttggagccatcttctttcatcataagcattttgagtagaaaaatcttggaagtgttttaaagtactggcatgtcagatgaaggacagctcctttgtttggttttttttttaaggtagtactgaaatatactgtcccaggctacaggaattctctggaattttttactgtgcttgctcagagaagaggtatgcaccaaaaaggtggaatcccaaatgttgaaggtgctgccaaactgctgtggtctgagtggacagggtaagctttcttttctgttggcattttggtgaccactagaataaaccttcttttgacacatcttatttttaatatcagtgcctcattagcttactattgccatccccctacatcttggactcctcctccatattttaatgagagtattgtggtagacatgaaaagcggcttcaatctggaagaactggaaaagaacaatgcacagagcataagagccatcaagggccctcatttggccaatagcatccttttccagtcttccggtctgacaaatggaataatagaagaaaaggacatacatgaagaattgccaaaacggaaagaaaggaagcaggaggagagggaggatgacaaagacagtgaccaggaaactgttgatgaagaagttgatgaaaacagctcaggcatgtttgctgcagaagagacaggggaggcactgtctgaggagactacagcaggtgaacagtctacaaggtcttttatcttggataaaatcattgaagaggatgatgcttatgacttcagtacagattatgtgtaacagaacaatggctttttatgattttttttttaacattttaagcagactgctaaactgttctctgtataagttatggtatgcatgagctgtgtaaattttgtgaatatgtattatattaaaaccaggcaacttggaatccctaaattctgtaaaaagacaattcatctcattgtgagtggaagtagttatctggaataaaaaaagaagatacctattgaaaaatgtaagttttatttacagatcaggccacaggttacaaaattaaaaccaacagcagttttgaattatctgtaccagctagctgaactagccatatcagttcttctttccagtcattcagcattgtagtaagaaaacacttggtaaggcagatggagacatatttatagtctatagtctgtctgggaagctgactgccagacagggcagtttgtcatctttacctagctgacacatctttttccatggcttgctaccgataggcattgaagcctagcaactgttacttcccacgcatgctatcttccaggacttcctgagaaatgcttgcttacagttcaaattctgtttcactttatgtttgagatctcggtatatcttcggattaggttgaatttgcctgttgggtctggaatataccatttttcccaaacatcagtatatgaagcagtccttccccatggcttcaaatgtccattccaatggagtaacttggcagcctttacaaactgaggtgaatatcgttttccagcactggaaccttacatttgagacaaaaatagccacatcgttgcgccatgtgaaattgtgcagaaaacttacttaagggaaacaaagaatataccccatccctgaggatagttctttagataccaattctttactagcttatgccactggttaattctacttaccaaggtggcggacattccacataggatcgatggtagagtgctgttgataaaatacgataagcagaggaggtgttgtgatgctaccagccagggttctgctatacagtccctctcttggtgggacagaaaacaaatgtttgttagtgaaaagtactgactaactcctgttagtcaagactctaggaattgaaatacaacagtttttcacagctaggccagttacatacttactctacattgagtttcatccatttttccagttggttagttatattctgtcgtttccattccgtcaggtttgcaacaaaaactccaggattaaatgagcaagtgctggctttcatggaaagcttacgaattctttcctttttatagtcaagatagccaatgtaattgtactaaaaacacaaataggatatatgtacttactgcttcaaacaaaatagatacaattttatagccagtagagagaagagctgttaaactgacttcttcagattagaaaataaatatttgaaattccaagttagaataggaacctagatgttgacataataaaccagatgttcaagaacaattaggctgtcaagtccatgaagaagtctacagaaaagcaggcttgagttttgggatgaaatgattggggagtgtaaattgcagcaaaagagttccctgaatttgcaacctcttcccattaaacaatattgtaggaagaggggtgtttggtaagcaatttacctggtttcctgctccacggatgacaactttagtagaggctgaatcacaatcttctgaaaatgcagctgcatgtcctggcttcagtgctgtattgtaaagggcaagaatatcacctgaaatagacaagatgttaagatttacatttccgttgccttgagagttccctgttactcccacttctccctatggtgaccttttatagaagaccataaataaaccactacagcccactgtagcccattgttttatttagcaattgtacccaatctgggtggagacagcactcatggtgacatttttgatac

SEQ ID NO: 357364 - DNA, 4182 bp, Homo sapiens
gcggccgccaagcgatccctgctccgcgcgacactgcgtgcccgcgcacgcagagaggcggtgacgcactttacggcggcagcgtaagtgcgtgacgctcgtcagtggcttcagttcacacgtggcgccagcggaggcaggttgctgtgtttgtgcttccttctacagccaatatgaaaaggcctagtaagtggggtcgggaggcgggcgtggagggacccacgtctggaagttgctgcagccaccacgacgctcttctacggctacggctttgtctctgctgagttaaagaaagcaagtaaacgcatgacctgccataagcggtataaaatccaaaaaaaggttcgagaacatcatcgaaaattaagaaaggaggctaaaaagcggggtcacaagaagcctaggaaagacccaggagttccaaacagtgctccctttaaggaggctcttcttagggaagctgagctaaggaaacagaggcttgaagaactaaaacagcagcagaaacttgacaggcagaaggaactagaaaagaaaagaaaacttgaaactaatcctgatattaagccatcaaatgtggaacctatggaaaaggagtttgggctttgcaaaactgagaacaaagccaagtcgggcaaacagaattcaaagaagctgtactgccaagaacttaaaaaggtgattgaagcctccgatgttgtcctagaggtgttggatgccagagatcctcttggttgcagatgtcctcaggtagaagaggccattgtccagagtggacagaaaaagctggtacttatattaaataaatcagatctggtaccaaaggagaatttggagagctggctaaattatttgaagaaagaattgccaacagtggtgttcagagcctcaacaaaaccaaaggataaagggaagataaccaagcgtgtgaaggcaaagaagaatgctgctccattcagaagtgaagtctgctttgggaaagagggcctttggaaacttcttggaggttttcaggaaacttgcagcaaagccattcgggttggagtaattggtttcccaaatgtggggaaaagcagcattatcaatagcttaaaacaagaacagatgtgtaatgttggtgtatccatggggcttacaaggagcatgcaagttgtccccttggacaaacagatcacaatcatagatagtccgagcttcatcgtatctccacttaattcctcctctgcgcttgctctgcgaagtccagcaagtattgaagtagtaaaaccgatggaggctgccagtgccatcctttcccaggctgatgctcgacaggtaaaaggaccccttctcatgagctccttggagccatcttctttcatcataagcattttgagtagaaaaatcttggaagtgttttaaagtactggcatgtcagatgaaggacagctcctttgtttggttttttttttaaggtagtactgaaatatactgtcccaggctacaggaattctctggaattttttactgtgcttgctcagagaagaggtatgcaccaaaaaggtggaatcccaaatgttgaaggtgctgccaaactgctgtggtctgagtggacagggtaagctttcttttctgttggcattttggtgaccactagaataaaccttcttttgacacatcttatttttaatatcagtgcctcattagcttactattgccatccccctacatcttggactcctcctccatattttaatgagagtattgtggtagacatgaaaagcggcttcaatctggaagaactggaaaagaacaatgcacagagcataagaggtgagaattgtgtgtcgctgctgtcttcatcagctgacaggccagtggagctcttacctgattacatgggcttgctttctttcccagccatcaagggccctcatttggccaatagcatccttttccagtcttccggtctgacaaatggaataatagaagaaaaggacatacatgaagaattgccaaaacggaaagaaaggaagcaggaggagagggaggatgacaaagacagtgaccaggaaactgttgatgaagaagttgatgaaaacagctcaggcatgtttgctgcagaagagacaggggaggcactgtctgaggagactacagcaggtgaacagtctacaaggtcttttatcttggataaaatcattgaagaggatgatgcttatgacttcagtacagattatgtgtaacagaacaatggctttttatgattttttttttaacattttaagcagactgctaaactgttctctgtataagttatggtatgcatgagctgtgtaaattttgtgaatatgtattatattaaaaccaggcaacttggaatccctaaattctgtaaaaagacaattcatctcattgtgagtggaagtagttatctggaataaaaaaagaagatacctattgaaaaatgtaagttttatttacagatcaggccacaggttacaaaattaaaaccaacagcagttttgaattatctgtaccagctagctgaactagccatatcagttcttctttccagtcattcagcattgtagtaagaaaacacttggtaaggcagatggagacatatttatagtctatagtctgtctgggaagctgactgccagacagggcagtttgtcatctttacctagctgacacatctttttccatggcttgctaccgataggcattgaagcctagcaactgttacttcccacgcatgctatcttccaggacttcctgagaaatgcttgcttacagttcaaattctgtttcactttatgtttgagatctcggtatatcttcggattaggttgaatttgcctgttgggtctggaatataccatttttcccaaacatcagtatatgaagcagtccttccccatggcttcaaatgtccattccaatggagtaacttggcagcctttacaaactgaggtgaatatcgttttccagcactggaaccttacatttgagacaaaaatagccacatcgttgcgccatgtgaaattgtgcagaaaacttacttaagggaaacaaagaatataccccatccctgaggatagttctttagataccaattctttactagcttatgccactggttaattctacttaccaaggtggcggacattccacataggatcgatggtagagtgctgttgataaaatacgataagcagaggaggtgttgtgatgctaccagccagggttctgctatacagtccctctcttggtgggacagaaaacaaatgtttgttagtgaaaagtactgactaactcctgttagtcaagactctaggaattgaaatacaacagtttttcacagctaggccagttacatacttactctacattgagtttcatccatttttccagttggttagttatattctgtcgtttccattccgtcaggtttgcaacaaaaactccaggattaaatgagcaagtgctggctttcatggaaagcttacgaattctttcctttttatagtcaagatagccaatgtaattgtactaaaaacacaaataggatatatgtacttactgcttcaaacaaaatagatacaattttatagccagtagagagaagagctgttaaactgacttcttcagattagaaaataaatatttgaaattccaagttagaataggaacctagatgttgacataataaaccagatgttcaagaacaattaggctgtcaagtccatgaagaagtctacagaaaagcaggcttgagttttgggatgaaatgattggggagtgtaaattgcagcaaaagagttccctgaatttgcaacctcttcccattaaacaatattgtaggaagaggggtgtttggtaagcaatttacctggtttcctgctccacggatgacaactttagtagaggctgaatcacaatcttctgaaaatgcagctgcatgtcctggcttcagtgctgtattgtaaagggcaagaatatcacctgaaatagacaagatgttaagatttacatttccgttgccttgagagttccctgttactcccacttctccctatggtgaccttttatagaagaccataaataaaccactacagcccactgtagcccattgttttatttagcaattgtacccaatctgggtggagacagcactcatggtgacatttttgatac

SEQ ID NO: 357365 - DNA, 4532 bp, Homo sapiens
gcggccgccaagcgatccctgctccgcgcgacactgcgtgcccgcgcacgcagagaggcggtgacgcactttacggcggcagcgtaagtgcgtgacgctcgtcagtggcttcagttcacacgtggcgccagcggaggcaggttgctgtgtttgtgcttccttctacagccaatatgaaaaggcctagtaagtggggtcgggaggcgggcgtggagggacccacgtctggaagttgctgcagccaccacgacgctcttctacggctacggctttgtctctgctggtatgggggtgggagcctacgcgtaggccttggccctatttcctggtagaaccgagagttggaagtccctacggcgatcatgttaaccgcgcgggctcattctgcggaacgaagccgggcagagggtggggaagactaggctagattttcgtaaggaagcagcgtctgagccaggtttgaggcccaatattttctttccgtggccacgtgcagactggcccaggtgagagctgagaatcgcctcccagactcagtgttcctctcctgccttatgattcgtgctgtttgacacgaagtggttgtcgttttgtgtctcatacgctgttgtgtatgatcccattctaatattgtgagggtaagtgcagggaattttgactccattctggatctactgaatttaattctctgggatttgaaagtagcacgtatgtttgcattaggcatttcgcattagacttaacgttaggtttggtagccaataacacaagaaaaggatataactccatagtgcgttaacccagaactaatcatttgggttaacagatttgtgatgtgtttctttgtagagttaaagaaagcaagtaaacgcatgacctgccataagcggtataaaatccaaaaaaaggttcgagaacatcatcgaaaattaagaaaggaggctaaaaagcggggtcacaagaagcctaggaaagacccaggagttccaaacagtgctccctttaaggaggctcttcttagggaagctgagctaaggaaacagaggcttgaagaactaaaacagcagcagaaacttgacaggcagaaggaactagaaaagaaaagaaaacttgaaactaatcctgatattaagccatcaaatgtggaacctatggaaaaggagtttgggctttgcaaaactgagaacaaagccaagtcgggcaaacagaattcaaagaagctgtactgccaagaacttaaaaaggtgattgaagcctccgatgttgtcctagaggtgttggatgccagagatcctcttggttgcagatgtcctcaggtagaagaggccattgtccagagtggacagaaaaagctggtacttatattaaataaatcagatctggtaccaaaggagaatttggagagctggctaaattatttgaagaaagaattgccaacagtggtgttcagagcctcaacaaaaccaaaggataaagggaagataaccaagcgtgtgaaggcaaagaagaatgctgctccattcagaagtgaagtctgctttgggaaagagggcctttggaaacttcttggaggttttcaggaaacttgcagcaaagccattcgggttggagtaattggtttcccaaatgtggggaaaagcagcattatcaatagcttaaaacaagaacagatgtgtaatgttggtgtatccatggggcttacaaggagcatgcaagttgtccccttggacaaacagatcacaatcatagatagtccgagcttcatcgtatctccacttaattcctcctctgcgcttgctctgcgaagtccagcaagtattgaagtagtaaaaccgatggaggctgccagtgccatcctttcccaggctgatgctcgacaggtagtactgaaatatactgtcccaggctacaggaattctctggaattttttactgtgcttgctcagagaagaggtatgcaccaaaaaggtggaatcccaaatgttgaaggtgctgccaaactgctgtggtctgagtggacaggtgcctcattagcttactattgccatccccctacatcttggactcctcctccatattttaatgagagtattgtggtagacatgaaaagcggcttcaatctggaagaactggaaaagaacaatgcacagagcataagagccatcaagggccctcatttggccaatagcatccttttccagtcttccggtctgacaaatggaataatagaagaaaaggacatacatgaagaattgccaaaacggaaagaaaggaagcaggaggagagggaggatgacaaagacagtgaccaggaaactgttgatgaagaagttgatgaaaacagctcaggcatgtttgctgcagaagagacaggggaggcactgtctgaggagactacagcaggtgaggcaggcaaaaggggttctaacgaagcagcatggtatagaatcacttttactttttgaaaatctctttattttcctgcaatataggtgaacagtctacaaggtcttttatcttggataaaatcattgaagaggatgatgcttatgacttcagtacagattatgtgtaacagaacaatggctttttatgattttttttttaacattttaagcagactgctaaactgttctctgtataagttatggtatgcatgagctgtgtaaattttgtgaatatgtattatattaaaaccaggcaacttggaatccctaaattctgtaaaaagacaattcatctcattgtgagtggaagtagttatctggaataaaaaaagaagatacctattgaaaaatgtaagttttatttacagatcaggccacaggttacaaaattaaaaccaacagcagttttgaattatctgtaccagctagctgaactagccatatcagttcttctttccagtcattcagcattgtagtaagaaaacacttggtaaggcagatggagacatatttatagtctatagtctgtctgggaagctgactgccagacagggcagtttgtcatctttacctagctgacacatctttttccatggcttgctaccgataggcattgaagcctagcaactgttacttcccacgcatgctatcttccaggacttcctgagaaatgcttgcttacagttcaaattctgtttcactttatgtttgagatctcggtatatcttcggattaggttgaatttgcctgttgggtctggaatataccatttttcccaaacatcagtatatgaagcagtccttccccatggcttcaaatgtccattccaatggagtaacttggcagcctttacaaactgaggtgaatatcgttttccagcactggaaccttacatttgagacaaaaatagccacatcgttgcgccatgtgaaattgtgcagaaaacttacttaagggaaacaaagaatataccccatccctgaggatagttctttagataccaattctttactagcttatgccactggttaattctacttaccaaggtggcggacattccacataggatcgatggtagagtgctgttgataaaatacgataagcagaggaggtgttgtgatgctaccagccagggttctgctatacagtccctctcttggtgggacagaaaacaaatgtttgttagtgaaaagtactgactaactcctgttagtcaagactctaggaattgaaatacaacagtttttcacagctaggccagttacatacttactctacattgagtttcatccatttttccagttggttagttatattctgtcgtttccattccgtcaggtttgcaacaaaaactccaggattaaatgagcaagtgctggctttcatggaaagcttacgaattctttcctttttatagtcaagatagccaatgtaattgtactaaaaacacaaataggatatatgtacttactgcttcaaacaaaatagatacaattttatagccagtagagagaagagctgttaaactgacttcttcagattagaaaataaatatttgaaattccaagttagaataggaacctagatgttgacataataaaccagatgttcaagaacaattaggctgtcaagtccatgaagaagtctacagaaaagcaggcttgagttttgggatgaaatgattggggagtgtaaattgcagcaaaagagttccctgaatttgcaacctcttcccattaaacaatattgtaggaagaggggtgtttggtaagcaatttacctggtttcctgctccacggatgacaactttagtagaggctgaatcacaatcttctgaaaatgcagctgcatgtcctggcttcagtgctgtattgtaaagggcaagaatatcacctgaaatagacaagatgttaagatttacatttccgttgccttgagagttccctgttactcccacttctccctatggtgaccttttatagaagaccataaataaaccactacagcccactgtagcccattgttttatttagcaattgtacccaatctgggtggagacagcactcatggtgacatttttgatac

SEQ ID NO: 357366 - DNA, 4672 bp, Homo sapiens
gcggccgccaagcgatccctgctccgcgcgacactgcgtgcccgcgcacgcagagaggcggtgacgcactttacggcggcagcgtaagtgcgtgacgctcgtcagtggcttcagttcacacgtggcgccagcggaggcaggttgctgtgtttgtgcttccttctacagccaatatgaaaaggcctagtaagtggggtcgggaggcgggcgtggagggacccacgtctggaagttgctgcagccaccacgacgctcttctacggctacggctttgtctctgctggtatgggggtgggagcctacgcgtaggccttggccctatttcctggtagaaccgagagttggaagtccctacggcgatcatgttaaccgcgcgggctcattctgcggaacgaagccgggcagagggtggggaagactaggctagattttcgtaaggaagcagcgtctgagccaggtttgaggcccaatattttctttccgtggccacgtgcagactggcccaggtgagagctgagaatcgcctcccagactcagtgttcctctcctgccttatgattcgtgctgtttgacacgaagtggttgtcgttttgtgtctcatacgctgttgtgtatgatcccattctaatattgtgagggtaagtgcagggaattttgactccattctggatctactgaatttaattctctgggatttgaaagtagcacgtatgtttgcattaggcatttcgcattagacttaacgttaggtttggtagccaataacacaagaaaaggatataactccatagtgcgttaacccagaactaatcatttgggttaacagatttgtgatgtgtttctttgtagagttaaagaaagcaagtaaacgcatgacctgccataagcggtataaaatccaaaaaaaggttcgagaacatcatcgaaaattaagaaaggaggctaaaaagcggggtcacaagaagcctaggaaagacccaggagttccaaacagtgctccctttaaggaggctcttcttagggaagctgagctaaggaaacagaggcttgaagaactaaaacagcagcagaaacttgacaggcagaaggaactagaaaagaaaagaaaacttgaaactaatcctgatattaagccatcaaatgtggaacctatggaaaaggagtttgggctttgcaaaactgagaacaaagccaagtcgggcaaacagaattcaaagaagctgtactgccaagaacttaaaaaggtgattgaagcctccgatgttgtcctagaggtgttggatgccagagatcctcttggttgcagatgtcctcaggtagaagaggccattgtccagagtggacagaaaaagctggtacttatattaaataaatcagatctggtaccaaaggagaatttggagagctggctaaattatttgaagaaagaattgccaacagtggtgttcagagcctcaacaaaaccaaaggataaagggaagataaccaagcgtgtgaaggcaaagaagaatgctgctccattcagaagtgaagtctgctttgggaaagagggcctttggaaacttcttggaggttttcaggaaacttgcagcaaagccattcgggttggagtaattggtttcccaaatgtggggaaaagcagcattatcaatagcttaaaacaagaacagatgtgtaatgttggtgtatccatggggcttacaaggagcatgcaagttgtccccttggacaaacagatcacaatcatagatagtccgagcttcatcgtatctccacttaattcctcctctgcgcttgctctgcgaagtccagcaagtattgaagtagtaaaaccgatggaggctgccagtgccatcctttcccaggctgatgctcgacaggtagtactgaaatatactgtcccaggctacaggaattctctggaattttttactgtgcttgctcagagaagaggtatgcaccaaaaaggtggaatcccaaatgttgaaggtgctgccaaactgctgtggtctgagtggacaggtgcctcattagcttactattgccatccccctacatcttggactcctcctccatattttaatgagagtattgtggtagacatgaaaagcggcttcaatctggaagaactggaaaagaacaatgcacagagcataagagccatcaagggccctcatttggccaatagcatccttttccagtcttccggtctgacaaatggaataatagaagaaaaggacatacatgaagaattgccaaaacggaaagaaaggaagcaggaggagagggaggatgacaaagacagtgaccaggaaactgttgatgaagaagttgatgtaagtgtgtcctccatgagttaaaactgaagtgagttttctagcattataatacataatggaaggaactgaagataggaaatatttgaggcttgtgatccattagccttaattttgcacatcccgttatatgtacctccaaagagttaatttttcaggtacataactacttggattaaatgagcagacaagggctactaatccagcactatttttctttgtcacacaggaaaacagctcaggcatgtttgctgcagaagagacaggggaggcactgtctgaggagactacagcaggtgaacagtctacaaggtcttttatcttggataaaatcattgaagaggatgatgcttatgacttcagtacagattatgtgtaacagaacaatggctttttatgattttttttttaacattttaagcagactgctaaactgttctctgtataagttatggtatgcatgagctgtgtaaattttgtgaatatgtattatattaaaaccaggcaacttggaatccctaaattctgtaaaaagacaattcatctcattgtgagtggaagtagttatctggaataaaaaaagaagatacctattgaaaaatgtaagttttatttacagatcaggccacaggttacaaaattaaaaccaacagcagttttgaattatctgtaccagctagctgaactagccatatcagttcttctttccagtcattcagcattgtagtaagaaaacacttggtaaggcagatggagacatatttatagtctatagtctgtctgggaagctgactgccagacagggcagtttgtcatctttacctagctgacacatctttttccatggcttgctaccgataggcattgaagcctagcaactgttacttcccacgcatgctatcttccaggacttcctgagaaatgcttgcttacagttcaaattctgtttcactttatgtttgagatctcggtatatcttcggattaggttgaatttgcctgttgggtctggaatataccatttttcccaaacatcagtatatgaagcagtccttccccatggcttcaaatgtccattccaatggagtaacttggcagcctttacaaactgaggtgaatatcgttttccagcactggaaccttacatttgagacaaaaatagccacatcgttgcgccatgtgaaattgtgcagaaaacttacttaagggaaacaaagaatataccccatccctgaggatagttctttagataccaattctttactagcttatgccactggttaattctacttaccaaggtggcggacattccacataggatcgatggtagagtgctgttgataaaatacgataagcagaggaggtgttgtgatgctaccagccagggttctgctatacagtccctctcttggtgggacagaaaacaaatgtttgttagtgaaaagtactgactaactcctgttagtcaagactctaggaattgaaatacaacagtttttcacagctaggccagttacatacttactctacattgagtttcatccatttttccagttggttagttatattctgtcgtttccattccgtcaggtttgcaacaaaaactccaggattaaatgagcaagtgctggctttcatggaaagcttacgaattctttcctttttatagtcaagatagccaatgtaattgtactaaaaacacaaataggatatatgtacttactgcttcaaacaaaatagatacaattttatagccagtagagagaagagctgttaaactgacttcttcagattagaaaataaatatttgaaattccaagttagaataggaacctagatgttgacataataaaccagatgttcaagaacaattaggctgtcaagtccatgaagaagtctacagaaaagcaggcttgagttttgggatgaaatgattggggagtgtaaattgcagcaaaagagttccctgaatttgcaacctcttcccattaaacaatattgtaggaagaggggtgtttggtaagcaatttacctggtttcctgctccacggatgacaactttagtagaggctgaatcacaatcttctgaaaatgcagctgcatgtcctggcttcagtgctgtattgtaaagggcaagaatatcacctgaaatagacaagatgttaagatttacatttccgttgccttgagagttccctgttactcccacttctccctatggtgaccttttatagaagaccataaataaaccactacagcccactgtagcccattgttttatttagcaattgtacccaatctgggtggagacagcactcatggtgacatttttgatac

SEQ ID NO: 357367 - DNA, 3993 bp, Homo sapiens
gcggccgccaagcgatccctgctccgcgcgacactgcgtgcccgcgcacgcagagaggcggtgacgcactttacggcggcagcgtaagtgcgtgacgctcgtcagtggcttcagttcacacgtggcgccagcggaggcaggttgctgtgtttgtgcttccttctacagccaatatgaaaaggcctagtaagtggggtcgggaggcgggcgtggagggacccacgtctggaagttgctgcagccaccacgacgctcttctacggctacggctttgtctctgctggtatgggggtgggagcctacgcgtaggccttggccctatttcctggtagaaccgagagttggaagtccctacggcgatcatgttaaccgcgcgggctcattctgcggaacgaagccgggcagagggtggggaagactaggctagattttcgtaaggaagcagcgtctgagccaggtttgaggcccaatattttctttccgtggccacgtgcagactggcccaggtgagagctgagaatcgcctcccagactcagtgttcctctcctgccttatgattcgtgctgtttgacacgaagtggttgtcgttttgtgtctcatacgctgttgtgtatgatcccattctaatattgtgagggtaagtgcagggaattttgactccattctggatctactgaatttaattctctgggatttgaaagtagcacgtatgtttgcattaggcatttcgcattagacttaacgttaggtttggtagccaataacacaagaaaaggatataactccatagtgcgttaacccagaactaatcatttgggttaacagatttgtgatgtgtttctttgtagagttaaagaaagcaagtaaacgcatgacctgccataagcggtataaaatccaaaaaaaggttcgagaacatcatcgaaaattaagaaaggaggctaaaaagcggggtcacaagaagcctaggaaagacccaggagttccaaacagtgctccctttaaggaggctcttcttagggaagctgagctaaggaaacagaggcttgaagaactaaaacagcagcagaaacttgacaggcagaaggaactagaaaagaaaagaaaacttgaaactaatcctgatattaagccatcaaatgtggaacctatggaaaaggagtttgggctttgcaaaactgagaacaaagccaagtcgggcaaacagaattcaaagaagctgtactgccaagaacttaaaaaggtgattgaagcctccgatgttgtcctagaggtgttggatgccagagatcctcttggttgcagatgtcctcaggtagaagaggccattgtccagagtggacagaaaaagctggtacttatattaaataaatcagatctggtaccaaaggagaatttggagagctggctaaattatttgaagaaagaattgccaacagtggtgttcagagcctcaacaaaaccaaaggataaagggaagataaccaagcgtgtgaaggcaaagaagaatgctgctccattcagaagtgaagtctgctttgggaaagagggcctttggaaacttcttggaggttttcaggaaacttgcagcaaagccattcgggttggagtaattggtttcccaaatgtggggaaaagcagcattatcaatagcttaaaacaagaacagatgtgtaatgttggtgtatccatggggcttacaaggagcatgcaagttgtccccttggacaaacagatcacaatcatagatagtccgagtctgacaaatggaataatagaagaaaaggacatacatgaagaattgccaaaacggaaagaaaggaagcaggaggagagggaggatgacaaagacagtgaccaggaaactgttgatgaagaagttgatgaaaacagctcaggcatgtttgctgcagaagagacaggggaggcactgtctgaggagactacagcaggtgaacagtctacaaggtcttttatcttggataaaatcattgaagaggatgatgcttatgacttcagtacagattatgtgtaacagaacaatggctttttatgattttttttttaacattttaagcagactgctaaactgttctctgtataagttatggtatgcatgagctgtgtaaattttgtgaatatgtattatattaaaaccaggcaacttggaatccctaaattctgtaaaaagacaattcatctcattgtgagtggaagtagttatctggaataaaaaaagaagatacctattgaaaaatgtaagttttatttacagatcaggccacaggttacaaaattaaaaccaacagcagttttgaattatctgtaccagctagctgaactagccatatcagttcttctttccagtcattcagcattgtagtaagaaaacacttggtaaggcagatggagacatatttatagtctatagtctgtctgggaagctgactgccagacagggcagtttgtcatctttacctagctgacacatctttttccatggcttgctaccgataggcattgaagcctagcaactgttacttcccacgcatgctatcttccaggacttcctgagaaatgcttgcttacagttcaaattctgtttcactttatgtttgagatctcggtatatcttcggattaggttgaatttgcctgttgggtctggaatataccatttttcccaaacatcagtatatgaagcagtccttccccatggcttcaaatgtccattccaatggagtaacttggcagcctttacaaactgaggtgaatatcgttttccagcactggaaccttacatttgagacaaaaatagccacatcgttgcgccatgtgaaattgtgcagaaaacttacttaagggaaacaaagaatataccccatccctgaggatagttctttagataccaattctttactagcttatgccactggttaattctacttaccaaggtggcggacattccacataggatcgatggtagagtgctgttgataaaatacgataagcagaggaggtgttgtgatgctaccagccagggttctgctatacagtccctctcttggtgggacagaaaacaaatgtttgttagtgaaaagtactgactaactcctgttagtcaagactctaggaattgaaatacaacagtttttcacagctaggccagttacatacttactctacattgagtttcatccatttttccagttggttagttatattctgtcgtttccattccgtcaggtttgcaacaaaaactccaggattaaatgagcaagtgctggctttcatggaaagcttacgaattctttcctttttatagtcaagatagccaatgtaattgtactaaaaacacaaataggatatatgtacttactgcttcaaacaaaatagatacaattttatagccagtagagagaagagctgttaaactgacttcttcagattagaaaataaatatttgaaattccaagttagaataggaacctagatgttgacataataaaccagatgttcaagaacaattaggctgtcaagtccatgaagaagtctacagaaaagcaggcttgagttttgggatgaaatgattggggagtgtaaattgcagcaaaagagttccctgaatttgcaacctcttcccattaaacaatattgtaggaagaggggtgtttggtaagcaatttacctggtttcctgctccacggatgacaactttagtagaggctgaatcacaatcttctgaaaatgcagctgcatgtcctggcttcagtgctgtattgtaaagggcaagaatatcacctgaaatagacaagatgttaagatttacatttccgttgccttgagagttccctgttactcccacttctccctatggtgaccttttatagaagaccataaataaaccactacagcccactgtagcccattgttttatttagcaattgtacccaatctgggtggagacagcactcatggtgacatttttgatac

SEQ ID NO: 357368 - DNA, 4837 bp, Homo sapiens
gcggccgccaagcgatccctgctccgcgcgacactgcgtgcccgcgcacgcagagaggcggtgacgcactttacggcggcagcgtaagtgcgtgacgctcgtcagtggcttcagttcacacgtggcgccagcggaggcaggttgctgtgtttgtgcttccttctacagccaatatgaaaaggcctagtaagtggggtcgggaggcgggcgtggagggacccacgtctggaagttgctgcagccaccacgacgctcttctacggctacggctttgtctctgctggtatgggggtgggagcctacgcgtaggccttggccctatttcctggtagaaccgagagttggaagtccctacggcgatcatgttaaccgcgcgggctcattctgcggaacgaagccgggcagagggtggggaagactaggctagattttcgtaaggaagcagcgtctgagccaggtttgaggcccaatattttctttccgtggccacgtgcagactggcccaggtgagagctgagaatcgcctcccagactcagtgttcctctcctgccttatgattcgtgctgtttgacacgaagtggttgtcgttttgtgtctcatacgctgttgtgtatgatcccattctaatattgtgagggtaagtgcagggaattttgactccattctggatctactgaatttaattctctgggatttgaaagtagcacgtatgtttgcattaggcatttcgcattagacttaacgttaggtttggtagccaataacacaagaaaaggatataactccatagtgcgttaacccagaactaatcatttgggttaacagatttgtgatgtgtttctttgtagagttaaagaaagcaagtaaacgcatgacctgccataagcggtataaaatccaaaaaaaggttcgagaacatcatcgaaaattaagaaaggaggctaaaaagcggggtcacaagaagcctaggaaagacccaggagttccaaacagtgctccctttaaggaggctcttcttagggaagctgagctaaggaaacagaggcttgaagaactaaaacagcagcagaaacttgacaggcagaaggaactagaaaagaaaagaaaacttgaaactaatcctgatattaagccatcaaatgtggaacctatggaaaaggagtttgggctttgcaaaactgagaacaaagccaagtcgggcaaacagaattcaaagaagctgtactgccaagaacttaaaaaggtgattgaagcctccgatgttgtcctagaggtgttggatgccagagatcctcttggttgcagatgtcctcaggtagaagaggccattgtccagagtggacagaaaaagctggtacttatattaaataaatcagatctggtaccaaaggagaatttggagagctggctaaattatttgaagaaagaattgccaacagtggtgttcagagcctcaacaaaaccaaaggataaagggaagataaccaagcgtgtgaaggcaaagaagaatgctgctccattcagaagtgaagtctgctttgggaaagagggcctttggaaacttcttggaggttttcaggaaacttgcagcaaagccattcgggttggagtaattggtttcccaaatgtggggaaaagcagcattatcaatagcttaaaacaagaacagatgtgtaatgttggtgtatccatggggcttacaaggagcatgcaagttgtccccttggacaaacagatcacaatcatagatagtccgagcttcatcgtatctccacttaattcctcctctgcgcttgctctgcgaagtccagcaagtattgaagtagtaaaaccgatggaggctgccagtgccatcctttcccaggctgatgctcgacaggtagtactgaaatatactgtcccaggctacaggaattctctggaattttttactgtgcttgctcagagaagaggtatgcaccaaaaaggtggaatcccaaatgttgaaggtgctgccaaactgctgtggtctgagtggacagggtaagctttcttttctgttggcattttggtgaccactagaataaaccttcttttgacacatcttatttttaatatcagtgcctcattagcttactattgccatccccctacatcttggactcctcctccatattttaatgagagtattgtggtagacatgaaaagcggcttcaatctggaagaactggaaaagaacaatgcacagagcataagaggtgagaattgtgtgtcgctgctgtcttcatcagctgacaggccagtggagctcttacctgattacatgggcttgctttctttcccagccatcaagggccctcatttggccaatagcatccttttccagtcttccggtctgacaaatggaataatagaagaaaaggacatacatgaagaattgccaaaacggaaagaaaggaagcaggaggagagggaggatgacaaagacagtgaccaggaaactgttgatgaagaagttgatgtaagtgtgtcctccatgagttaaaactgaagtgagttttctagcattataatacataatggaaggaactgaagataggaaatatttgaggcttgtgatccattagccttaattttgcacatcccgttatatgtacctccaaagagttaatttttcaggtacataactacttggattaaatgagcagacaagggctactaatccagcactatttttctttgtcacacaggaaaacagctcaggcatgtttgctgcagaagagacaggggaggcactgtctgaggagactacagcaggtgaacagtctacaaggtcttttatcttggataaaatcattgaagaggatgatgcttatgacttcagtacagattatgtgtaacagaacaatggctttttatgattttttttttaacattttaagcagactgctaaactgttctctgtataagttatggtatgcatgagctgtgtaaattttgtgaatatgtattatattaaaaccaggcaacttggaatccctaaattctgtaaaaagacaattcatctcattgtgagtggaagtagttatctggaataaaaaaagaagatacctattgaaaaatgtaagttttatttacagatcaggccacaggttacaaaattaaaaccaacagcagttttgaattatctgtaccagctagctgaactagccatatcagttcttctttccagtcattcagcattgtagtaagaaaacacttggtaaggcagatggagacatatttatagtctatagtctgtctgggaagctgactgccagacagggcagtttgtcatctttacctagctgacacatctttttccatggcttgctaccgataggcattgaagcctagcaactgttacttcccacgcatgctatcttccaggacttcctgagaaatgcttgcttacagttcaaattctgtttcactttatgtttgagatctcggtatatcttcggattaggttgaatttgcctgttgggtctggaatataccatttttcccaaacatcagtatatgaagcagtccttccccatggcttcaaatgtccattccaatggagtaacttggcagcctttacaaactgaggtgaatatcgttttccagcactggaaccttacatttgagacaaaaatagccacatcgttgcgccatgtgaaattgtgcagaaaacttacttaagggaaacaaagaatataccccatccctgaggatagttctttagataccaattctttactagcttatgccactggttaattctacttaccaaggtggcggacattccacataggatcgatggtagagtgctgttgataaaatacgataagcagaggaggtgttgtgatgctaccagccagggttctgctatacagtccctctcttggtgggacagaaaacaaatgtttgttagtgaaaagtactgactaactcctgttagtcaagactctaggaattgaaatacaacagtttttcacagctaggccagttacatacttactctacattgagtttcatccatttttccagttggttagttatattctgtcgtttccattccgtcaggtttgcaacaaaaactccaggattaaatgagcaagtgctggctttcatggaaagcttacgaattctttcctttttatagtcaagatagccaatgtaattgtactaaaaacacaaataggatatatgtacttactgcttcaaacaaaatagatacaattttatagccagtagagagaagagctgttaaactgacttcttcagattagaaaataaatatttgaaattccaagttagaataggaacctagatgttgacataataaaccagatgttcaagaacaattaggctgtcaagtccatgaagaagtctacagaaaagcaggcttgagttttgggatgaaatgattggggagtgtaaattgcagcaaaagagttccctgaatttgcaacctcttcccattaaacaatattgtaggaagaggggtgtttggtaagcaatttacctggtttcctgctccacggatgacaactttagtagaggctgaatcacaatcttctgaaaatgcagctgcatgtcctggcttcagtgctgtattgtaaagggcaagaatatcacctgaaatagacaagatgttaagatttacatttccgttgccttgagagttccctgttactcccacttctccctatggtgaccttttatagaagaccataaataaaccactacagcccactgtagcccattgttttatttagcaattgtacccaatctgggtggagacagcactcatggtgacatttttgatac

SEQ ID NO: 357369 - DNA, 2900 bp, Homo sapiens
gcggccgccaagcgatccctgctccgcgcgacactgcgtgcccgcgcacgcagagaggcggtgacgcactttacggcggcagcgtaagtgcgtgacgctcgtcagtggcttcagttcacacgtggcgccagcggaggcaggttgctgtgtttgtgcttccttctacagccaatatgaaaaggcctagtaagtggggtcgggaggcgggcgtggagggacccacgtctggaagttgctgcagccaccacgacgctcttctacggctacggctttgtctctgctggtatgggggtgggagcctacgcgtaggccttggccctatttcctggtagaaccgagagttggaagtccctacggcgatcatgttaaccgcgcgggctcattctgcggaacgaagccgggcagagggtggggaagactaggctagattttcgtaaggaagcagcgtctgagccaggtttgaggcccaatattttctttccgtggccacgtgcagactggcccaggtgagagctgagaatcgcctcccagactcagtgttcctctcctgccttatgattcgtgctgtttgacacgaagtggttgtcgttttgtgtctcatacgctgttgtgtatgatcccattctaatattgtgagggtaagtgcagggaattttgactccattctggatctactgaatttaattctctgggatttgaaagtagcacgtatgtttgcattaggcatttcgcattagacttaacgttaggtttggtagccaataacacaagaaaaggatataactccatagtgcgttaacccagaactaatcatttgggttaacagatttgtgatgtgtttctttgtagagttaaagaaagcaagtaaacgcatgacctgccataagcggtataaaatccaaaaaaaggttcgagaacatcatcgaaaattaagaaaggaggctaaaaagcggggtcacaagaagcctaggaaagacccaggagttccaaacagtgctccctttaaggaggctcttcttagggaagctgagctaaggaaacagaggcttgaagaactaaaacagcagcagaaacttgacaggcagaaggaactagaaaagaaaagaaaacttgaaactaatcctgatattaagccatcaaatgtggaacctatggaaaaggagtttgggctttgcaaaactgagaacaaagccaagtcgggcaaacagaattcaaagaagctgtactgccaagaacttaaaaaggtgattgaagcctccgatgttgtcctagaggtgttggatgccagagatcctcttggttgcagatgtcctcaggtagaagaggccattgtccagagtggacagaaaaagctggtacttatattaaataaatcagatctggtaccaaaggagaatttggagagctggctaaattatttgaagaaagaattgccaacagtggtgttcagagcctcaacaaaaccaaaggataaagggaagataaccaagcgtgtgaaggcaaagaagaatgctgctccattcagaagtgaagtctgctttgggaaagagggcctttggaaacttcttggaggttttcaggaaacttgcagcaaagccattcgggttggagtaattggtttcccaaatgtggggaaaagcagcattatcaatagcttaaaacaagaacagatgtgtaatgttggtgtatccatggggcttacaaggagcatgcaagttgtccccttggacaaacagatcacaatcatagatagtccgagcttcatcgtatctccacttaattcctcctctgcgcttgctctgcgaagtccagcaagtattgaagtagtaaaaccgatggaggctgccagtgccatcctttcccaggctgatgctcgacaggtagtactgaaatatactgtcccaggctacaggaattctctggaattttttactgtgcttgctcagagaagaggtatgcaccaaaaaggtggaatcccaaatgttgaaggtgctgccaaactgctgtggtctgagtggacaggtgcctcattagcttactattgccatccccctacatcttggactcctcctccatattttaatgagagtattgtggtagacatgaaaagcggcttcaatctggaagaactggaaaagaacaatgcacagagcataagagccatcaagggccctcatttggccaatagcatccttttccagtcttccggtctgacaaatggaataatagaagaaaaggacatacatgaagaattgccaaaacggaaagaaaggaagcaggaggagagggaggatgacaaagacagtgaccaggaaactgttgatgaagaagttgatgaaaacagctcaggcatgtttgctgcagaagagacaggggaggcactgtctgaggagactacagcaggtgaacagtctacaaggtcttttatcttggataaaatcattgaagaggatgatgcttatgacttcagtacagattatgtgtaacagaacaatggctttttatgattttttttttaacattttaagcagactgctaaactgttctctgtataagttatggtatgcatgagctgtgtaaattttgtgaatatgtattatattaaaaccaggcaacttggaatccctaaattctgtaaaaagacaattcatctcattgtgagtggaagtagttatctggaataaaaaaagaagatacctattgaaaaatgtaagttttatttacagatcaggccacaggttacaaaattaaaaccaacagcagttttgaattatctgtaccagctagctgaactagccatatcagttcttctttccagtcattcagcattgtacaagccagtcatttgattggaccatcgcagtcagtctaaaactatgcatgcagatattaatctcgtg

SEQ ID NO: 357370 - DNA, 2700 bp, Homo sapiens
gcggccgccaagcgatccctgctccgcgcgacactgcgtgcccgcgcacgcagagaggcggtgacgcactttacggcggcagcgtaagtgcgtgacgctcgtcagtggcttcagttcacacgtggcgccagcggaggcaggttgctgtgtttgtgcttccttctacagccaatatgaaaaggcctagtaagtggggtcgggaggcgggcgtggagggacccacgtctggaagttgctgcagccaccacgacgctcttctacggctacggctttgtctctgctggtatgggggtgggagcctacgcgtaggccttggccctatttcctggtagaaccgagagttggaagtccctacggcgatcatgttaaccgcgcgggctcattctgcggaacgaagccgggcagagggtggggaagactaggctagattttcgtaaggaagcagcgtctgagccaggtttgaggcccaatattttctttccgtggccacgtgcagactggcccaggtgagagctgagaatcgcctcccagactcagtgttcctctcctgccttatgattcgtgctgtttgacacgaagtggttgtcgttttgtgtctcatacgctgttgtgtatgatcccattctaatattgtgagggtaagtgcagggaattttgactccattctggatctactgaatttaattctctgggatttgaaagtagcacgtatgtttgcattaggcatttcgcattagacttaacgttaggtttggtagccaataacacaagaaaaggatataactccatagtgcgttaacccagaactaatcatttgggttaacagatttgtgatgtgtttctttgtagagttaaagaaagcaagtaaacgcatgacctgccataagcggtataaaatccaaaaaaaggttcgagaacatcatcgaaaattaagaaaggaggctaaaaagcggggtcacaagaagcctaggaaagacccaggagttccaaacagtgctccctttaaggaggctcttcttagggaagctgagctaaggaaacagaggcttgaagaactaaaacagcagcagaaacttgacaggcagaaggaactagaaaagaaaagaaaacttgaaactaatcctgatattaagccatcaaatgtggaacctatggaaaaggagtttgggctttgcaaaactgagaacaaagccaagtcgggcaaacagaattcaaagaagctgtactgccaagaacttaaaaaggtgattgaagcctccgatgttgtcctagaggtgttggatgccagagatcctcttggttgcagatgtcctcaggtagaagaggccattgtccagagtggacagaaaaagctggtacttatattaaataaatcagatctggtaccaaaggagaatttggagagctggctaaattatttgaagaaagaattgccaacagtggtgttcagagcctcaacaaaaccaaaggataaagggaagataaccaagcgtgtgaaggcaaagaagaatgctgctccattcagaagtgaagtctgctttgggaaagagggcctttggaaacttcttggaggttttcaggaaacttgcagcaaagccattcgggttggagtaattggtttcccaaatgtggggaaaagcagcattatcaatagcttaaaacaagaacagatgtgtaatgttggtgtatccatggggcttacaaggagcatgcaagttgtccccttggacaaacagatcacaatcatagatagtccgagcttcatcgtatctccacttaattcctcctctgcgcttgctctgcgaagtccagcaagtattgaagtagtaaaaccgatggaggctgccagtgccatcctttcccaggctgatgctcgacaggtagtactgaaatatactgtcccaggctacaggaattctctggaattttttactgtgcttgctcagagaagaggtatgcaccaaaaaggtggaatcccaaatgttgaaggtgctgccaaactgctgtggtctgagtggacaggtgcctcattagcttactattgccatccccctacatcttggactcctcctccatattttaatgagagtattgtggtagacatgaaaagcggcttcaatctggaagaactggaaaagaacaatgcacagagcataagagccatcaagggccctcatttggccaatagcatccttttccagtcttccggtctgacaaatggaataatagaagaaaaggacatacatgaagaattgccaaaacggaaagaaaggaagcaggaggagagggaggatgacaaagacagtgaccaggaaactgttgatgaagaagttgatgaaaacagctcaggcatgtttgctgcagaagagacaggggaggcactgtctgaggagactacagcaggtgaacagtctacaaggtcttttatcttggataaaatcattgaagaggatgatgcttatgacttcagtacagattatgtgtaacagaacaatggctttttatgattttttttttaacattttaagcagactgctaaactgttctctgtataagttatggtatgcatgagctgtgtaaattttgtgaatatgtattatattaaaaccaggcaacttggaatccctaaattctgtaaaaagacaattcatctcattgtgagtggaagtagttatctggaataaaaaaagaagataccta

SEQ ID NO: 357371 - DNA, 2628 bp, Homo sapiens
gcggccgccaagcgatccctgctccgcgcgacactgcgtgcccgcgcacgcagagaggcggtgacgcactttacggcggcagcgtaagtgcgtgacgctcgtcagtggcttcagttcacacgtggcgccagcggaggcaggttgctgtgtttgtgcttccttctacagccaatatgaaaaggcctagtaagtggggtcgggaggcgggcgtggagggacccacgtctggaagttgctgcagccaccacgacgctcttctacggctacggctttgtctctgctggtatgggggtgggagcctacgcgtaggccttggccctatttcctggtagaaccgagagttggaagtccctacggcgatcatgttaaccgcgcgggctcattctgcggaacgaagccgggcagagggtggggaagactaggctagattttcgtaaggaagcagcgtctgagccaggtttgaggcccaatattttctttccgtggccacgtgcagactggcccaggtgagagctgagaatcgcctcccagactcagtgttcctctcctgccttatgattcgtgctgtttgacacgaagtggttgtcgttttgtgtctcatacgctgttgtgtatgatcccattctaatattgtgagggtaagtgcagggaattttgactccattctggatctactgaatttaattctctgggatttgaaagtagcacgtatgtttgcattaggcatttcgcattagacttaacgttaggtttggtagccaataacacaagaaaaggatataactccatagtgcgttaacccagaactaatcatttgggttaacagatttgtgatgtgtttctttgtagagttaaagaaagcaagtaaacgcatgacctgccataagcggtataaaatccaaaaaaaggttcgagaacatcatcgaaaattaagaaaggaggctaaaaagcggggtcacaagaagcctaggaaagacccaggagttccaaacagtgctccctttaaggaggctcttcttagggaagctgagctaaggaaacagaggcttgaagaactaaaacagcagcagaaacttgacaggcagaaggaactagaaaagaaaagaaaacttgaaactaatcctgatattaagccatcaaatgtggaacctatggaaaaggagtttgggctttgcaaaactgagaacaaagccaagtcgggcaaacagaattcaaagaagctgtactgccaagaacttaaaaaggtgattgaagcctccgatgttgtcctagaggtgttggatgccagagatcctcttggttgcagatgtcctcaggtagaagaggccattgtccagagtggacagaaaaagctggtacttatattaaataaatcagatctggtaccaaaggagaatttggagagctggctaaattatttgaagaaagaattgccaacagtggtgttcagagcctcaacaaaaccaaaggataaagggaagataaccaagcgtgtgaaggcaaagaagaatgctgctccattcagaagtgaagtctgctttgggaaagagggcctttggaaacttcttggaggttttcaggaaacttgcagcaaagccattcgggttggagtaattggtttcccaaatgtggggaaaagcagcattatcaatagcttaaaacaagaacagatgtgtaatgttggtgtatccatggggcttacaaggagcatgcaagttgtccccttggacaaacagatcacaatcatagatagtccgagcttcatcgtatctccacttaattcctcctctgcgcttgctctgcgaagtccagcaagtattgaagtagtaaaaccgatggaggctgccagtgccatcctttcccaggctgatgctcgacaggtagtactgaaatatactgtcccaggctacaggaattctctggaattttttactgtgcttgctcagagaagaggtatgcaccaaaaaggtggaatcccaaatgttgaaggtgctgccaaactgctgtggtctgagtggacaggtgcctcattagcttactattgccatccccctacatcttggactcctcctccatattttaatgagagtattgtggtagacatgaaaagcggcttcaatctggaagaactggaaaagaacaatgcacagagcataagagccatcaagggccctcatttggccaatagcatccttttccagtcttccggtctgacaaatggaataatagaagaaaaggacatacatgaagaattgccaaaacggaaagaaaggaagcaggaggagagggaggatgacaaagacagtgaccaggaaactgttgatgaagaagttgatgaaaacagctcaggcatgtttgctgcagaagagacaggggaggcactgtctgaggagactacagcaggtgaacagtctacaaggtcttttatcttggataaaatcattgaagaggatgatgcttatgacttcagtacagattatgtgtaacagaacaatggctttttatgattttttttttaacattttaagcagactgctaaactgttctctgtataagttatggtatgcatgagctgtgtaaattttgtgaatatgtattatattaaaaccaggcaacttggaatcccta

SEQ ID NO: 357372 - DNA, 2789 bp, Homo sapiens
gcggccgccaagcgatccctgctccgcgcgacactgcgtgcccgcgcacgcagagaggcggtgacgcactttacggcggcagcgtaagtgcgtgacgctcgtcagtggcttcagttcacacgtggcgccagcggaggcaggttgctgtgtttgtgcttccttctacagccaatatgaaaaggcctagtaagtggggtcgggaggcgggcgtggagggacccacgtctggaagttgctgcagccaccacgacgctcttctacggctacggctttgtctctgctggtatgggggtgggagcctacgcgtaggccttggccctatttcctggtagaaccgagagttggaagtccctacggcgatcatgttaaccgcgcgggctcattctgcggaacgaagccgggcagagggtggggaagactaggctagattttcgtaaggaagcagcgtctgagccaggtttgaggcccaatattttctttccgtggccacgtgcagactggcccaggtgagagctgagaatcgcctcccagactcagtgttcctctcctgccttatgattcgtgctgtttgacacgaagtggttgtcgttttgtgtctcatacgctgttgtgtatgatcccattctaatattgtgagggtaagtgcagggaattttgactccattctggatctactgaatttaattctctgggatttgaaagtagcacgtatgtttgcattaggcatttcgcattagacttaacgttaggtttggtagccaataacacaagaaaaggatataactccatagtgcgttaacccagaactaatcatttgggttaacagatttgtgatgtgtttctttgtagagttaaagaaagcaagtaaacgcatgacctgccataagcggtataaaatccaaaaaaaggttcgagaacatcatcgaaaattaagaaaggaggctaaaaagcggggtcacaagaagcctaggaaagacccaggagttccaaacagtgctccctttaaggaggctcttcttagggaagctgagctaaggaaacagaggcttgaagaactaaaacagcagcagaaacttgacaggcagaaggaactagaaaagaaaagaaaacttgaaactaatcctgatattaagccatcaaatgtggaacctatggaaaaggagtttgggctttgcaaaactgagaacaaagccaagtcgggcaaacagaattcaaagaagctgtactgccaagaacttaaaaaggtgattgaagcctccgatgttgtcctagaggtgttggatgccagagatcctcttggttgcagatgtcctcaggtagaagaggccattgtccagagtggacagaaaaagctggtacttatattaaataaatcagatctggtaccaaaggagaatttggagagctggctaaattatttgaagaaagaattgccaacagtggtgttcagagcctcaacaaaaccaaaggataaagggaagataaccaagcgtgtgaaggcaaagaagaatgctgctccattcagaagtgaagtctgctttgggaaagagggcctttggaaacttcttggaggttttcaggaaacttgcagcaaagccattcgggttggagtaattggtttcccaaatgtggggaaaagcagcattatcaatagcttaaaacaagaacagatgtgtaatgttggtgtatccatggggcttacaaggagcatgcaagttgtccccttggacaaacagatcacaatcatagatagtccgagcttcatcgtatctccacttaattcctcctctgcgcttgctctgcgaagtccagcaagtattgaagtagtaaaaccgatggaggctgccagtgccatcctttcccaggctgatgctcgacaggtagtactgaaatatactgtcccaggctacaggaattctctggaattttttactgtgcttgctcagagaagaggtatgcaccaaaaaggtggaatcccaaatgttgaaggtgctgccaaactgctgtggtctgagtggacaggtgcctcattagcttactattgccatccccctacatcttggactcctcctccatattttaatgagagtattgtggtagacatgaaaagcggcttcaatctggaagaactggaaaagaacaatgcacagagcataagagccatcaagggccctcatttggccaatagcatccttttccagtcttccggtctgacaaatggaataatagaagaaaaggacatacatgaagaattgccaaaacggaaagaaaggaagcaggaggagagggaggatgacaaagacagtgaccaggaaactgttgatgaagaagttgatgaaaacagctcaggcatgtttgctgcagaagagacaggggaggcactgtctgaggagactacagcaggtgaggcaggcaaaaggggttctaacgaagcagcatggtatagaatcacttttactttttgaaaatctctttattttcctgcaatataggtgaacagtctacaaggtcttttatcttggataaaatcattgaagaggatgatgcttatgacttcagtacagattatgtgtaacagaacaatggctttttatgattttttttttaacattttaagcagactgctaaactgttctctgtataagttatggtatgcatgagctgtgtaaattttgtgaatatgtattatattaaaaccaggcaacttggaatccctaaattctgtaaaaagacaattcatctcattgtgagtggaagtagttatctggaataaaaaaagaagataccta

SEQ ID NO: 357373 - DNA, 2717 bp, Homo sapiens
gcggccgccaagcgatccctgctccgcgcgacactgcgtgcccgcgcacgcagagaggcggtgacgcactttacggcggcagcgtaagtgcgtgacgctcgtcagtggcttcagttcacacgtggcgccagcggaggcaggttgctgtgtttgtgcttccttctacagccaatatgaaaaggcctagtaagtggggtcgggaggcgggcgtggagggacccacgtctggaagttgctgcagccaccacgacgctcttctacggctacggctttgtctctgctggtatgggggtgggagcctacgcgtaggccttggccctatttcctggtagaaccgagagttggaagtccctacggcgatcatgttaaccgcgcgggctcattctgcggaacgaagccgggcagagggtggggaagactaggctagattttcgtaaggaagcagcgtctgagccaggtttgaggcccaatattttctttccgtggccacgtgcagactggcccaggtgagagctgagaatcgcctcccagactcagtgttcctctcctgccttatgattcgtgctgtttgacacgaagtggttgtcgttttgtgtctcatacgctgttgtgtatgatcccattctaatattgtgagggtaagtgcagggaattttgactccattctggatctactgaatttaattctctgggatttgaaagtagcacgtatgtttgcattaggcatttcgcattagacttaacgttaggtttggtagccaataacacaagaaaaggatataactccatagtgcgttaacccagaactaatcatttgggttaacagatttgtgatgtgtttctttgtagagttaaagaaagcaagtaaacgcatgacctgccataagcggtataaaatccaaaaaaaggttcgagaacatcatcgaaaattaagaaaggaggctaaaaagcggggtcacaagaagcctaggaaagacccaggagttccaaacagtgctccctttaaggaggctcttcttagggaagctgagctaaggaaacagaggcttgaagaactaaaacagcagcagaaacttgacaggcagaaggaactagaaaagaaaagaaaacttgaaactaatcctgatattaagccatcaaatgtggaacctatggaaaaggagtttgggctttgcaaaactgagaacaaagccaagtcgggcaaacagaattcaaagaagctgtactgccaagaacttaaaaaggtgattgaagcctccgatgttgtcctagaggtgttggatgccagagatcctcttggttgcagatgtcctcaggtagaagaggccattgtccagagtggacagaaaaagctggtacttatattaaataaatcagatctggtaccaaaggagaatttggagagctggctaaattatttgaagaaagaattgccaacagtggtgttcagagcctcaacaaaaccaaaggataaagggaagataaccaagcgtgtgaaggcaaagaagaatgctgctccattcagaagtgaagtctgctttgggaaagagggcctttggaaacttcttggaggttttcaggaaacttgcagcaaagccattcgggttggagtaattggtttcccaaatgtggggaaaagcagcattatcaatagcttaaaacaagaacagatgtgtaatgttggtgtatccatggggcttacaaggagcatgcaagttgtccccttggacaaacagatcacaatcatagatagtccgagcttcatcgtatctccacttaattcctcctctgcgcttgctctgcgaagtccagcaagtattgaagtagtaaaaccgatggaggctgccagtgccatcctttcccaggctgatgctcgacaggtagtactgaaatatactgtcccaggctacaggaattctctggaattttttactgtgcttgctcagagaagaggtatgcaccaaaaaggtggaatcccaaatgttgaaggtgctgccaaactgctgtggtctgagtggacaggtgcctcattagcttactattgccatccccctacatcttggactcctcctccatattttaatgagagtattgtggtagacatgaaaagcggcttcaatctggaagaactggaaaagaacaatgcacagagcataagagccatcaagggccctcatttggccaatagcatccttttccagtcttccggtctgacaaatggaataatagaagaaaaggacatacatgaagaattgccaaaacggaaagaaaggaagcaggaggagagggaggatgacaaagacagtgaccaggaaactgttgatgaagaagttgatgaaaacagctcaggcatgtttgctgcagaagagacaggggaggcactgtctgaggagactacagcaggtgaggcaggcaaaaggggttctaacgaagcagcatggtatagaatcacttttactttttgaaaatctctttattttcctgcaatataggtgaacagtctacaaggtcttttatcttggataaaatcattgaagaggatgatgcttatgacttcagtacagattatgtgtaacagaacaatggctttttatgattttttttttaacattttaagcagactgctaaactgttctctgtataagttatggtatgcatgagctgtgtaaattttgtgaatatgtattatattaaaaccaggcaacttggaatcccta

SEQ ID NO: 357374 - DNA, 2646 bp, Homo sapiens
gcggccgccaagcgatccctgctccgcgcgacactgcgtgcccgcgcacgcagagaggcggtgacgcactttacggcggcagcgtaagtgcgtgacgctcgtcagtggcttcagttcacacgtggcgccagcggaggcaggttgctgtgtttgtgcttccttctacagccaatatgaaaaggcctagtaagtggggtcgggaggcgggcgtggagggacccacgtctggaagttgctgcagccaccacgacgctcttctacggctacggctttgtctctgctggtatgggggtgggagcctacgcgtaggccttggccctatttcctggtagaaccgagagttggaagtccctacggcgatcatgttaaccgcgcgggctcattctgcggaacgaagccgggcagagggtggggaagactaggctagattttcgtaaggaagcagcgtctgagccaggtttgaggcccaatattttctttccgtggccacgtgcagactggcccaggtgagagctgagaatcgcctcccagactcagtgttcctctcctgccttatgattcgtgctgtttgacacgaagtggttgtcgttttgtgtctcatacgctgttgtgtatgatcccattctaatattgtgagggtaagtgcagggaattttgactccattctggatctactgaatttaattctctgggatttgaaagtagcacgtatgtttgcattaggcatttcgcattagacttaacgttaggtttggtagccaataacacaagaaaaggatataactccatagtgcgttaacccagaactaatcatttgggttaacagatttgtgatgtgtttctttgtagagttaaagaaagcaagtaaacgcatgacctgccataagcggtataaaatccaaaaaaaggttcgagaacatcatcgaaaattaagaaaggaggctaaaaagcggggtcacaagaagcctaggaaagacccaggagttccaaacagtgctccctttaaggaggctcttcttagggaagctgagctaaggaaacagaggcttgaagaactaaaacagcagcagaaacttgacaggcagaaggaactagaaaagaaaagaaaacttgaaactaatcctgatattaagccatcaaatgtggaacctatggaaaaggagtttgggctttgcaaaactgagaacaaagccaagtcgggcaaacagaattcaaagaagctgtactgccaagaacttaaaaaggtgattgaagcctccgatgttgtcctagaggtgttggatgccagagatcctcttggttgcagatgtcctcaggtagaagaggccattgtccagagtggacagaaaaagctggtacttatattaaataaatcagatctggtaccaaaggagaatttggagagctggctaaattatttgaagaaagaattgccaacagtggtgttcagagcctcaacaaaaccaaaggataaagggaagataaccaagcgtgtgaaggcaaagaagaatgctgctccattcagaagtgaagtctgctttgggaaagagggcctttggaaacttcttggaggttttcaggaaacttgcagcaaagccattcgggttggagtaattggtttcccaaatgtggggaaaagcagcattatcaatagcttaaaacaagaacagatgtgtaatgttggtgtatccatggggcttacaaggagcatgcaagttgtccccttggacaaacagatcacaatcatagatagtccgagcttcatcgtatctccacttaattcctcctctgcgcttgctctgcgaagtccagcaagtattgaagtagtaaaaccgatggaggctgccagtgccatcctttcccaggctgatgctcgacaggtagtactgaaatatactgtcccaggctacaggaattctctggaattttttactgtgcttgctcagagaagaggtatgcaccaaaaaggtggaatcccaaatgttgaaggtgctgccaaactgctgtggtctgagtggacaggtgcctcattagcttactattgccatccccctacatcttggactcctcctccatattttaatgagagtattgtggtagacatgaaaagcggcttcaatctggaagaactggaaaagaacaatgcacagagcataagagccatcaagggccctcatttggccaatagcatccttttccagtcttccggtctgacaaatggaataatagaagaaaaggacatacatgaagaattgccaaaacggaaagaaaggaagcaggaggagagggaggatgacaaagacagtgaccaggaaactgttgatgaagaagttgatgaaaacagctcaggcatgtttgctgcagaagagacaatcttggataaaatcattgaagaggatgatgcttatgacttcagtacagattatgtgtaacagaacaatggctttttatgattttttttttaacattttaagcagactgctaaactgttctctgtataagttatggtatgcatgagctgtgtaaattttgtgaatatgtattatattaaaaccaggcaacttggaatccctaaattctgtaaaaagacaattcatctcattgtgagtggaagtagttatctggaataaaaaaagaagataccta

SEQ ID NO: 357375 - DNA, 1849 bp, Homo sapiens
gcggccgccaagcgatccctgctccgcgcgacactgcgtgcccgcgcacgcagagaggcggtgacgcactttacggcggcagcgtaagtgcgtgacgctcgtcagtggcttcagttcacacgtggcgccagcggaggcaggttgctgtgtttgtgcttccttctacagccaatatgaaaaggcctagtaagtggggtcgggaggcgggcgtggagggacccacgtctggaagttgctgcagccaccacgacgctcttctacggctacggctttgtctctgctggtatgggggtgggagcctacgcgtaggccttggccctatttcctggtagaaccgagagttggaagtccctacggcgatcatgttaaccgcgcgggctcattctgcggaacgaagccgggcagagggtggggaagactaggctagattttcgtaaggaagcagcgtctgagccaggtttgaggcccaatattttctttccgtggccacgtgcagactggcccaggtgagagctgagaatcgcctcccagactcagtgttcctctcctgccttatgattcgtgctgtttgacacgaagtggttgtcgttttgtgtctcatacgctgttgtgtatgatcccattctaatattgtgagggtaagtgcagggaattttgactccattctggatctactgaatttaattctctgggatttgaaagtagcacgtatgtttgcattaggcatttcgcattagacttaacgttaggtttggtagccaataacacaagaaaaggatataactccatagtgcgttaacccagaactaatcatttgggttaacagatttgtgatgtgtttctttgtagagttaaagaaagcaagtaaacgcatgacctgccataagcggtataaaatccaaaaaaaggttcgagaacatcatcgaaaattaagaaaggaggctaaaaagcggggtcacaagaagcctaggaaagacccaggagttccaaacagtgctccctttaaggaggctcttcttagggaagctgagctaaggaaacagaggcttgaagaactaaaacagcagcagaaacttgacaggcagaaggaactagaaaagaaaagaaaacttgaaactaatcctgatattaagccatcaaatgtggaacctatggaaaaggagtttgggctttgcaaaactgagaacaaagccaagtcgggcaaacagaattcaaagaagctgtactgccaagaacttaaaaaggtgattgaagcctccgatgttgtcctagaggtgttggatgccagagatcctcttggttgcagatgtcctcaggtagaagaggccattgtccagagtggacagaaaaagctggtacttatattaaataaatcagatctggtaccaaaggagaatttggagagctggctaaattatttgaagaaagaattgccaacagtggtgttcagagcctcaacaaaaccaaaggataaagggaagataaccaagcgtgtgaaggcaaagaagaatgctgctccattcagaagtgaagtctgctttgggaaagagggcctttggaaacttcttggaggttttcaggaaacttgcagcaaagccattcgggttggagtaattggtttcccaaatgtggggaaaagcagcattatcaatagcttaaaacaagaacagatgtgtaatgttggtgtatccatggggcttacaagggcatgcaagttggcccctttggacaaaccggtcacaatccttaaatggcccgagctttaatggtatttccccttaaattcctccttgggctttggttttgtgaaattccaccaaggtttttgggtgagtttaaacccgtgggg

SEQ ID NO: 357376 - DNA, 1714 bp, Homo sapiens
  misc_feature (1638)..(1638): n is a, c, g, or t
  misc_feature (1640)..(1640): n is a, c, g, or t
  misc_feature (1642)..(1642): n is a, c, g, or t
  misc_feature (1651)..(1651): n is a, c, g, or t
gcggccgccaagcgatccctgctccgcgcgacactgcgtgcccgcgcacgcagagaggcggtgacgcactttacggcggcagcgtaagtgcgtgacgctcgtcagtggcttcagttcacacgtggcgccagcggaggcaggttgctgtgtttgtgcttccttctacagccaatatgaaaaggcctagtaagtggggtcgggaggcgggcgtggagggacccacgtctggaagttgctgcagccaccacgacgctcttctacggctacggctttgtctctgctggtatgggggtgggagcctacgcgtaggccttggccctatttcctggtagaaccgagagttggaagtccctacggcgatcatgttaaccgcgcgggctcattctgcggaacgaagccgggcagagggtggggaagactaggctagattttcgtaaggaagcagcgtctgagccaggtttgaggcccaatattttctttccgtggccacgtgcagactggcccaggtgagagctgagaatcgcctcccagactcagtgttcctctcctgccttatgattcgtgctgtttgacacgaagtggttgtcgttttgtgtctcatacgctgttgtgtatgatcccattctaatattgtgagggtaagtgcagggaattttgactccattctggatctactgaatttaattctctgggatttgaaagtagcacgtatgtttgcattaggcatttcgcattagacttaacgttaggtttggtagccaataacacaagaaaaggatataactccatagtgcgttaacccagaactaatcatttgggttaacagatttgtgatgtgtttctttgtagagttaaagaaagcaagtaaacgcatgacctgccataagcggtataaaatccaaaaaaaggttcgagaacatcatcgaaaattaagaaaggaggctaaaaagcggggtcacaagaagcctaggaaagacccaggagttccaaacagtgctccctttaaggaggctcttcttagggaagctgagctaaggaaacagaggcttgaagaactaaaacagcagcagaaacttgacaggcagaaggaactagaaaagaaaagaaaacttgaaactaatcctgatattaagccatcaaatgtggaacctatggaaaaggagtttgggctttgcaaaactgagaacaaagccaagtcgggcaaacagaattcaaagaagctgtactgccaagaacttaaaaaggtgattgaagcctccgatgttgtcctagaggtgttggatgccagagatcctcttggttgcagatgtcctcaggtagaagaggccattgtccagagtggacagaaaaagctggtacttatattaaataaatcagatctggtaccaaaggagaatttggagagctggctaaattatttgaagaaagaattgccaacagtggtgttcagagcctcaacaaaaccaaaggataaagggaagataaccaagcgtgtgaaggcaaagaagaatgctgctccattcagaagtgaagtctgctttgggaaagagggcctttggaaacttcttggaggttttcaggaaacttgcagcaaagccattcgggttggagtaattggttccaaatgtggggaaagcngntntcatagttnacagaccgctgtttcgtggggttcccgggcgtccagggacgcaatgttcctggaagtcccccg

SEQ ID NO: 357377 - DNA, 770 bp, Homo sapiens
gcggccgccaagcgatccctgctccgcgcgacactgcgtgcccgcgcacgcagagaggcggtgacgcactttacggcggcagcgtaagtgcgtgacgctcgtcagtggcttcagttcacacgtggcgccagcggaggcaggttgctgtgtttgtgcttccttctacagccaatatgaaaaggcctagtaagtggggtcgggaggcgggcgtggagggacccacgtctggaagttgctgcagccaccacgacgctcttctacggctacggctttgtctctgctggtatgggggtgggagcctacgcgtaggccttggccctatttcctggtagaaccgagagttggaagtccctacggcgatcatgttaaccgcgcgggctcattctgcggaacgaagccgggcagagggtggggaagactaggctagattttcgtaaggaagcagcgtctgagccaggtttgaggcccaatattttctttccgtggccacgtgcagactggcccagagttaaagaaagcaagtaaacgcatgacctgccataagcggtataaaatccaaaaaaaggttcgagaacatcatcgaaaattaagaaaggaggctaaaaagcggggtcacaagaagcctaggaaagacccaggagttccaaacagtgctccctttaaggaggctcttcttagggaagctgagctaaggaaacagaggcttgaagaaataaaatgacagcttgagtcgcgcgacgtgtatcctctagagtcagctatgaccgatg

SEQ ID NO: 357378 - DNA, 735 bp, Homo sapiens
agacggggttttatcgtgttagccaggatggtcttgatctcctgaactcgtgatccgcctgtctcggcctcccaaagtgctgggattacaggcgtgagccaccgtgcctggccgcaaatgtcttatttctaattgctatcagatctggtaccaaaggagaatttggagagctggctaaattatttgaagaaagaattgccaacagtggtgttcagagcctcaacaaaaccaaaggataaagggaagataaccaaggtatcctttattagtggtaagaaatgtgattctttcagattttggttgaaatatgatgagtgtacaaaatcttgatttaagtgaatgaaaaattacaagatccaactctgatttcagccagagatcatctgaaaggcaatgtagttatcttaagagctgggctctggagcctgattgcttggggtttgttgaaatttatcaggtaagttgccagaataattcaactatttggaattttagcgtgtgaaggcaaagaagaatgctgctccattcagaagtgaagtctgctttgggaaagagggcctttggaaacttcttggaggttttcaggaaacttgcagcaaagccattcgggttggagtaattggtgagtttcagttcattactttttactttttaagtgttgaaatagttaagaagtttagccagctctccaagtgcccaagcagcagtgtatggagttgttgtcaagtaaaaggc

SEQ ID NO: 357379 - DNA, 938 bp, Homo sapiens
  misc_feature (862)..(862): n is a, c, g, or t
  misc_feature (864)..(864): n is a, c, g, or t
  misc_feature (866)..(866): n is a, c, g, or t
  misc_feature (875)..(875): n is a, c, g, or t
cacactaggcaggtggaggccgggggtatcggacgagggttgtgctccttctacagccaatatgaaaaggctaagttaaagaaagcaagtaaacgcatgacctgccataagcggtataaaatccaaaaaaaggttcgagaacatcatcgaaaattaagaaaggaggctaaaaagcggggtcacaagaagcctaggaaagacccaggagttccaaacagtgctccctttaaggaggctcttcttagggaagctgagctaaggaaacagaggcttgaagaactaaaacagcagcagaaacttgacaggcagaaggaactagaaaagaaaagaaaacttgaaactaatcctgatattaagccatcaaatgtggaacctatggaaaaggagtttgggctttgcaaaactgagaacaaagccaagtcgggcaaacagaattcaaagaagctgtactgccaagaacttaaaaaggtgattgaagcctccgatgttgtcctagaggtgttggatgccagagatcctcttggttgcagatgtcctcaggtagaagaggccattgtccagagtggacagaaaaagctggtacttatattaaataaatcagatctggtaccaaaggagaatttggagagctggctaaattatttgaagaaagaattgccaacagtggtgttcagagcctcaacaaaaccaaaggataaagggaagataaccaagcgtgtgaaggcaaagaagaatgctgctccattcagaagtgaagtctgctttgggaaagagggcctttggaaacttcttggaggttttcaggaaacttgcagcaaagccattcgggttggagtaattggttccaaatgtggggaaagcngntntcatagttnacagaccgctgtttcgtggggttcccgggcgtccagggacgcaatgttcctggaagtcccccg

SEQ ID NO: 357380 - DNA, 525 bp, Homo sapiens
ctagaggatcttcaactacagcaggtgaacagtctacaaggtcttttatcttggaagccatcaagggccctcatttggccaatagcatccttttccagtcttccggtctgacaaatggaataatagaagaaaaggacatacatgaagaattgccaaaacggaaagaaaggaagcaggaggagagggaggatgacaaagacagtgaccaggaaactgttgatgaagaagttgatgaaaacagctcaggcatgtttgctgcagaagagacaggggaggcactgtctgaggagactacagcaggtgaacagtctacaaggtcttttatcttggataaaatcattgaagaggatgatgcttatgacttcagtacagattatgtgtaacagaacaatggctttttatgattttttttttaacattttaagcagactgctaaactgttctctgtataagttatggtatgcatgagctgtgtaaattttgtgaatatgtattatattaaaaccaggcaacttggaatcccta

SEQ ID NO: 357381 - DNA, 2037 bp, Homo sapiens
gcggccgccaagcgatccctgctccgcgcgacactgcgtgcccgcgcacgcagagaggcggtgacgcactttacggcggcagcgtaagtgcgtgacgctcgtcagtggcttcagttcacacgtggcgccagcggaggcaggttgctgtgtttgtgcttccttctacagccaatatgaaaaggcctaagttaaagaaagcaagtaaacgcatgacctgccataagcggtataaaatccaaaaaaaggttcgagaacatcatcgaaaattaagaaaggaggctaaaaagcggggtcacaagaagcctaggaaagacccaggagttccaaacagtgctccctttaaggaggctcttcttagggaagctgagctaaggaaacagaggcttgaagaactaaaacagcagcagaaacttgacaggcagaaggaactagaaaagaaaagaaaacttgaaactaatcctgatattaagccatcaaatgtggaacctatggaaaaggagtttgggctttgcaaaactgagaacaaagccaagtcgggcaaacagaattcaaagaagctgtactgccaagaacttaaaaaggtgattgaagcctccgatgttgtcctagaggtgttggatgccagagatcctcttggttgcagatgtcctcaggtagaagaggccattgtccagagtggacagaaaaagctggtacttatattaaataaatcagatctggtaccaaaggagaatttggagagctggctaaattatttgaagaaagaattgccaacagtggtgttcagagcctcaacaaaaccaaaggataaagggaagataaccaagcgtgtgaaggcaaagaagaatgctgctccattcagaagtgaagtctgctttgggaaagagggcctttggaaacttcttggaggttttcaggaaacttgcagcaaagccattcgggttggagtaattggtttcccaaatgtggggaaaagcagcattatcaatagcttaaaacaagaacagatgtgtaatgttggtgtatccatggggcttacaaggagcatgcaagttgtccccttggacaaacagatcacaatcatagatagtccgagcttcatcgtatctccacttaattcctcctctgcgcttgctctgcgaagtccagcaagtattgaagtagtaaaaccgatggaggctgccagtgccatcctttcccaggctgatgctcgacaggtagtactgaaatatactgtcccaggctacaggaattctctggaattttttactgtgcttgctcagagaagaggtatgcaccaaaaaggtggaatcccaaatgttgaaggtgctgccaaactgctgtggtctgagtggacaggtgcctcattagcttactattgccatccccctacatcttggactcctcctccatattttaatgagagtattgtggtagacatgaaaagcggcttcaatctggaagaactggaaaagaacaatgcacagagcataagagccatcaagggccctcatttggccaatagcatccttttccagtcttccggtctgacaaatggaataatagaagaaaaggacatacatgaagaattgccaaaacggaaagaaaggaagcaggaggagagggaggatgacaaagacagtgaccaggaaactgttgatgaagaagttgatgaaaacagctcaggcatgtttgctgcagaagagacaggggaggcactgtctgaggagactacagcaggtgaacagtctacaaggtcttttatcttggataaaatcattgaagaggatgatgcttatgacttcagtacagattatgtgtaacagaacaatggctttttatgattttttttttaacattttaagcagactgctaaactgttctctgtataagttatggtatgcatgagctgtgtaaattttgtgaatatgtattatattaaaaccaggcaacttggaatccctaaattctgtaaaaagacaattcatctcattgtgagtggaagtagttatctggaataaaaaaagaagataccta

SEQ ID NO: 357382 - DNA, 3442 bp, Homo sapiens
  misc_feature (8)..(8): n is a, c, g, or t
  misc_feature (32)..(32): n is a, c, g, or t
taagcttnggctaggtacgaggctgggtgttnctcagaacagaggcttgaagaactaaaacagcagcagaaacttgacaggcagaaggaactagaaaagaaaagaaaacttgaaactaatcctgatattaagccatcaaatgtggaacctatggaaaaggagtttgggctttgcaaaactgagaacaaagccaagtcgggcaaacagaattcaaagaagctgtactgccaagaacttaaaaaggtgattgaagcctccgatgttgtcctagaggtgttggatgccagagatcctcttggttgcagatgtcctcaggtagaagaggccattgtccagagtggacagaaaaagctggtacttatattaaataaatcagatctggtaccaaaggagaatttggagagctggctaaattatttgaagaaagaattgccaacagtggtgttcagagcctcaacaaaaccaaaggataaagggaagataaccaagcgtgtgaaggcaaagaagaatgctgctccattcagaagtgaagtctgctttgggaaagagggcctttggaaacttcttggaggttttcaggaaacttgcagcaaagccattcgggttggagtaattggtttcccaaatgtggggaaaagcagcattatcaatagcttaaaacaagaacagatgtgtaatgttggtgtatccatggggcttacaaggagcatgcaagttgtccccttggacaaacagatcacaatcatagatagtccgagcttcatcgtatctccacttaattcctcctctgcgcttgctctgcgaagtccagcaagtattgaagtagtaaaaccgatggaggctgccagtgccatcctttcccaggctgatgctcgacaggtagtactgaaatatactgtcccaggctacaggaattctctggaattttttactgtgcttgctcagagaagaggtatgcaccaaaaaggtggaatcccaaatgttgaaggtgctgccaaactgctgtggtctgagtggacaggtgcctcattagcttactattgccatccccctacatcttggactcctcctccatattttaatgagagtattgtggtagacatgaaaagcggcttcaatctggaagaactggaaaagaacaatgcacagagcataagagccatcaagggccctcatttggccaatagcatccttttccagtcttccggtctgacaaatggaataatagaagaaaaggacatacatgaagaattgccaaaacggaaagaaaggaagcaggaggagagggaggatgacaaagacagtgaccaggaaactgttgatgaagaagttgatgaaaacagctcaggcatgtttgctgcagaagagacaggggaggcactgtctgaggagactacagcaggtgaacagtctacaaggtcttttatcttggataaaatcattgaagaggatgatgcttatgacttcagtacagattatgtgtaacagaacaatggctttttatgattttttttttaacattttaagcagactgctaaactgttctctgtataagttatggtatgcatgagctgtgtaaattttgtgaatatgtattatattaaaaccaggcaacttggaatccctaaattctgtaaaaagacaattcatctcattgtgagtggaagtagttatctggaataaaaaaagaagatacctattgaaaaatgtaagttttatttacagatcaggccacaggttacaaaattaaaaccaacagcagttttgaattatctgtaccagctagctgaactagccatatcagttcttctttccagtcattcagcattgtagtaagaaaacacttggtaaggcagatggagacatatttatagtctatagtctgtctgggaagctgactgccagacagggcagtttgtcatctttacctagctgacacatctttttccatggcttgctaccgataggcattgaagcctagcaactgttacttcccacgcatgctatcttccaggacttcctgagaaatgcttgcttacagttcaaattctgtttcactttatgtttgagatctcggtatatcttcggattaggttgaatttgcctgttgggtctggaatataccatttttcccaaacatcagtatatgaagcagtccttccccatggcttcaaatgtccattccaatggagtaacttggcagcctttacaaactgaggtgaatatcgttttccagcactggaaccttacatttgagacaaaaatagccacatcgttgcgccatgtgaaattgtgcagaaaacttacttaagggaaacaaagaatataccccatccctgaggatagttctttagataccaattctttactagcttatgccactggttaattctacttaccaaggtggcggacattccacataggatcgatggtagagtgctgttgataaaatacgataagcagaggaggtgttgtgatgctaccagccagggttctgctatacagtccctctcttggtgggacagaaaacaaatgtttgttagtgaaaagtactgactaactcctgttagtcaagactctaggaattgaaatacaacagtttttcacagctaggccagttacatacttactctacattgagtttcatccatttttccagttggttagttatattctgtcgtttccattccgtcaggtttgcaacaaaaactccaggattaaatgagcaagtgctggctttcatggaaagcttacgaattctttcctttttatagtcaagatagccaatgtaattgtactaaaaacacaaataggatatatgtacttactgcttcaaacaaaatagatacaattttatagccagtagagagaagagctgttaaactgacttcttcagattagaaaataaatatttgaaattccaagttagaataggaacctagatgttgacataataaaccagatgttcaagaacaattaggctgtcaagtccatgaagaagtctacagaaaagcaggcttgagttttgggatgaaatgattggggagtgtaaattgcagcaaaagagttccctgaatttgcaacctcttcccattaaacaatattgtaggaagaggggtgtttggtaagcaatttacctggtttcctgctccacggatgacaactttagtagaggctgaatcacaatcttctgaaaatgcagctgcatgtcctggcttcagtgctgtattgtaaagggcaagaatatcacctgaaatagacaagatgttaagatttacatttccgttgccttgagagttccctgttactcccacttctccctatggtgaccttttatagaagaccataaataaaccactacagcccactgtagcccattgttttatttagcaattgtacccaatctgggtggagacagcactcatggtgacatttttgatac

SEQ ID NO: 357383 - DNA, 3172 bp, Homo sapiens
  misc_feature (8)..(8): n is a, c, g, or t
  misc_feature (32)..(32): n is a, c, g, or t
taagcttnggctaggtacgaggctgggtgttnctcagaacagagggtagaagaggccattgtccagagtggacagaaaaagctggtacttatattaaataaatcagatctggtaccaaaggagaatttggagagctggctaaattatttgaagaaagaattgccaacagtggtgttcagagcctcaacaaaaccaaaggataaagggaagataaccaagcgtgtgaaggcaaagaagaatgctgctccattcagaagtgaagtctgctttgggaaagagggcctttggaaacttcttggaggttttcaggaaacttgcagcaaagccattcgggttggagtaattggtttcccaaatgtggggaaaagcagcattatcaatagcttaaaacaagaacagatgtgtaatgttggtgtatccatggggcttacaaggagcatgcaagttgtccccttggacaaacagatcacaatcatagatagtccgagcttcatcgtatctccacttaattcctcctctgcgcttgctctgcgaagtccagcaagtattgaagtagtaaaaccgatggaggctgccagtgccatcctttcccaggctgatgctcgacaggtagtactgaaatatactgtcccaggctacaggaattctctggaattttttactgtgcttgctcagagaagaggtatgcaccaaaaaggtggaatcccaaatgttgaaggtgctgccaaactgctgtggtctgagtggacaggtgcctcattagcttactattgccatccccctacatcttggactcctcctccatattttaatgagagtattgtggtagacatgaaaagcggcttcaatctggaagaactggaaaagaacaatgcacagagcataagagccatcaagggccctcatttggccaatagcatccttttccagtcttccggtctgacaaatggaataatagaagaaaaggacatacatgaagaattgccaaaacggaaagaaaggaagcaggaggagagggaggatgacaaagacagtgaccaggaaactgttgatgaagaagttgatgaaaacagctcaggcatgtttgctgcagaagagacaggggaggcactgtctgaggagactacagcaggtgaacagtctacaaggtcttttatcttggataaaatcattgaagaggatgatgcttatgacttcagtacagattatgtgtaacagaacaatggctttttatgattttttttttaacattttaagcagactgctaaactgttctctgtataagttatggtatgcatgagctgtgtaaattttgtgaatatgtattatattaaaaccaggcaacttggaatccctaaattctgtaaaaagacaattcatctcattgtgagtggaagtagttatctggaataaaaaaagaagatacctattgaaaaatgtaagttttatttacagatcaggccacaggttacaaaattaaaaccaacagcagttttgaattatctgtaccagctagctgaactagccatatcagttcttctttccagtcattcagcattgtagtaagaaaacacttggtaaggcagatggagacatatttatagtctatagtctgtctgggaagctgactgccagacagggcagtttgtcatctttacctagctgacacatctttttccatggcttgctaccgataggcattgaagcctagcaactgttacttcccacgcatgctatcttccaggacttcctgagaaatgcttgcttacagttcaaattctgtttcactttatgtttgagatctcggtatatcttcggattaggttgaatttgcctgttgggtctggaatataccatttttcccaaacatcagtatatgaagcagtccttccccatggcttcaaatgtccattccaatggagtaacttggcagcctttacaaactgaggtgaatatcgttttccagcactggaaccttacatttgagacaaaaatagccacatcgttgcgccatgtgaaattgtgcagaaaacttacttaagggaaacaaagaatataccccatccctgaggatagttctttagataccaattctttactagcttatgccactggttaattctacttaccaaggtggcggacattccacataggatcgatggtagagtgctgttgataaaatacgataagcagaggaggtgttgtgatgctaccagccagggttctgctatacagtccctctcttggtgggacagaaaacaaatgtttgttagtgaaaagtactgactaactcctgttagtcaagactctaggaattgaaatacaacagtttttcacagctaggccagttacatacttactctacattgagtttcatccatttttccagttggttagttatattctgtcgtttccattccgtcaggtttgcaacaaaaactccaggattaaatgagcaagtgctggctttcatggaaagcttacgaattctttcctttttatagtcaagatagccaatgtaattgtactaaaaacacaaataggatatatgtacttactgcttcaaacaaaatagatacaattttatagccagtagagagaagagctgttaaactgacttcttcagattagaaaataaatatttgaaattccaagttagaataggaacctagatgttgacataataaaccagatgttcaagaacaattaggctgtcaagtccatgaagaagtctacagaaaagcaggcttgagttttgggatgaaatgattggggagtgtaaattgcagcaaaagagttccctgaatttgcaacctcttcccattaaacaatattgtaggaagaggggtgtttggtaagcaatttacctggtttcctgctccacggatgacaactttagtagaggctgaatcacaatcttctgaaaatgcagctgcatgtcctggcttcagtgctgtattgtaaagggcaagaatatcacctgaaatagacaagatgttaagatttacatttccgttgccttgagagttccctgttactcccacttctccctatggtgaccttttatagaagaccataaataaaccactacagcccactgtagcccattgttttatttagcaattgtacccaatctgggtggagacagcactcatggtgacatttttgatac

SEQ ID NO: 357384 - DNA, 4521 bp, Homo sapiens
gcggccgccaagcgatccctgctccgcgcgacactgcgtgcccgcgcacgcagagaggcggtgacgcactttacggcggcagcgtaagtgcgtgacgctcgtcagtggcttcagttcacacgtggcgccagcggaggcaggttgctgtgtttgtgcttccttctacagccaatatgaaaaggcctagtaagtggggtcgggaggcgggcgtggagggacccacgtctggaagttgctgcagccaccacgacgctcttctacggctacggctttgtctctgctggtatgggggtgggagcctacgcgtaggccttggccctatttcctggtagaaccgagagttggaagtccctacggcgatcatgttaaccgcgcgggctcattctgcggaacgaagccgggcagagggtggggaagactaggctagattttcgtaaggaagcagcgtctgagccaggtttgaggcccaatattttctttccgtggccacgtgcagactggcccaggtgagagctgagaatcgcctcccagactcagtgttcctctcctgccttatgattcgtgctgtttgacacgaagtggttgtcgttttgtgtctcatacgctgttgtgtatgatcccattctaatattgtgagggtaagtgcagggaattttgactccattctggatctactgaatttaattctctgggatttgaaagtagcacgtatgtttgcattaggcatttcgcattagacttaacgttaggtttggtagccaataacacaagaaaaggatataactccatagtgcgttaacccagaactaatcatttgggttaacagatttgtgatgtgtttctttgtagagttaaagaaagcaagtaaacgcatgacctgccataagcggtataaaatccaaaaaaaggttcgagaacatcatcgaaaattaagaaaggaggctaaaaagcggggtcacaagaagcctaggaaagacccaggagttccaaacagtgctccctttaaggaggctcttcttagggaagctgagctaaggaaacagaggcttgaagaactaaaacagcagcagaaacttgacaggcagaaggaactagaaaagaaaagaaaacttgaaactaatcctgatattaagccatcaaatgtggaacctatggaaaaggagtttgggctttgcaaaactgagaacaaagccaagtcgggcaaacagaattcaaagaagctgtactgccaagaacttaaaaaggtgattgaagcctccgatgttgtcctagaggtgttggatgccagagatcctcttggttgcagatgtcctcaggtagaagaggccattgtccagagtggacagaaaaagctggtacttatattaaataaatcagatctggtaccaaaggagaatttggagagctggctaaattatttgaagaaagaattgccaacagtggtgttcagagcctcaacaaaaccaaaggataaagggaagataaccaagcgtgtgaaggcaaagaagaatgctgctccattcagaagtgaagtctgctttgggaaagagggcctttggaaacttcttggaggttttcaggaaacttgcagcaaagccattcgggttggagtaattggtttcccaaatgtggggaaaagcagcattatcaatagcttaaaacaagaacagatgtgtaatgttggtgtatccatggggcttacaaggagcatgcaagttgtccccttggacaaacagatcacaatcatagatagtccgagcttcatcgtatctccacttaattcctcctctgcgcttgctctgcgaagtccagcaagtattgaagtagtaaaaccgatggaggctgccagtgccatcctttcccaggctgatgctcgacaggtagtactgaaatatactgtcccaggctacaggaattctctggaattttttactgtgcttgctcagagaagaggtatgcaccaaaaaggtggaatcccaaatgttgaaggtgctgccaaactgctgtggtctgagtggacagggtaagctttcttttctgttggcattttggtgaccactagaataaaccttcttttgacacatcttatttttaatatcagtgcctcattagcttactattgccatccccctacatcttggactcctcctccatattttaatgagagtattgtggtagacatgaaaagcggcttcaatctggaagaactggaaaagaacaatgcacagagcataagagccatcaagggccctcatttggccaatagcatccttttccagtcttccggtctgacaaatggaataatagaagaaaaggacatacatgaagaattgccaaaacggaaagaaaggaagcaggaggagagggaggatgacaaagacagtgaccaggaaactgttgatgaagaagttgatgaaaacagctcaggcatgtttgctgcagaagagacaggggaggcactgtctgaggagactacagcaggtgaacagtctacaaggtcttttatcttggataaaatcattgaagaggatgatgcttatgacttcagtacagattatgtgtaacagaacaatggctttttatgattttttttttaacattttaagcagactgctaaactgttctctgtataagttatggtatgcatgagctgtgtaaattttgtgaatatgtattatattaaaaccaggcaacttggaatccctaaattctgtaaaaagacaattcatctcattgtgagtggaagtagttatctggaataaaaaaagaagatacctattgaaaaatgtaagttttatttacagatcaggccacaggttacaaaattaaaaccaacagcagttttgaattatctgtaccagctagctgaactagccatatcagttcttctttccagtcattcagcattgtagtaagaaaacacttggtaaggcagatggagacatatttatagtctatagtctgtctgggaagctgactgccagacagggcagtttgtcatctttacctagctgacacatctttttccatggcttgctaccgataggcattgaagcctagcaactgttacttcccacgcatgctatcttccaggacttcctgagaaatgcttgcttacagttcaaattctgtttcactttatgtttgagatctcggtatatcttcggattaggttgaatttgcctgttgggtctggaatataccatttttcccaaacatcagtatatgaagcagtccttccccatggcttcaaatgtccattccaatggagtaacttggcagcctttacaaactgaggtgaatatcgttttccagcactggaaccttacatttgagacaaaaatagccacatcgttgcgccatgtgaaattgtgcagaaaacttacttaagggaaacaaagaatataccccatccctgaggatagttctttagataccaattctttactagcttatgccactggttaattctacttaccaaggtggcggacattccacataggatcgatggtagagtgctgttgataaaatacgataagcagaggaggtgttgtgatgctaccagccagggttctgctatacagtccctctcttggtgggacagaaaacaaatgtttgttagtgaaaagtactgactaactcctgttagtcaagactctaggaattgaaatacaacagtttttcacagctaggccagttacatacttactctacattgagtttcatccatttttccagttggttagttatattctgtcgtttccattccgtcaggtttgcaacaaaaactccaggattaaatgagcaagtgctggctttcatggaaagcttacgaattctttcctttttatagtcaagatagccaatgtaattgtactaaaaacacaaataggatatatgtacttactgcttcaaacaaaatagatacaattttatagccagtagagagaagagctgttaaactgacttcttcagattagaaaataaatatttgaaattccaagttagaataggaacctagatgttgacataataaaccagatgttcaagaacaattaggctgtcaagtccatgaagaagtctacagaaaagcaggcttgagttttgggatgaaatgattggggagtgtaaattgcagcaaaagagttccctgaatttgcaacctcttcccattaaacaatattgtaggaagaggggtgtttggtaagcaatttacctggtttcctgctccacggatgacaactttagtagaggctgaatcacaatcttctgaaaatgcagctgcatgtcctggcttcagtgctgtattgtaaagggcaagaatatcacctgaaatagacaagatgttaagatttacatttccgttgccttgagagttccctgttactcccacttctccctatggtgaccttttatagaagaccataaataaaccactacagcccactgtagcccattgttttatttagcaattgtacccaatctgggtggagacagcactcatggtgacatttttgatac

SEQ ID NO: 357385 - DNA, 4608 bp, Homo sapiens
gcggccgccaagcgatccctgctccgcgcgacactgcgtgcccgcgcacgcagagaggcggtgacgcactttacggcggcagcgtaagtgcgtgacgctcgtcagtggcttcagttcacacgtggcgccagcggaggcaggttgctgtgtttgtgcttccttctacagccaatatgaaaaggcctagtaagtggggtcgggaggcgggcgtggagggacccacgtctggaagttgctgcagccaccacgacgctcttctacggctacggctttgtctctgctggtatgggggtgggagcctacgcgtaggccttggccctatttcctggtagaaccgagagttggaagtccctacggcgatcatgttaaccgcgcgggctcattctgcggaacgaagccgggcagagggtggggaagactaggctagattttcgtaaggaagcagcgtctgagccaggtttgaggcccaatattttctttccgtggccacgtgcagactggcccaggtgagagctgagaatcgcctcccagactcagtgttcctctcctgccttatgattcgtgctgtttgacacgaagtggttgtcgttttgtgtctcatacgctgttgtgtatgatcccattctaatattgtgagggtaagtgcagggaattttgactccattctggatctactgaatttaattctctgggatttgaaagtagcacgtatgtttgcattaggcatttcgcattagacttaacgttaggtttggtagccaataacacaagaaaaggatataactccatagtgcgttaacccagaactaatcatttgggttaacagatttgtgatgtgtttctttgtagagttaaagaaagcaagtaaacgcatgacctgccataagcggtataaaatccaaaaaaaggttcgagaacatcatcgaaaattaagaaaggaggctaaaaagcggggtcacaagaagcctaggaaagacccaggagttccaaacagtgctccctttaaggaggctcttcttagggaagctgagctaaggaaacagaggcttgaagaactaaaacagcagcagaaacttgacaggcagaaggaactagaaaagaaaagaaaacttgaaactaatcctgatattaagccatcaaatgtggaacctatggaaaaggagtttgggctttgcaaaactgagaacaaagccaagtcgggcaaacagaattcaaagaagctgtactgccaagaacttaaaaaggtgattgaagcctccgatgttgtcctagaggtgttggatgccagagatcctcttggttgcagatgtcctcaggtagaagaggccattgtccagagtggacagaaaaagctggtacttatattaaataaatcagatctggtaccaaaggagaatttggagagctggctaaattatttgaagaaagaattgccaacagtggtgttcagagcctcaacaaaaccaaaggataaagggaagataaccaagcgtgtgaaggcaaagaagaatgctgctccattcagaagtgaagtctgctttgggaaagagggcctttggaaacttcttggaggttttcaggaaacttgcagcaaagccattcgggttggagtaattggtttcccaaatgtggggaaaagcagcattatcaatagcttaaaacaagaacagatgtgtaatgttggtgtatccatggggcttacaaggagcatgcaagttgtccccttggacaaacagatcacaatcatagatagtccgagcttcatcgtatctccacttaattcctcctctgcgcttgctctgcgaagtccagcaagtattgaagtagtaaaaccgatggaggctgccagtgccatcctttcccaggctgatgctcgacaggtagtactgaaatatactgtcccaggctacaggaattctctggaattttttactgtgcttgctcagagaagaggtatgcaccaaaaaggtggaatcccaaatgttgaaggtgctgccaaactgctgtggtctgagtggacagggtaagctttcttttctgttggcattttggtgaccactagaataaaccttcttttgacacatcttatttttaatatcagtgcctcattagcttactattgccatccccctacatcttggactcctcctccatattttaatgagagtattgtggtagacatgaaaagcggcttcaatctggaagaactggaaaagaacaatgcacagagcataagaggtgagaattgtgtgtcgctgctgtcttcatcagctgacaggccagtggagctcttacctgattacatgggcttgctttctttcccagccatcaagggccctcatttggccaatagcatccttttccagtcttccggtctgacaaatggaataatagaagaaaaggacatacatgaagaattgccaaaacggaaagaaaggaagcaggaggagagggaggatgacaaagacagtgaccaggaaactgttgatgaagaagttgatgaaaacagctcaggcatgtttgctgcagaagagacaggggaggcactgtctgaggagactacagcaggtgaacagtctacaaggtcttttatcttggataaaatcattgaagaggatgatgcttatgacttcagtacagattatgtgtaacagaacaatggctttttatgattttttttttaacattttaagcagactgctaaactgttctctgtataagttatggtatgcatgagctgtgtaaattttgtgaatatgtattatattaaaaccaggcaacttggaatccctaaattctgtaaaaagacaattcatctcattgtgagtggaagtagttatctggaataaaaaaagaagatacctattgaaaaatgtaagttttatttacagatcaggccacaggttacaaaattaaaaccaacagcagttttgaattatctgtaccagctagctgaactagccatatcagttcttctttccagtcattcagcattgtagtaagaaaacacttggtaaggcagatggagacatatttatagtctatagtctgtctgggaagctgactgccagacagggcagtttgtcatctttacctagctgacacatctttttccatggcttgctaccgataggcattgaagcctagcaactgttacttcccacgcatgctatcttccaggacttcctgagaaatgcttgcttacagttcaaattctgtttcactttatgtttgagatctcggtatatcttcggattaggttgaatttgcctgttgggtctggaatataccatttttcccaaacatcagtatatgaagcagtccttccccatggcttcaaatgtccattccaatggagtaacttggcagcctttacaaactgaggtgaatatcgttttccagcactggaaccttacatttgagacaaaaatagccacatcgttgcgccatgtgaaattgtgcagaaaacttacttaagggaaacaaagaatataccccatccctgaggatagttctttagataccaattctttactagcttatgccactggttaattctacttaccaaggtggcggacattccacataggatcgatggtagagtgctgttgataaaatacgataagcagaggaggtgttgtgatgctaccagccagggttctgctatacagtccctctcttggtgggacagaaaacaaatgtttgttagtgaaaagtactgactaactcctgttagtcaagactctaggaattgaaatacaacagtttttcacagctaggccagttacatacttactctacattgagtttcatccatttttccagttggttagttatattctgtcgtttccattccgtcaggtttgcaacaaaaactccaggattaaatgagcaagtgctggctttcatggaaagcttacgaattctttcctttttatagtcaagatagccaatgtaattgtactaaaaacacaaataggatatatgtacttactgcttcaaacaaaatagatacaattttatagccagtagagagaagagctgttaaactgacttcttcagattagaaaataaatatttgaaattccaagttagaataggaacctagatgttgacataataaaccagatgttcaagaacaattaggctgtcaagtccatgaagaagtctacagaaaagcaggcttgagttttgggatgaaatgattggggagtgtaaattgcagcaaaagagttccctgaatttgcaacctcttcccattaaacaatattgtaggaagaggggtgtttggtaagcaatttacctggtttcctgctccacggatgacaactttagtagaggctgaatcacaatcttctgaaaatgcagctgcatgtcctggcttcagtgctgtattgtaaagggcaagaatatcacctgaaatagacaagatgttaagatttacatttccgttgccttgagagttccctgttactcccacttctccctatggtgaccttttatagaagaccataaataaaccactacagcccactgtagcccattgttttatttagcaattgtacccaatctgggtggagacagcactcatggtgacatttttgatac

SEQ ID NO: 357386 - DNA, 2779 bp, Homo sapiens
ctgtcttagaggaccccttcgacggtgtctgtgtggtctcccaacactaagttaagatgcaagttttgtattgcaagttatgtttatttttcattcacaattatactgagaatgttatattaggaaaaattgtatctacatgggcatctgctattagacttcctgcattgtacaggaactaagctatagtttctatcatctgtaactccttcgacggtagtactgaaatatactgtcccaggctacaggaattctctggaattttttactgtgcttgctcagagaagaggtatgcaccaaaaaggtggaatcccaaatgttgaaggtgctgccaaactgctgtggtctgagtggacaggtgcctcattagcttactattgccatccccctacatcttggactcctcctccatattttaatgagagtattgtggtagacatgaaaagcggcttcaatctggaagaactggaaaagaacaatgcacagagcataagagccatcaagggccctcatttggccaatagcatccttttccagtcttccggtctgacaaatggaataatagaagaaaaggacatacatgaagaattgccaaaacggaaagaaaggaagcaggaggagagggaggatgacaaagacagtgaccaggaaactgttgatgaagaagttgatgaaaacagctcaggcatgtttgctgcagaagagacaggggaggcactgtctgaggagactacagcaggtgaacagtctacaaggtcttttatcttggataaaatcattgaagaggatgatgcttatgacttcagtacagattatgtgtaacagaacaatggctttttatgattttttttttaacattttaagcagactgctaaactgttctctgtataagttatggtatgcatgagctgtgtaaattttgtgaatatgtattatattaaaaccaggcaacttggaatccctaaattctgtaaaaagacaattcatctcattgtgagtggaagtagttatctggaataaaaaaagaagatacctattgaaaaatgtaagttttatttacagatcaggccacaggttacaaaattaaaaccaacagcagttttgaattatctgtaccagctagctgaactagccatatcagttcttctttccagtcattcagcattgtagtaagaaaacacttggtaaggcagatggagacatatttatagtctatagtctgtctgggaagctgactgccagacagggcagtttgtcatctttacctagctgacacatctttttccatggcttgctaccgataggcattgaagcctagcaactgttacttcccacgcatgctatcttccaggacttcctgagaaatgcttgcttacagttcaaattctgtttcactttatgtttgagatctcggtatatcttcggattaggttgaatttgcctgttgggtctggaatataccatttttcccaaacatcagtatatgaagcagtccttccccatggcttcaaatgtccattccaatggagtaacttggcagcctttacaaactgaggtgaatatcgttttccagcactggaaccttacatttgagacaaaaatagccacatcgttgcgccatgtgaaattgtgcagaaaacttacttaagggaaacaaagaatataccccatccctgaggatagttctttagataccaattctttactagcttatgccactggttaattctacttaccaaggtggcggacattccacataggatcgatggtagagtgctgttgataaaatacgataagcagaggaggtgttgtgatgctaccagccagggttctgctatacagtccctctcttggtgggacagaaaacaaatgtttgttagtgaaaagtactgactaactcctgttagtcaagactctaggaattgaaatacaacagtttttcacagctaggccagttacatacttactctacattgagtttcatccatttttccagttggttagttatattctgtcgtttccattccgtcaggtttgcaacaaaaactccaggattaaatgagcaagtgctggctttcatggaaagcttacgaattctttcctttttatagtcaagatagccaatgtaattgtactaaaaacacaaataggatatatgtacttactgcttcaaacaaaatagatacaattttatagccagtagagagaagagctgttaaactgacttcttcagattagaaaataaatatttgaaattccaagttagaataggaacctagatgttgacataataaaccagatgttcaagaacaattaggctgtcaagtccatgaagaagtctacagaaaagcaggcttgagttttgggatgaaatgattggggagtgtaaattgcagcaaaagagttccctgaatttgcaacctcttcccattaaacaatattgtaggaagaggggtgtttggtaagcaatttacctggtttcctgctccacggatgacaactttagtagaggctgaatcacaatcttctgaaaatgcagctgcatgtcctggcttcagtgctgtattgtaaagggcaagaatatcacctgaaatagacaagatgttaagatttacatttccgttgccttgagagttccctgttactcccacttctccctatggtgaccttttatagaagaccataaataaaccactacagcccactgtagcccattgttttatttagcaattgtacccaatctgggtggagacagcactcatggtgacatttttgatac

SEQ ID NO: 357387 - DNA, 4761 bp, Homo sapiens
gcggccgccaagcgatccctgctccgcgcgacactgcgtgcccgcgcacgcagagaggcggtgacgcactttacggcggcagcgtaagtgcgtgacgctcgtcagtggcttcagttcacacgtggcgccagcggaggcaggttgctgtgtttgtgcttccttctacagccaatatgaaaaggcctagtaagtggggtcgggaggcgggcgtggagggacccacgtctggaagttgctgcagccaccacgacgctcttctacggctacggctttgtctctgctggtatgggggtgggagcctacgcgtaggccttggccctatttcctggtagaaccgagagttggaagtccctacggcgatcatgttaaccgcgcgggctcattctgcggaacgaagccgggcagagggtggggaagactaggctagattttcgtaaggaagcagcgtctgagccaggtttgaggcccaatattttctttccgtggccacgtgcagactggcccaggtgagagctgagaatcgcctcccagactcagtgttcctctcctgccttatgattcgtgctgtttgacacgaagtggttgtcgttttgtgtctcatacgctgttgtgtatgatcccattctaatattgtgagggtaagtgcagggaattttgactccattctggatctactgaatttaattctctgggatttgaaagtagcacgtatgtttgcattaggcatttcgcattagacttaacgttaggtttggtagccaataacacaagaaaaggatataactccatagtgcgttaacccagaactaatcatttgggttaacagatttgtgatgtgtttctttgtagagttaaagaaagcaagtaaacgcatgacctgccataagcggtataaaatccaaaaaaaggttcgagaacatcatcgaaaattaagaaaggaggctaaaaagcggggtcacaagaagcctaggaaagacccaggagttccaaacagtgctccctttaaggaggctcttcttagggaagctgagctaaggaaacagaggcttgaagaactaaaacagcagcagaaacttgacaggcagaaggaactagaaaagaaaagaaaacttgaaactaatcctgatattaagccatcaaatgtggaacctatggaaaaggagtttgggctttgcaaaactgagaacaaagccaagtcgggcaaacagaattcaaagaagctgtactgccaagaacttaaaaaggtgattgaagcctccgatgttgtcctagaggtgttggatgccagagatcctcttggttgcagatgtcctcaggtagaagaggccattgtccagagtggacagaaaaagctggtacttatattaaataaatcagatctggtaccaaaggagaatttggagagctggctaaattatttgaagaaagaattgccaacagtggtgttcagagcctcaacaaaaccaaaggataaagggaagataaccaagcgtgtgaaggcaaagaagaatgctgctccattcagaagtgaagtctgctttgggaaagagggcctttggaaacttcttggaggttttcaggaaacttgcagcaaagccattcgggttggagtaattggtttcccaaatgtggggaaaagcagcattatcaatagcttaaaacaagaacagatgtgtaatgttggtgtatccatggggcttacaaggagcatgcaagttgtccccttggacaaacagatcacaatcatagatagtccgagcttcatcgtatctccacttaattcctcctctgcgcttgctctgcgaagtccagcaagtattgaagtagtaaaaccgatggaggctgccagtgccatcctttcccaggctgatgctcgacaggtagtactgaaatatactgtcccaggctacaggaattctctggaattttttactgtgcttgctcagagaagaggtatgcaccaaaaaggtggaatcccaaatgttgaaggtgctgccaaactgctgtggtctgagtggacaggtgcctcattagcttactattgccatccccctacatcttggactcctcctccatattttaatgagagtattgtggtagacatgaaaagcggcttcaatctggaagaactggaaaagaacaatgcacagagcataagagccatcaagggccctcatttggccaatagcatccttttccagtcttccggtctgacaaatggaataatagaagaaaaggacatacatgaagaattgccaaaacggaaagaaaggaagcaggaggagagggaggatgacaaagacagtgaccaggaaactgttgatgaagaagttgatgtaagtgtgtcctccatgagttaaaactgaagtgagttttctagcattataatacataatggaaggaactgaagataggaaatatttgaggcttgtgatccattagccttaattttgcacatcccgttatatgtacctccaaagagttaatttttcaggtacataactacttggattaaatgagcagacaagggctactaatccagcactatttttctttgtcacacaggaaaacagctcaggcatgtttgctgcagaagagacaggggaggcactgtctgaggagactacagcaggtgaggcaggcaaaaggggttctaacgaagcagcatggtatagaatcacttttactttttgaaaatctctttattttcctgcaatataggtgaacagtctacaaggtcttttatcttggataaaatcattgaagaggatgatgcttatgacttcagtacagattatgtgtaacagaacaatggctttttatgattttttttttaacattttaagcagactgctaaactgttctctgtataagttatggtatgcatgagctgtgtaaattttgtgaatatgtattatattaaaaccaggcaacttggaatccctaaattctgtaaaaagacaattcatctcattgtgagtggaagtagttatctggaataaaaaaagaagatacctattgaaaaatgtaagttttatttacagatcaggccacaggttacaaaattaaaaccaacagcagttttgaattatctgtaccagctagctgaactagccatatcagttcttctttccagtcattcagcattgtagtaagaaaacacttggtaaggcagatggagacatatttatagtctatagtctgtctgggaagctgactgccagacagggcagtttgtcatctttacctagctgacacatctttttccatggcttgctaccgataggcattgaagcctagcaactgttacttcccacgcatgctatcttccaggacttcctgagaaatgcttgcttacagttcaaattctgtttcactttatgtttgagatctcggtatatcttcggattaggttgaatttgcctgttgggtctggaatataccatttttcccaaacatcagtatatgaagcagtccttccccatggcttcaaatgtccattccaatggagtaacttggcagcctttacaaactgaggtgaatatcgttttccagcactggaaccttacatttgagacaaaaatagccacatcgttgcgccatgtgaaattgtgcagaaaacttacttaagggaaacaaagaatataccccatccctgaggatagttctttagataccaattctttactagcttatgccactggttaattctacttaccaaggtggcggacattccacataggatcgatggtagagtgctgttgataaaatacgataagcagaggaggtgttgtgatgctaccagccagggttctgctatacagtccctctcttggtgggacagaaaacaaatgtttgttagtgaaaagtactgactaactcctgttagtcaagactctaggaattgaaatacaacagtttttcacagctaggccagttacatacttactctacattgagtttcatccatttttccagttggttagttatattctgtcgtttccattccgtcaggtttgcaacaaaaactccaggattaaatgagcaagtgctggctttcatggaaagcttacgaattctttcctttttatagtcaagatagccaatgtaattgtactaaaaacacaaataggatatatgtacttactgcttcaaacaaaatagatacaattttatagccagtagagagaagagctgttaaactgacttcttcagattagaaaataaatatttgaaattccaagttagaataggaacctagatgttgacataataaaccagatgttcaagaacaattaggctgtcaagtccatgaagaagtctacagaaaagcaggcttgagttttgggatgaaatgattggggagtgtaaattgcagcaaaagagttccctgaatttgcaacctcttcccattaaacaatattgtaggaagaggggtgtttggtaagcaatttacctggtttcctgctccacggatgacaactttagtagaggctgaatcacaatcttctgaaaatgcagctgcatgtcctggcttcagtgctgtattgtaaagggcaagaatatcacctgaaatagacaagatgttaagatttacatttccgttgccttgagagttccctgttactcccacttctccctatggtgaccttttatagaagaccataaataaaccactacagcccactgtagcccattgttttatttagcaattgtacccaatctgggtggagacagcactcatggtgacatttttgatac

SEQ ID NO: 357388 - DNA, 3041 bp, Homo sapiens
gcggccgccaagcgatccctgctccgcgcgacactgcgtgcccgcgcacgcagagaggcggtgacgcactttacggcggcagcgtaagtgcgtgacgctcgtcagtggcttcagttcacacgtggcgccagcggaggcaggttgctgtgtttgtgcttccttctacagccaatatgaaaaggcctagtaagtggggtcgggaggcgggcgtggagggacccacgtctggaagttgctgcagccaccacgacgctcttctacggctacggctttgtctctgctggtatgggggtgggagcctacgcgtaggccttggccctatttcctggtagaaccgagagttggaagtccctacggcgatcatgttaaccgcgcgggctcattctgcggaacgaagccgggcagagggtggggaagactaggctagattttcgtaaggaagcagcgtctgagccaggtttgaggcccaatattttctttccgtggccacgtgcagactggcccaggtgagagctgagaatcgcctcccagactcagtgttcctctcctgccttatgattcgtgctgtttgacacgaagtggttgtcgttttgtgtctcatacgctgttgtgtatgatcccattctaatattgtgagggtaagtgcagggaattttgactccattctggatctactgaatttaattctctgggatttgaaagtagcacgtatgtttgcattaggcatttcgcattagacttaacgttaggtttggtagccaataacacaagaaaaggatataactccatagtgcgttaacccagaactaatcatttgggttaacagatttgtgatgtgtttctttgtagagttaaagaaagcaagtaaacgcatgacctgccataagcggtataaaatccaaaaaaaggttcgagaacatcatcgaaaattaagaaaggaggctaaaaagcggggtcacaagaagcctaggaaagacccaggagttccaaacagtgctccctttaaggaggctcttcttagggaagctgagctaaggaaacagaggcttgaagaactaaaacagcagcagaaacttgacaggcagaaggaactagaaaagaaaagaaaacttgaaactaatcctgatattaagccatcaaatgtggaacctatggaaaaggagtttgggctttgcaaaactgagaacaaagccaagtcgggcaaacagaattcaaagaagctgtactgccaagaacttaaaaaggtgattgaagcctccgatgttgtcctagaggtgttggatgccagagatcctcttggttgcagatgtcctcaggtagaagaggccattgtccagagtggacagaaaaagctggtacttatattaaataaatcagatctggtaccaaaggagaatttggagagctggctaaattatttgaagaaagaattgccaacagtggtgttcagagcctcaacaaaaccaaaggataaagggaagataaccaagcgtgtgaaggcaaagaagaatgctgctccattcagaagtgaagtctgctttgggaaagagggcctttggaaacttcttggaggttttcaggaaacttgcagcaaagccattcgggttggagtaattggtttcccaaatgtggggaaaagcagcattatcaatagcttaaaacaagaacagatgtgtaatgttggtgtatccatggggcttacaaggagcatgcaagttgtccccttggacaaacagatcacaatcatagatagtccgagcttcatcgtatctccacttaattcctcctctgcgcttgctctgcgaagtccagcaagtattgaagtagtaaaaccgatggaggctgccagtgccatcctttcccaggctgatgctcgacaggtagtactgaaatatactgtcccaggctacaggaattctctggaattttttactgtgcttgctcagagaagaggtatgcaccaaaaaggtggaatcccaaatgttgaaggtgctgccaaactgctgtggtctgagtggacaggtgcctcattagcttactattgccatccccctacatcttggactcctcctccatattttaatgagagtattgtggtagacatgaaaagcggcttcaatctggaagaactggaaaagaacaatgcacagagcataagagccatcaagggccctcatttggccaatagcatccttttccagtcttccggtctgacaaatggaataatagaagaaaaggacatacatgaagaattgccaaaacggaaagaaaggaagcaggaggagagggaggatgacaaagacagtgaccaggaaactgttgatgaagaagttgatgaaaacagctcaggcatgtttgctgcagaagagacaggggaggcactgtctgaggagactacagcaggtgaacagtctacaaggtcttttatcttggataaaatcattgaagaggatgatgcttatgacttcagtacagattatgtgtaacagaacaatggctttttatgattttttttttaacattttaagcagactgctaaactgttctctgtataagttatggtatgcatgagctgtgtaaattttgtgaatatgtattatattaaaaccaggcaacttggaatccctaaattctgtaaaaagacaattcatctcattgtgagtggaagtagttatctggaataaaaaaagaagatacctattgaaaaatgtaagttttatttacagatcaggccacaggttacaaaattaaaaccaacagcagttttgaattatctgtaccagctagctgaactagccatatcagttcttctttccagtcattcagcattgtagtaagaaaacacttggtaaggcagatggagacatatttatagtctatagtctgtctgggaagctgactgccagacagggcagtttgtcatctttacctagctgacacatctttttccatggcttgctaccgataggcattgaagcctagcaactgttacttcccacgcatccttcgtcgtctctcgcagccgtagtcgcgcggccgcg

SEQ ID NO: 357389 - DNA, 2340 bp, Homo sapiens
ctagaggatcttcaactacagcaggtgaacagtctacaaggtcttttatcttggaagccatcaagggccctcatttggccaatagcatccttttccagtcttccggtctgacaaatggaataatagaagaaaaggacatacatgaagaattgccaaaacggaaagaaaggaagcaggaggagagggaggatgacaaagacagtgaccaggaaactgttgatgaagaagttgatgaaaacagctcaggcatgtttgctgcagaagagacaggggaggcactgtctgaggagactacagcaggtgaacagtctacaaggtcttttatcttggataaaatcattgaagaggatgatgcttatgacttcagtacagattatgtgtaacagaacaatggctttttatgattttttttttaacattttaagcagactgctaaactgttctctgtataagttatggtatgcatgagctgtgtaaattttgtgaatatgtattatattaaaaccaggcaacttggaatccctaaattctgtaaaaagacaattcatctcattgtgagtggaagtagttatctggaataaaaaaagaagatacctattgaaaaatgtaagttttatttacagatcaggccacaggttacaaaattaaaaccaacagcagttttgaattatctgtaccagctagctgaactagccatatcagttcttctttccagtcattcagcattgtagtaagaaaacacttggtaaggcagatggagacatatttatagtctatagtctgtctgggaagctgactgccagacagggcagtttgtcatctttacctagctgacacatctttttccatggcttgctaccgataggcattgaagcctagcaactgttacttcccacgcatgctatcttccaggacttcctgagaaatgcttgcttacagttcaaattctgtttcactttatgtttgagatctcggtatatcttcggattaggttgaatttgcctgttgggtctggaatataccatttttcccaaacatcagtatatgaagcagtccttccccatggcttcaaatgtccattccaatggagtaacttggcagcctttacaaactgaggtgaatatcgttttccagcactggaaccttacatttgagacaaaaatagccacatcgttgcgccatgtgaaattgtgcagaaaacttacttaagggaaacaaagaatataccccatccctgaggatagttctttagataccaattctttactagcttatgccactggttaattctacttaccaaggtggcggacattccacataggatcgatggtagagtgctgttgataaaatacgataagcagaggaggtgttgtgatgctaccagccagggttctgctatacagtccctctcttggtgggacagaaaacaaatgtttgttagtgaaaagtactgactaactcctgttagtcaagactctaggaattgaaatacaacagtttttcacagctaggccagttacatacttactctacattgagtttcatccatttttccagttggttagttatattctgtcgtttccattccgtcaggtttgcaacaaaaactccaggattaaatgagcaagtgctggctttcatggaaagcttacgaattctttcctttttatagtcaagatagccaatgtaattgtactaaaaacacaaataggatatatgtacttactgcttcaaacaaaatagatacaattttatagccagtagagagaagagctgttaaactgacttcttcagattagaaaataaatatttgaaattccaagttagaataggaacctagatgttgacataataaaccagatgttcaagaacaattaggctgtcaagtccatgaagaagtctacagaaaagcaggcttgagttttgggatgaaatgattggggagtgtaaattgcagcaaaagagttccctgaatttgcaacctcttcccattaaacaatattgtaggaagaggggtgtttggtaagcaatttacctggtttcctgctccacggatgacaactttagtagaggctgaatcacaatcttctgaaaatgcagctgcatgtcctggcttcagtgctgtattgtaaagggcaagaatatcacctgaaatagacaagatgttaagatttacatttccgttgccttgagagttccctgttactcccacttctccctatggtgaccttttatagaagaccataaataaaccactacagcccactgtagcccattgttttatttagcaattgtacccaatctgggtggagacagcactcatggtgacatttttgatac

SEQ ID NO: 357390 - DNA, 2734 bp, Homo sapiens
  misc_feature (2701)..(2701): n is a, c, g, or t
gcggccgccaagcgatccctgctccgcgcgacactgcgtgcccgcgcacgcagagaggcggtgacgcactttacggcggcagcgtaagtgcgtgacgctcgtcagtggcttcagttcacacgtggcgccagcggaggcaggttgctgtgtttgtgcttccttctacagccaatatgaaaaggcctagtaagtggggtcgggaggcgggcgtggagggacccacgtctggaagttgctgcagccaccacgacgctcttctacggctacggctttgtctctgctggtatgggggtgggagcctacgcgtaggccttggccctatttcctggtagaaccgagagttggaagtccctacggcgatcatgttaaccgcgcgggctcattctgcggaacgaagccgggcagagggtggggaagactaggctagattttcgtaaggaagcagcgtctgagccaggtttgaggcccaatattttctttccgtggccacgtgcagactggcccaggtgagagctgagaatcgcctcccagactcagtgttcctctcctgccttatgattcgtgctgtttgacacgaagtggttgtcgttttgtgtctcatacgctgttgtgtatgatcccattctaatattgtgagggtaagtgcagggaattttgactccattctggatctactgaatttaattctctgggatttgaaagtagcacgtatgtttgcattaggcatttcgcattagacttaacgttaggtttggtagccaataacacaagaaaaggatataactccatagtgcgttaacccagaactaatcatttgggttaacagatttgtgatgtgtttctttgtagagttaaagaaagcaagtaaacgcatgacctgccataagcggtataaaatccaaaaaaaggttcgagaacatcatcgaaaattaagaaaggaggctaaaaagcggggtcacaagaagcctaggaaagacccaggagttccaaacagtgctccctttaaggaggctcttcttagggaagctgagctaaggaaacagaggcttgaagaactaaaacagcagcagaaacttgacaggcagaaggaactagaaaagaaaagaaaacttgaaactaatcctgatattaagccatcaaatgtggaacctatggaaaaggagtttgggctttgcaaaactgagaacaaagccaagtcgggcaaacagaattcaaagaagctgtactgccaagaacttaaaaaggtgattgaagcctccgatgttgtcctagaggtgttggatgccagagatcctcttggttgcagatgtcctcaggtagaagaggccattgtccagagtggacagaaaaagctggtacttatattaaataaatcagatctggtaccaaaggagaatttggagagctggctaaattatttgaagaaagaattgccaacagtggtgttcagagcctcaacaaaaccaaaggataaagggaagataaccaagcgtgtgaaggcaaagaagaatgctgctccattcagaagtgaagtctgctttgggaaagagggcctttggaaacttcttggaggttttcaggaaacttgcagcaaagccattcgggttggagtaattggtttcccaaatgtggggaaaagcagcattatcaatagcttaaaacaagaacagatgtgtaatgttggtgtatccatggggcttacaaggagcatgcaagttgtccccttggacaaacagatcacaatcatagatagtccgagcttcatcgtatctccacttaattcctcctctgcgcttgctctgcgaagtccagcaagtattgaagtagtaaaaccgatggaggctgccagtgccatcctttcccaggctgatgctcgacaggtagtactgaaatatactgtcccaggctacaggaattctctggaattttttactgtgcttgctcagagaagaggtatgcaccaaaaaggtggaatcccaaatgttgaaggtgctgccaaactgctgtggtctgagtggacaggtgcctcattagcttactattgccatccccctacatcttggactcctcctccatattttaatgagagtattgtggtagacatgaaaagcggcttcaatctggaagaactggaaaagaacaatgcacagagcataagagccatcaagggccctcatttggccaatagcatccttttccagtcttccggtctgacaaatggaataatagaagaaaaggacatacatgaagaattgccaaaacggaaagaaaggaagcaggaggagagggaggatgacaaagacagtgaccaggaaactgttgatgaagaagttgatgaaaacagctcaggcatgtttgctgcagaagagacaggggaggcactgtctgaggagactacagcaggtgaacagtctacaaggtcttttatcttggataaaatcattgaagaggatgatgcttatgacttcagtacagattatgtgtaacagaacaatggctttttatgattttttttttaacattttaagcagactgctaaactgttctctgtataagttatggtatgcatgagctgtgtaaattttgtgaatatgtattatattaaaaccaggcaacttggaatccctaaattctgtaaaaagacaattcatctcattgtgagtggaagtagttatctggaataaaaaaagaagatacctantcgacgcgcgtcgacgtcgacgcggccgcgaat

SEQ ID NO: 357391 - DNA, 2098 bp, Homo sapiens
ggcttactttttattcttcgctttctcttgtgagccccccctgtcatagtggtccccccttgttggtcctcctccgctcgttccccttttgcgggttgtgttgtccgagccaccgctctcgtttttactccccccgtgctctcttttttagatttggtgtgagaaatctcctccgctccgttcttttcatgtccccacgtggttttctctttgtggtttccgctcttggtgccgcccgtttgacggctatctcctttgttggtccccccggtcccccatcgaattgttctatagcgaacccttttccaggccccatccccccccacaagtttttttttgtttttgtcgtttttttttgaaaaatgtaagttttatttacagatcaggccacaggttacaaaattaaaaccaacagcagttttgaattatctgtaccagctagctgaactagccatatcagttcttctttccagtcattcagcattgtagtaagaaaacacttggtaaggcagatggagacatatttatagtctatagtctgtctgggaagctgactgccagacagggcagtttgtcatctttacctagctgacacatctttttccatggcttgctaccgataggcattgaagcctagcaactgttacttcccacgcatgctatcttccaggacttcctgagaaatgcttgcttacagttcaaattctgtttcactttatgtttgagatctcggtatatcttcggattaggttgaatttgcctgttgggtctggaatataccatttttcccaaacatcagtatatgaagcagtccttccccatggcttcaaatgtccattccaatggagtaacttggcagcctttacaaactgaggtgaatatcgttttccagcactggaaccttacatttgagacaaaaatagccacatcgttgcgccatgtgaaattgtgcagaaaacttacttaagggaaacaaagaatataccccatccctgaggatagttctttagataccaattctttactagcttatgccactggttaattctacttaccaaggtggcggacattccacataggatcgatggtagagtgctgttgataaaatacgataagcagaggaggtgttgtgatgctaccagccagggttctgctatacagtccctctcttggtgggacagaaaacaaatgtttgttagtgaaaagtactgactaactcctgttagtcaagactctaggaattgaaatacaacagtttttcacagctaggccagttacatacttactctacattgagtttcatccatttttccagttggttagttatattctgtcgtttccattccgtcaggtttgcaacaaaaactccaggattaaatgagcaagtgctggctttcatggaaagcttacgaattctttcctttttatagtcaagatagccaatgtaattgtactaaaaacacaaataggatatatgtacttactgcttcaaacaaaatagatacaattttatagccagtagagagaagagctgttaaactgacttcttcagattagaaaataaatatttgaaattccaagttagaataggaacctagatgttgacataataaaccagatgttcaagaacaattaggctgtcaagtccatgaagaagtctacagaaaagcaggcttgagttttgggatgaaatgattggggagtgtaaattgcagcaaaagagttccctgaatttgcaacctcttcccattaaacaatattgtaggaagaggggtgtttggtaagcaatttacctggtttcctgctccacggatgacaactttagtagaggctgaatcacaatcttctgaaaatgcagctgcatgtcctggcttcagtgctgtattgtaaagggcaagaatatcacctgaaatagacaagatgttaagatttacatttccgttgccttgagagttccctgttactcccacttctccctatggtgaccttttatagaagaccataaataaaccactacagcccactgtagcccattgttttatttagcaattgtacccaatctgggtggagacagcactcatggtgacatttttgatac

SEQ ID NO: 357392 - DNA, 2844 bp, Homo sapiens
gcggccgccaagcgatccctgctccgcgcgacactgcgtgcccgcgcacgcagagaggcggtgacgcactttacggcggcagcgtaagtgcgtgacgctcgtcagtggcttcagttcacacgtggcgccagcggaggcaggttgctgtgtttgtgcttccttctacagccaatatgaaaaggcctagtaagtggggtcgggaggcgggcgtggagggacccacgtctggaagttgctgcagccaccacgacgctcttctacggctacggctttgtctctgctggtatgggggtgggagcctacgcgtaggccttggccctatttcctggtagaaccgagagttggaagtccctacggcgatcatgttaaccgcgcgggctcattctgcggaacgaagccgggcagagggtggggaagactaggctagattttcgtaaggaagcagcgtctgagccaggtttgaggcccaatattttctttccgtggccacgtgcagactggcccaggtgagagctgagaatcgcctcccagactcagtgttcctctcctgccttatgattcgtgctgtttgacacgaagtggttgtcgttttgtgtctcatacgctgttgtgtatgatcccattctaatattgtgagggtaagtgcagggaattttgactccattctggatctactgaatttaattctctgggatttgaaagtagcacgtatgtttgcattaggcatttcgcattagacttaacgttaggtttggtagccaataacacaagaaaaggatataactccatagtgcgttaacccagaactaatcatttgggttaacagatttgtgatgtgtttctttgtagagttaaagaaagcaagtaaacgcatgacctgccataagcggtataaaatccaaaaaaaggttcgagaacatcatcgaaaattaagaaaggaggctaaaaagcggggtcacaagaagcctaggaaagacccaggagttccaaacagtgctccctttaaggaggctcttcttagggaagctgagctaaggaaacagaggcttgaagaactaaaacagcagcagaaacttgacaggcagaaggaactagaaaagaaaagaaaacttgaaactaatcctgatattaagccatcaaatgtggaacctatggaaaaggagtttgggctttgcaaaactgagaacaaagccaagtcgggcaaacagaattcaaagaagctgtactgccaagaacttaaaaaggtgattgaagcctccgatgttgtcctagaggtgttggatgccagagatcctcttggttgcagatgtcctcaggtagaagaggccattgtccagagtggacagaaaaagctggtacttatattaaataaatcagatctggtaccaaaggagaatttggagagctggctaaattatttgaagaaagaattgccaacagtggtgttcagagcctcaacaaaaccaaaggataaagggaagataaccaagcgtgtgaaggcaaagaagaatgctgctccattcagaagtgaagtctgctttgggaaagagggcctttggaaacttcttggaggttttcaggaaacttgcagcaaagccattcgggttggagtaattggtttcccaaatgtggggaaaagcagcattatcaatagcttaaaacaagaacagatgtgtaatgttggtgtatccatggggcttacaaggagcatgcaagttgtccccttggacaaacagatcacaatcatagatagtccgagcttcatcgtatctccacttaattcctcctctgcgcttgctctgcgaagtccagcaagtattgaagtagtaaaaccgatggaggctgccagtgccatcctttcccaggctgatgctcgacaggtagtactgaaatatactgtcccaggctacaggaattctctggaattttttactgtgcttgctcagagaagaggtatgcaccaaaaaggtggaatcccaaatgttgaaggtgctgccaaactgctgtggtctgagtggacaggtgcctcattagcttactattgccatccccctacatcttggactcctcctccatattttaatgagagtattgtggtagacatgaaaagcggcttcaatctggaagaactggaaaagaacaatgcacagagcataagagccatcaagggccctcatttggccaatagcatccttttccagtcttccggtctgacaaatggaataatagaagaaaaggacatacatgaagaattgccaaaacggaaagaaaggaagcaggaggagagggaggatgacaaagacagtgaccaggaaactgttgatgaagaagttgatgaaaacagctcaggcatgtttgctgcagaagagacaggggaggcactgtctgaggagactacagcagtctacagaaaagcaggcttgagttttgggatgaaatgattggggagtgtaaattgcagcaaaagagttccctgaatttgcaacctcttcccattaaacaatattgtaggaagaggggtgtttggtaagcaatttacctggtttcctgctccacggatgacaactttagtagaggctgaatcacaatcttctgaaaatgcagctgcatgtcctggcttcagtgctgtattgtaaagggcaagaatatcacctgaaatagacaagatgttaagatttacatttccgttgccttgagagttccctgttactcccacttctccctatggtgaccttttatagaagaccataaataaaccactacagcccactgtagcccattgttttatttagcaattgtacccaatctgggtggagacagcactcatggtgacatttttgatac

SEQ ID NO: 357393 - DNA, 2647 bp, Homo sapiens
  misc_feature (2491)..(2491): n is a, c, g, or t
  misc_feature (2516)..(2516): n is a, c, g, or t
  misc_feature (2534)..(2534): n is a, c, g, or t
  misc_feature (2542)..(2542): n is a, c, g, or t
gcggccgccaagcgatccctgctccgcgcgacactgcgtgcccgcgcacgcagagaggcggtgacgcactttacggcggcagcgtaagtgcgtgacgctcgtcagtggcttcagttcacacgtggcgccagcggaggcaggttgctgtgtttgtgcttccttctacagccaatatgaaaaggcctagtaagtggggtcgggaggcgggcgtggagggacccacgtctggaagttgctgcagccaccacgacgctcttctacggctacggctttgtctctgctggtatgggggtgggagcctacgcgtaggccttggccctatttcctggtagaaccgagagttggaagtccctacggcgatcatgttaaccgcgcgggctcattctgcggaacgaagccgggcagagggtggggaagactaggctagattttcgtaaggaagcagcgtctgagccaggtttgaggcccaatattttctttccgtggccacgtgcagactggcccaggtgagagctgagaatcgcctcccagactcagtgttcctctcctgccttatgattcgtgctgtttgacacgaagtggttgtcgttttgtgtctcatacgctgttgtgtatgatcccattctaatattgtgagggtaagtgcagggaattttgactccattctggatctactgaatttaattctctgggatttgaaagtagcacgtatgtttgcattaggcatttcgcattagacttaacgttaggtttggtagccaataacacaagaaaaggatataactccatagtgcgttaacccagaactaatcatttgggttaacagatttgtgatgtgtttctttgtagagttaaagaaagcaagtaaacgcatgacctgccataagcggtataaaatccaaaaaaaggttcgagaacatcatcgaaaattaagaaaggaggctaaaaagcggggtcacaagaagcctaggaaagacccaggagttccaaacagtgctccctttaaggaggctcttcttagggaagctgagctaaggaaacagaggcttgaagaactaaaacagcagcagaaacttgacaggcagaaggaactagaaaagaaaagaaaacttgaaactaatcctgatattaagccatcaaatgtggaacctatggaaaaggagtttgggctttgcaaaactgagaacaaagccaagtcgggcaaacagaattcaaagaagctgtactgccaagaacttaaaaaggtgattgaagcctccgatgttgtcctagaggtgttggatgccagagatcctcttggttgcagatgtcctcaggtagaagaggccattgtccagagtggacagaaaaagctggtacttatattaaataaatcagatctggtaccaaaggagaatttggagagctggctaaattatttgaagaaagaattgccaacagtggtgttcagagcctcaacaaaaccaaaggataaagggaagataaccaagcgtgtgaaggcaaagaagaatgctgctccattcagaagtgaagtctgctttgggaaagagggcctttggaaacttcttggaggttttcaggaaacttgcagcaaagccattcgggttggagtaattggtttcccaaatgtggggaaaagcagcattatcaatagcttaaaacaagaacagatgtgtaatgttggtgtatccatggggcttacaaggagcatgcaagttgtccccttggacaaacagatcacaatcatagatagtccgagcttcatcgtatctccacttaattcctcctctgcgcttgctctgcgaagtccagcaagtattgaagtagtaaaaccgatggaggctgccagtgccatcctttcccaggctgatgctcgacaggtagtactgaaatatactgtcccaggctacaggaattctctggaattttttactgtgcttgctcagagaagaggtatgcaccaaaaaggtggaatcccaaatgttgaaggtgctgccaaactgctgtggtctgagtggacagggtaagctttcttttctgttggcattttggtgaccactagaataaaccttcttttgacaaagacagtgaccaggaaactgttgatgaagaagttgatgaaaacagctcaggcatgtttgctgcagaagagacaggggaggcactgtctgaggagactacagcaggtgaacagtctacaaggtcttttatcttggataaaatcattgaagaggatgatgcttatgacttcagtacagattatgtgtaacagaacaatggctttttatgattttttttttaacattttaagcagactgctaaactgttctctgtataagttatggtatgcatgagctgtgtaaattttgtgaatatgtattatattaaaaccaggcaacttggaatccctaaattctgtaaaaagacaattcatctcattgtgagtggaagtagttatctggaataaaaaaagaagatacctaaaaaaaanaaaaaaaaataaaaaaaaaaaaaanaaaaaaaaaaaaaaaaanattaaaanaaatattcatctctataattctacttcctttttacactcctccctttttctcactttcatattacaattccttccctctcctctctaacattcacctcatttcca

SEQ ID NO: 357394 - DNA, 1097 bp, Homo sapiens
gcggccgccaagcgatccctgctccgcgcgacactgcgtgcccgcgcacgcagagaggcggtgacgcactttacggcggcagcgtaagtgcgtgacgctcgtcagtggcttcagttcacacgtggcgccagcggaggcaggttgctgtgtttgtgcttccttctacagccaatatgaaaaggcctagtaagtggggtcgggaggcgggcgtggagggacccacgtctggaagttgctgcagccaccacgacgctcttctacggctacggctttgtctctgctgagttaaagaaagcaagtaaacgcatgacctgccataagcggtataaaatccaaaaaaaggttcgagaacatcatcgaaaattaagaaaggaggctaaaaagcggggtcacaagaagcctaggaaagacccaggagttccaaacagtgctccctttaaggaggctcttcttagggaagctgagctaaggaaacagaggcttgaagaactaaaacagcagcagaaacttgacaggcagaaggaactagaaaagaaaagaaaacttgaaactaatcctgatattaagccatcaaatgtggaacctatggaaaaggagtttgggctttgcaaaactgagaacaaagccaagtcgggcaaacagaattcaaagaagctgtactgccaagaacttaaaaaggtgattgaagcctccgatgttgtcctagaggtgttggatgccagagatcctcttggttgcagatgtcctcaggtagaagaggccattgtccagagtggacagaaaaagctggtacttatattaaataaatcagatctggtaccaaaggagaatttggagagctggctaaattatttgaagaaagaattgccaacagtggtgttcagagcctcaacaaaaccaaaggataaagggaagataaccaagcgtgtgaaggcaaagaagaatgctgctccattcagaagtgaagtctgctttgggaaagagggcctttggaaacttcttggaggttttcaggaaacttgcagcaaagccattcgggttggagtaattggtgagtttcagttcattactttttactttttaagtgttgaaatagt

SEQ ID NO: 357395 - DNA, 2071 bp, Homo sapiens
gcggccgccaagcgatccctgctccgcgcgacactgcgtgcccgcgcacgcagagaggcggtgacgcactttacggcggcagcgtaagtgcgtgacgctcgtcagtggcttcagttcacacgtggcgccagcggaggcaggttgctgtgtttgtgcttccttctacagccaatatgaaaaggcctagtaagtggggtcgggaggcgggcgtggagggacccacgtctggaagttgctgcagccaccacgacgctcttctacggctacggctttgtctctgctggtatgggggtgggagcctacgcgtaggccttggccctatttcctggtagaaccgagagttggaagtccctacggcgatcatgttaaccgcgcgggctcattctgcggaacgaagccgggcagagggtggggaagactaggctagattttcgtaaggaagcagcgtctgagccaggtttgaggcccaatattttctttccgtggccacgtgcagactggcccaggtgagagctgagaatcgcctcccagactcagtgttcctctcctgccttatgattcgtgctgtttgacacgaagtggttgtcgttttgtgtctcatacgctgttgtgtatgatcccattctaatattgtgagggtaagtgcagggaattttgactccattctggatctactgaatttaattctctgggatttgaaagtagcacgtatgtttgcattaggcatttcgcattagacttaacgttaggtttggtagccaataacacaagaaaaggatataactccatagtgcgttaacccagaactaatcatttgggttaacagatttgtgatgtgtttctttgtagagttaaagaaagcaagtaaacgcatgacctgccataagcggtataaaatccaaaaaaaggttcgagaacatcatcgaaaattaagaaaggaggctaaaaagcggggtcacaagaagcctaggaaagacccaggagttccaaacagtgctccctttaaggaggctcttcttagggaagctgagctaaggaaacagaggcttgaagaactaaaacagcagcagaaacttgacaggcagaaggaactagaaaagaaaagaaaacttgaaactaatcctgatattaagccatcaaatgtggaacctatggaaaaggagtttgggctttgcaaaactgagaacaaagccaagtcgggcaaacagaattcaaagaagctgtactgccaagaacttaaaaaggtgattgaagcctccgatgttgtcctagaggtgttggatgccagagatcctcttggttgcagatgtcctcaggtagaagaggccattgtccagagtggacagaaaaagctggtacttatattaaataaatcaggtgagtaaagagggtaccctttgtcttctgtgtacatgggtgaggtacgaggaaacagtctgatagtcactgaagactgattagatccaactctgatctcagcaaagccagagtacgtgcactttgccagagacagtgctaggcagtggggagccaggtgacttttacaactgactcaactggtttctactattcttttgccattcagtatttaccatcttttaaataaagagtgtaagctgctatacccagcttattgtgtagtatatttcatctaggaagtgatgacagtgtgacaaattccccacacctacacaatgtcgggtattagttcaagagtgaaataaattggaacgtatgtgacaaaatatttaaatgaaatgcataattatgcatctgagtttgagcagcaggaaaaagaaaacccagaacagagaattacaaagcagaaaatgggaatgagatctaaaattgttgttggggttaagaaacaattggctgcttgggaggctgaagtgggcacatcctggctaacaaggtgaaactccctttctactaaaaatacaaaaaattagccgggtgtggtggtggatgctggtagtcccagctacttgggaggctgaggcaggagaatggtgtgaacctgggaggtggagcttgcaatgagccgagatccaaccactgcactccagcc

SEQ ID NO: 357396 - DNA, 961 bp, Homo sapiens
ggcttttagacattatatatattatcagagaagtagcctagtggtcgtggggcacagaaaaaatagataggggcagctctaaagaccagctgttaagacagacaactgcaaactcatttaagcaagagaaaaacagctctaattcgagattgtgaagcaacacttctaaattcaaagacatagagttgtcaaatcaggattttttttttttaaaatgatatcctttcgaatgtaactgattttgggaaaatcacatgttcagaattgaggctaaatggtttgatcaggttttctctttgaagagaccacagccttaggaaatggttcttgatctatacaattccaccttggacactgggttaattctgtttgcccctggaacacaatcactgcctggctcaaaagctactgcaagctcgttactgctcatcctccagaggcccacatcaagtcagccacgactcaaggagactccaaagataaaagctgaagccaaaatatatgattctaaacaccctcctcggctactgcaaagcactgtgagcactttctcaggacgagagccaagaagcccagcacctatgggtcaccacagtttccgaggtcccagatgaaaaagatgcgctcgctaccaccgtgcggcggtcctttctctcgcaatagtctcaatgctcccgggccctgcctccggacgccaggacagaggccgccgactcgaagcgtgagcagttccggaggtacttggagaagtcgggggtgctggacacgctgaccaaggtgttggtagccttcattttgaagaaccagagaaacctaacaggtgcttgggcgttttaaaagcttcacttagggagctggtactccagaaaatccagaataaagcggttccactaaaactgccaatgcacgacaatttaagcttggtgaaaaaaccaactgacaccaagtgtcagttgacact

SEQ ID NO: 357397 - DNA, 530 bp, Homo sapiens
agcaaatgtttctttgggaagatatagtttattgcatatcaagtatttgaacagtgcagtcatgaactggaatgaaattttagtttcaaagcaattttaaaggtttatatgaaaagggctttcattagatttgattgtattaaatcttaaatcactgaatgatttaaaatggatagttatagaaactgatattaatacaatttactgacagtaactaagttgaatataacagttaccttgttttactattttttactcaatttagaataaaattcacctaaattcctctgtctttgccccatagcttgctcagtatgaaccacctcaggaggagaagcgtgctgaataggattcttctcagtttgaaagacaatgaaaaatggttttgtatgacttgaatagtttgtatagtatataatcttttctgaacagatgctatagaactcttttaatatgtttaattcacctatcacactctgttaaaaacacatagaatcatcaataaaaactcaatataactttctttgggt

SEQ ID NO: 357398 - DNA, 507 bp, Homo sapiens
agcaaatgtttctttgggaagatatagtttattgcatatcaagtatttgaacagtgcagtcatgaactggaatgaaattttagtttcaaagcaattttaaaggtttatatgaaaagggctttcattagatttgattgtattaaatcttaaatcactgaatgatttaaaatggatagttatagaaactgatattaatacaatttactgacagtaactaagttgaatataacagttaccttgttttactattttttactcaatttagaataaaattcacctaaattcctctgtctttgccccatagcttgctcagtatgaaccacctcaggaggagaagcgtgctgaataggattcttctcagtttgaaagacaatgaaaaatggttttgtatgacttgaatagtttgtatagtatataatcttttctgaacagatgctatagaaacttctaaaactagggctattgaaacttctaaaactaggcctagttttagaagtttctatagca

SEQ ID NO: 357399 - DNA, 3258 bp, Homo sapiens
ggcttttagacattatatatattatcagagaagtagcctagtggtcgtggggcacagaaaaaatagataggggcagctctaaagaccagctgttaagacagacaactgcaaactcatttaagcaagagaaaaacagctctaattcgagattgtgaagcaacacttctaaattcaaagacatagagttgtcaaatcaggattttttttttttaaaatgatatcctttcgaatgtaactgattttgggaaaatcacatgttcagaattgaggctaaatggtttgatcaggttttctctttgaagagaccacagccttaggaaatggttcttgatctatacaattccaccttggacactgggttaattctgtttgcccctggaacacaatcacgtaagtttccttctagactggcatcctgatgtgtcttgagtataatcacatgttgctacctagtaaataaaatcttaagaagatccgtggctttccttcaccagttcatagcatcgtgattcattgcccggattggactcgactctactcactggacatctaaccactccacttaattaacaatacccaccctacaggggtgttgtaaggattaaaatttaaaatacccgtgttttctacagtgcctggctcaaaagctactgcaagctcgttactgctcatcctccagaggcccacatcaagtcagccacgactcaaggagactccaaagataaaagctgaagccaaaatatatgattctaaacaccctcctcggctactgcaaagcactgtgagcactttctcaggacgagagccaagaagcccagcacctatgggtcaccacagtttccgaggtcccagatgaaaaagatgcgctcgctaccaccgtgcggcggtcctttctctcgcaatagtctcaatgctcccgggccctgcctccggacgccaggacagaggtaccaaaatctcacctcctgcaaagaaacctaattgctacgggggccggaagaggaagaggtgcggctccgacagccagaggggcgggcatacgcagcctccctcggctcagcctgctactggggatgcagagcgtcctggtcgccatgaaaacaggccacacctcggcgatcccggccggtggtttgcaagtgcgcaggcgcgcgcccccttccgcgcatgagcagtgctgctcccaacccgccagtcgcggtctccggcgccagctacgccgctgccgctgtcactatggcccattacaaagccgccgactcgaagcgtgagcagttccggaggtacttggagaagtcgggggtgctggacacgctgaccaaggtgttggtagccttatatgaagaaccagagaaacctaacagtgctttggattttttaaagcatcacttaggagctgctactccagaaaatccagaaatagagctgcttcgcctagaactggccgaaatgaaagagaagtatgaagctattgtagaagaaaataaaaaactgaaagcaaagcttgctcagtatgaaccacctcaggaggagaagcgtgctgaataggattcttctcagtttgaaagacaatgaaaaatggttttgtatgacttgaatagtttgtatagtatataatcttttctgaacagatgctatagaactcttttaatatgtttaattcacctatcacactctgttaaaaacacatagaatcatcaataaaaactcaatataactttctttgggtcttaaagcaggagaatccaaagtaaatcctgaacaaaacctaaacacagccatctaactcattaccttaaaagacattctgtttattagtctgattaggaatgatggcactggttgtattttagccaagacagtttagcatggagctattccttggtgcagttcaggatatgaacacaggtacagtcattctttgaaggtgacactgttctgtatattccctataggcagctggagagatctgtgtgacacaagatgcttttgtacgggttcccatgaatcttctgctcttgtttgtgtgacatggaacaaataacttctttgccaccactttgccttagataactgtgtgtgtgtgtgccagtttgaactctgacaccacattttccttctatgcaatcatgcctgtctgataatcttgcattgctttcctctgagctttagtgggtcctagttgcacactggcctttctgtgctgtttttcaatttgcctaataatagcagttaccctgattgtaatttatgtaactttaaacaggatcacactgtaccccctgcctgccttatttgcttactgagcacaggacagaggcaatatacaactctgggttcacacacaagctgagatgagaagaggaatgagccatatattggggaaaatcatagtttgtaggtataattatatagtgcttttctccctcaaagtatttttctagccttgaattcattttatcttcattatccctgtgaagtaggtgggacaagtataaggggaagaggggtgctgaatttttaggccaaagactgatattaatacaaatcactcactaactgtagagccttgggcattatcagtgaactactctgagatttactgtcttcatctgtttaatgagtagaatgtccgtgatgcctacctcacagggttgttgtgagggtcaaatgagaatgtatgtgaaagatttgtaaatggtaaagcactatattcttgtttgttagtcctttttcctttctttgggtagacctacagtcagatgttttgttttatggatcacttattttccttactggtagactgtcgttttatagacatattcctatttcatatattctctccctgttgttagagaacctatctttgtttttggtcaaaacacacatagaaaacaaaatgatccaatgaaaactggtttaactagcaaaagccttggcacctgttggagactatgaccaagccaataaaaagggcatttaaatcagccctgttagtaggaatgtggctatggctggtgcctcttctagtcacaagtttgtttttggagggggtccagaagatcattcccttgcatagatttctcttttaccaatttgagtgcctcctacatgggcagcagtggactaagtgctgggtgtgataaagaggaatgacttaattatgagactgtatataatcaaatacagtgtgggttaggacctgtggcagaccattataataaagcatggccccgtgagggttttgaaagagaaaga

SEQ ID NO: 357400 - DNA, 2066 bp, Homo sapiens
  misc_feature (13)..(14): n is a, c, g, or t
  misc_feature (21)..(22): n is a, c, g, or t
  misc_feature (25)..(25): n is a, c, g, or t
atttcggcacagnntcagccnnacngccgcttgccgctgtcactatggcccattacaaagccgccgactcgaagcgtgagcagttccggaggtacttggagaagtcgggggtgctggacacgctgaccaaggtgttggtagccttatatgaagaaccagagaaacctaacagtgctttggattttttaaagcatcacttaggagctgctactccagaaaatccagaaatagagctgcttcgcctagaactggccgaaatgaaagagaagtatgaagctattgtagaagaaaataaaaaactgaaagcaaagcttgctcagtatgaaccacctcaggaggagaagcgtgctgaataggattcttctcagtttgaaagacaatgaaaaatggttttgtatgacttgaatagtttgtatagtatataatcttttctgaacagatgctatagaactcttttaatatgtttaattcacctatcacactctgttaaaaacacatagaatcatcaataaaaactcaatataactttctttgggtcttaaagcaggagaatccaaagtaaatcctgaacaaaacctaaacacagccatctaactcattaccttaaaagacattctgtttattagtctgattaggaatgatggcactggttgtattttagccaagacagtttagcatggagctattccttggtgcagttcaggatatgaacacaggtacagtcattctttgaaggtgacactgttctgtatattccctataggcagctggagagatctgtgtgacacaagatgcttttgtacgggttcccatgaatcttctgctcttgtttgtgtgacatggaacaaataacttctttgccaccactttgccttagataactgtgtgtgtgtgtgccagtttgaactctgacaccacattttccttctatgcaatcatgcctgtctgataatcttgcattgctttcctctgagctttagtgggtcctagttgcacactggcctttctgtgctgtttttcaatttgcctaataatagcagttaccctgattgtaatttatgtaactttaaacaggatcacactgtaccccctgcctgccttatttgcttactgagcacaggacagaggcaatatacaactctgggttcacacacaagctgagatgagaagaggaatgagccatatattggggaaaatcatagtttgtaggtataattatatagtgcttttctccctcaaagtatttttctagccttgaattcattttatcttcattatccctgtgaagtaggtgggacaagtataaggggaagaggggtgctgaatttttaggccaaagactgatattaatacaaatcactcactaactgtagagccttgggcattatcagtgaactactctgagatttactgtcttcatctgtttaatgagtagaatgtccgtgatgcctacctcacagggttgttgtgagggtcaaatgagaatgtatgtgaaagatttgtaaatggtaaagcactatattcttgtttgttagtcctttttcctttctttgggtagacctacagtcagatgttttgttttatggatcacttattttccttactggtagactgtcgttttatagacatattcctatttcatatattctctccctgttgttagagaacctatctttgtttttggtcaaaacacacatagaaaacaaaatgatccaatgaaaactggtttaactagcaaaagccttggcacctgttggagactatgaccaagccaataaaaagggcatttaaatcagccctgttagtaggaatgtggctatggctggtgcctcttctagtcacaagtttgtttttggagggggtccagaagatcattcccttgcatagatttctcttttaccaatttgagtgcctcctacatgggcagcagtggactaagtgctgggtgtgataaagaggaatgacttaattatgagactgtatataatcaaatacagtgtgggttaggacctgtggcagaccattataataaagcatggccccgtgagggttttgaaagagaaaga

SEQ ID NO: 357401 - DNA, 1688 bp, Homo sapiens
ggcttttagacattatatatattatcagagaagtagcctagtggtcgtggggcacagaaaaaatagataggggcagctctaaagaccagctgttaagacagacaactgcaaactcatttaagcaagagaaaaacagctctaattcgagattgtgaagcaacacttctaaattcaaagacatagagttgtcaaatcaggattttttttttttaaaatgatatcctttcgaatgtaactgattttgggaaaatcacatgttcagaattgaggctaaatggtttgatcaggttttctctttgaagagaccacagccttaggaaatggttcttgatctatacaattccaccttggacactgggttaattctgtttgcccctggaacacaatcacgtaagtttccttctagactggcatcctgatgtgtcttgagtataatcacatgttgctacctagtaaataaaatcttaagaagatccgtggctttccttcaccagttcatagcatcgtgattcattgcccggattggactcgactctactcactggacatctaaccactccacttaattaacaatacccaccctacaggggtgttgtaaggattaaaatttaaaatacccgtgttttctacagtgcctggctcaaaagctactgcaagctcgttactgctcatcctccagaggcccacatcaagtcagccacgactcaaggagactccaaagataaaagctgaagccaaaatatatgattctaaacaccctcctcggctactgcaaagcactgtgagcactttctcaggacgagagccaagaagcccagcacctatgggtcaccacagtttccgaggtcccagatgaaaaagatgcgctcgctaccaccgtgcggcggtcctttctctcgcaatagtctcaatgctcccgggccctgcctccggacgccaggacagaggtaccaaaatctcacctcctgcaaagaaacctaattgctacgggggccggaagaggaagaggtgcggctccgacagccagaggggcgggcatacgcagcctccctcggctcagcctgctactggggatgcagagcgtcctggtcgccatgaaaacaggccacacctcggcgatcccggccggtggtttgcaagtgcgcaggcgcgcgcccccttccgcgcatgagcagtgctgctcccaacccgccagtcgcggtctccggcgccagctacgccgctgccgctgtcactatggcccattacaaagccgccgactcgaagcgtgagcagttccggagtgttggtagccttatatgaagaaccagagaaacctaacagtgctttggattttttaaagcatcacttaggagctgctactccagaaaatccagaaatagagctgcttcgcctagaactggccgaaatgaaagagaagtatgaagctattgtagaagaaaataaaaaactgaaagcaaagcttgctcagtatgaaccacctcaggaggagaagcgtgctgaataggattcttctcagtttgaaagacaatgaaaaatggttttgtatgacttgaatagtttgtatagtatataatcttttctgaacagatgctatagaactcttttaatatgtttaattcacctatcacactctgttaaaaacacatagaatcatcaataaaaactcaatataactttctttgggt

SEQ ID NO: 357402 - DNA, 625 bp, Homo sapiens
cggcgtggctgggggcatgcgggcggtagcaagccgctggtcggctctgggtgggagtggggtcgcgcgcgcaggtttgggcgggagggccccgaggtagtgaggcggaggcggggttgccggactcccagcgccttcttcctgctcggctcccgggctctggccactgacccccggtgtctcttcaggccgccgactcgaagcgtgagcagttccggagtgttggtagccttatatgaagaaccagagaaacctaacagtgctttggattttttaaagcatcacttaggagctgctactccagaaaatccagaaatagagctgcttcgcctagaactggccgaaatgaaagagaagtatgaagctattgtagaagaaaataaaaaactgaaagcaaagcttgctcagtatgaaccacctcaggaggagaagcgtgctgaataggattcttctcagtttgaaagacaatgaaaaatggttttgtatgacttgaatagtttgtatagtatataatcttttctgaacagatgctatagaactcttttaatatgtttaattcacctatcacactctgttaaaaacacatagaatcatcaataaaaactcaatataactttctttgggt

SEQ ID NO: 357403 - DNA, 2754 bp, Homo sapiens
ggcttttagacattatatatattatcagagaagtagcctagtggtcgtggggcacagaaaaaatagataggggcagctctaaagaccagctgttaagacagacaactgcaaactcatttaagcaagagaaaaacagctctaattcgagattgtgaagcaacacttctaaattcaaagacatagagttgtcaaatcaggattttttttttttaaaatgatatcctttcgaatgtaactgattttgggaaaatcacatgttcagaattgaggctaaatggtttgatcaggttttctctttgaagagaccacagccttaggaaatggttcttgatctatacaattccaccttggacactgggttaattctgtttgcccctggaacacaatcacgtaagtttccttctagactggcatcctgatgtgtcttgagtataatcacatgttgctacctagtaaataaaatcttaagaagatccgtggctttccttcaccagttcatagcatcgtgattcattgcccggattggactcgactctactcactggacatctaaccactccacttaattaacaatacccaccctacaggggtgttgtaaggattaaaatttaaaatacccgtgttttctacagtgcctggctcaaaagctactgcaagctcgttactgctcatcctccagaggcccacatcaagtcagccacgactcaaggagactccaaagataaaagctgaagccaaaatatatgattctaaacaccctcctcggctactgcaaagcactgtgagcactttctcaggacgagagccaagaagcccagcacctatgggtcaccacagtttccgaggtcccagatgaaaaagatgcgctcgctaccaccgtgcggcggtcctttctctcgcaatagtctcaatgctcccgggccctgcctccggacgccaggacagaggtaccaaaatctcacctcctgcaaagaaacctaattgctacgggggccggaagaggaagaggtgcggctccgacagccagaggggcgggcatacgcagcctccctcggctcagcctgctactggggatgcagagcgtcctggtcgccatgaaaacaggccacacctcggcgatcccggccggtggtttgcaagtgcgcaggcgcgcgcccccttccgcgcatgagcagtgctgctcccaacccgccagtcgcggtctccggcgccagctacgccgctgccgctgtcactatggcccattacaaagccgccgactcgaagcgtgagcagttccggaggtacttggagaagtcgggggtgctggacacgctgaccaaggtgttggtagccttatatgaagaaccagagaaacctaacagtgctttggattttttaaagcatcacttaggagctgctactccagaaaatccagaaatagagctgcttcgcctagaactggccgaaatgaaagagaagtatgaagctattgtagaagaaaataaaaaactgaaagcaaagcttgctcagtatgaaccacctcaggaggagaagcgtgctgaataggattcttctcagtttgaaagacaatgaaaaatggttttgtatgacttgaatagtttgtatagtatataatcttttctgaacagatgctatagaactcttttaatatgtttaattcacctatcacactctgttaaaaacacatagaatcatcaataaaaactcaatataactttctttgggtcttaaagcaggagaatccaaagtaaatcctgaacaaaacctaaacacagccatctaactcattaccttaaaagacattctgtttattagtctgattaggaatgatggcactggttgtattttagccaagacagtttagcatggagctattccttggtgcagttcaggatatgaacacaggtacagtcattctttgaaggtgacactgttctgtatattccctataggcagctggagagatctgtgtgacacaagatgcttttgtacgggttcccatgaatcttctgctcttgtttgtgtgacatggaacaaataacttctttgccaccactttgccttagataactgtgtgtgtgtgtgccagtttgaactctgacaccacattttccttctatgcaatcatgcctgtctgataatcttgcattgctttcctctgagctttagtgggtcctagttgcacactggcctttctgtgctgtttttcaatttgcctaataatagcagttaccctgattgtaatttatgtaactttaaacaggatcacactgtaccccctgcctgccttatttgcttactgagcacaggacagaggcaatatacaactctgggttcacacacaagctgagatgagaagaggaatgagccatatattggggaaaatcatagtttgtaggtataattatatagtgcttttctccctcaaagtatttttctagccttgaattcattttatcttcattatccctgtgaagtaggtgggacaagtataaggggaagaggggtgctgaatttttaggccaaagactgatattaatacaaatcactcactaactgtagagccttgggcattatcagtgaactactctgagatttactgtcttcatctgtttaatgagtagaatgtccgtgatgcctacctcacagggttgttgtgagggtcaaatgagaatgtatgtgaaagatttgtaaatggtaaagcactatattcttgttttaacaaacaagaatgtcgacgcggccgcgaat

SEQ ID NO: 357404 - DNA, 2195 bp, Homo sapiens
cggcgtggctgggggcatgcgggcggtagcaagccgctggtcggctctgggtgggagtggggtcgcgcgcgcaggtttgggcgggagggccccgaggtagtgaggcggaggcggggttgccggactcccagcgccttcttcctgctcggctcccgggctctggccactgacccccggtgtctcttcaggccgccgactcgaagcgtgagcagttccggaggtacttggagaagtcgggggtgctggacacgctgaccaaggtgttggtagccttatatgaagaaccagagaaacctaacagtgctttggattttttaaagcatcacttaggagctgctactccagaaaatccagaaatagagctgcttcgcctagaactggccgaaatgaaagagaagtatgaagctattgtagaagaaaataaaaaactgaaagcaaagcttgctcagtatgaaccacctcaggaggagaagcgtgctgaataggattcttctcagtttgaaagacaatgaaaaatggttttgtatgacttgaatagtttgtatagtatataatcttttctgaacagatgctatagaactcttttaatatgtttaattcacctatcacactctgttaaaaacacatagaatcatcaataaaaactcaatataactttctttgggtcttaaagcaggagaatccaaagtaaatcctgaacaaaacctaaacacagccatctaactcattaccttaaaagacattctgtttattagtctgattaggaatgatggcactggttgtattttagccaagacagtttagcatggagctattccttggtgcagttcaggatatgaacacaggtacagtcattctttgaaggtgacactgttctgtatattccctataggcagctggagagatctgtgtgacacaagatgcttttgtacgggttcccatgaatcttctgctcttgtttgtgtgacatggaacaaataacttctttgccaccactttgccttagataactgtgtgtgtgtgtgccagtttgaactctgacaccacattttccttctatgcaatcatgcctgtctgataatcttgcattgctttcctctgagctttagtgggtcctagttgcacactggcctttctgtgctgtttttcaatttgcctaataatagcagttaccctgattgtaatttatgtaactttaaacaggatcacactgtaccccctgcctgccttatttgcttactgagcacaggacagaggcaatatacaactctgggttcacacacaagctgagatgagaagaggaatgagccatatattggggaaaatcatagtttgtaggtataattatatagtgcttttctccctcaaagtatttttctagccttgaattcattttatcttcattatccctgtgaagtaggtgggacaagtataaggggaagaggggtgctgaatttttaggccaaagactgatattaatacaaatcactcactaactgtagagccttgggcattatcagtgaactactctgagatttactgtcttcatctgtttaatgagtagaatgtccgtgatgcctacctcacagggttgttgtgagggtcaaatgagaatgtatgtgaaagatttgtaaatggtaaagcactatattcttgtttgttagtcctttttcctttctttgggtagacctacagtcagatgttttgttttatggatcacttattttccttactggtagactgtcgttttatagacatattcctatttcatatattctctccctgttgttagagaacctatctttgtttttggtcaaaacacacatagaaaacaaaatgatccaatgaaaactggtttaactagcaaaagccttggcacctgttggagactatgaccaagccaataaaaagggcatttaaatcagccctgttagtaggaatgtggctatggctggtgcctcttctagtcacaagtttgtttttggagggggtccagaagatcattcccttgcatagatttctcttttaccaatttgagtgcctcctacatgggcagcagtggactaagtgctgggtgtgataaagaggaatgacttaattatgagactgtatataatcaaatacagtgtgggttaggacctgtggcagaccattataataaagcatggccccgtgagggttttgaaagagaaaga

SEQ ID NO: 357405 - DNA, 3209 bp, Homo sapiens
ggcttttagacattatatatattatcagagaagtagcctagtggtcgtggggcacagaaaaaatagataggggcagctctaaagaccagctgttaagacagacaactgcaaactcatttaagcaagagaaaaacagctctaattcgagattgtgaagcaacacttctaaattcaaagacatagagttgtcaaatcaggattttttttttttaaaatgatatcctttcgaatgtaactgattttgggaaaatcacatgttcagaattgaggctaaatggtttgatcaggttttctctttgaagagaccacagccttaggaaatggttcttgatctatacaattccaccttggacactgggttaattctgtttgcccctggaacacaatcacgtaagtttccttctagactggcatcctgatgtgtcttgagtataatcacatgttgctacctagtaaataaaatcttaagaagatccgtggctttccttcaccagttcatagcatcgtgattcattgcccggattggactcgactctactcactggacatctaaccactccacttaattaacaatacccaccctacaggggtgttgtaaggattaaaatttaaaatacccgtgttttctacagtgcctggctcaaaagctactgcaagctcgttactgctcatcctccagaggcccacatcaagtcagccacgactcaaggagactccaaagataaaagctgaagccaaaatatatgattctaaacaccctcctcggctactgcaaagcactgtgagcactttctcaggacgagagccaagaagcccagcacctatgggtcaccacagtttccgaggtcccagatgaaaaagatgcgctcgctaccaccgtgcggcggtcctttctctcgcaatagtctcaatgctcccgggccctgcctccggacgccaggacagaggtaccaaaatctcacctcctgcaaagaaacctaattgctacgggggccggaagaggaagaggtgcggctccgacagccagaggggcgggcatacgcagcctccctcggctcagcctgctactggggatgcagagcgtcctggtcgccatgaaaacaggccacacctcggcgatcccggccggtggtttgcaagtgcgcaggcgcgcgcccccttccgcgcatgagcagtgctgctcccaacccgccagtcgcggtctccggcgccagctacgccgctgccgctgtcactatggcccattacaaagccgccgactcgaagcgtgagcagttccggaggtacttggagaagtcgggggtgctggacacgctgaccaaggttttttaaagcatcacttaggagctgctactccagaaaatccagaaatagagctgcttcgcctagaactggccgaaatgaaagagaagtatgaagctattgtagaagaaaataaaaaactgaaagcaaagcttgctcagtatgaaccacctcaggaggagaagcgtgctgaataggattcttctcagtttgaaagacaatgaaaaatggttttgtatgacttgaatagtttgtatagtatataatcttttctgaacagatgctatagaactcttttaatatgtttaattcacctatcacactctgttaaaaacacatagaatcatcaataaaaactcaatataactttctttgggtcttaaagcaggagaatccaaagtaaatcctgaacaaaacctaaacacagccatctaactcattaccttaaaagacattctgtttattagtctgattaggaatgatggcactggttgtattttagccaagacagtttagcatggagctattccttggtgcagttcaggatatgaacacaggtacagtcattctttgaaggtgacactgttctgtatattccctataggcagctggagagatctgtgtgacacaagatgcttttgtacgggttcccatgaatcttctgctcttgtttgtgtgacatggaacaaataacttctttgccaccactttgccttagataactgtgtgtgtgtgtgccagtttgaactctgacaccacattttccttctatgcaatcatgcctgtctgataatcttgcattgctttcctctgagctttagtgggtcctagttgcacactggcctttctgtgctgtttttcaatttgcctaataatagcagttaccctgattgtaatttatgtaactttaaacaggatcacactgtaccccctgcctgccttatttgcttactgagcacaggacagaggcaatatacaactctgggttcacacacaagctgagatgagaagaggaatgagccatatattggggaaaatcatagtttgtaggtataattatatagtgcttttctccctcaaagtatttttctagccttgaattcattttatcttcattatccctgtgaagtaggtgggacaagtataaggggaagaggggtgctgaatttttaggccaaagactgatattaatacaaatcactcactaactgtagagccttgggcattatcagtgaactactctgagatttactgtcttcatctgtttaatgagtagaatgtccgtgatgcctacctcacagggttgttgtgagggtcaaatgagaatgtatgtgaaagatttgtaaatggtaaagcactatattcttgtttgttagtcctttttcctttctttgggtagacctacagtcagatgttttgttttatggatcacttattttccttactggtagactgtcgttttatagacatattcctatttcatatattctctccctgttgttagagaacctatctttgtttttggtcaaaacacacatagaaaacaaaatgatccaatgaaaactggtttaactagcaaaagccttggcacctgttggagactatgaccaagccaataaaaagggcatttaaatcagccctgttagtaggaatgtggctatggctggtgcctcttctagtcacaagtttgtttttggagggggtccagaagatcattcccttgcatagatttctcttttaccaatttgagtgcctcctacatgggcagcagtggactaagtgctgggtgtgataaagaggaatgacttaattatgagactgtatataatcaaatacagtgtgggttaggacctgtggcagaccattataataaagcatggccccgtgagggttttgaaagagaaaga

SEQ ID NO: 357406 - DNA, 1729 bp, Homo sapiens
ggcttttagacattatatatattatcagagaagtagcctagtggtcgtggggcacagaaaaaatagataggggcagctctaaagaccagctgttaagacagacaactgcaaactcatttaagcaagagaaaaacagctctaattcgagattgtgaagcaacacttctaaattcaaagacatagagttgtcaaatcaggattttttttttttaaaatgatatcctttcgaatgtaactgattttgggaaaatcacatgttcagaattgaggctaaatggtttgatcaggttttctctttgaagagaccacagccttaggaaatggttcttgatctatacaattccaccttggacactgggttaattctgtttgcccctggaacacaatcacgtaagtttccttctagactggcatcctgatgtgtcttgagtataatcacatgttgctacctagtaaataaaatcttaagaagatccgtggctttccttcaccagttcatagcatcgtgattcattgcccggattggactcgactctactcactggacatctaaccactccacttaattaacaatacccaccctacaggggtgttgtaaggattaaaatttaaaatacccgtgttttctacagtgcctggctcaaaagctactgcaagctcgttactgctcatcctccagaggcccacatcaagtcagccacgactcaaggagactccaaagataaaagctgaagccaaaatatatgattctaaacaccctcctcggctactgcaaagcactgtgagcactttctcaggacgagagccaagaagcccagcacctatgggtcaccacagtttccgaggtcccagatgaaaaagatgcgctcgctaccaccgtgcggcggtcctttctctcgcaatagtctcaatgctcccgggccctgcctccggacgccaggacagaggtaccaaaatctcacctcctgcaaagaaacctaattgctacgggggccggaagaggaagaggtgcggctccgacagccagaggggcgggcatacgcagcctccctcggctcagcctgctactggggatgcagagcgtcctggtcgccatgaaaacaggccacacctcggcgatcccggccggtggtttgcaagtgcgcaggcgcgcgcccccttccgcgcatgagcagtgctgctcccaacccgccagtcgcggtctccggcgccagctacgccgctgccgctgtcactatggcccattacaaagccgccgactcgaagcgtgagcagttccggaggtacttggagaagtcgggggtgctggacacgctgaccaaggtgttggtagccttatatgaagaaccagagaaacctaacagtgctttggattttttaaagcatcacttaggagctgctactccagaaaatccagaaatagagctgcttcgcctagaactggccgaaatgaaagagaagtatgaagctattgtagaagaaaataaaaaactgaaagcaaagcttgctcagtatgaaccacctcaggaggagaagcgtgctgaataggattcttctcagtttgaaagacaatgaaaaatggttttgtatgacttgaatagtttgtatagtatataatcttttctgaacagatgctatagaactcttttaatatgtttaattcacctatcacactctgttaaaaacacatagaatcatcaataaaaactcaatataactttctttgggt

SEQ ID NO: 357407 - DNA, 1680 bp, Homo sapiens
ggcttttagacattatatatattatcagagaagtagcctagtggtcgtggggcacagaaaaaatagataggggcagctctaaagaccagctgttaagacagacaactgcaaactcatttaagcaagagaaaaacagctctaattcgagattgtgaagcaacacttctaaattcaaagacatagagttgtcaaatcaggattttttttttttaaaatgatatcctttcgaatgtaactgattttgggaaaatcacatgttcagaattgaggctaaatggtttgatcaggttttctctttgaagagaccacagccttaggaaatggttcttgatctatacaattccaccttggacactgggttaattctgtttgcccctggaacacaatcacgtaagtttccttctagactggcatcctgatgtgtcttgagtataatcacatgttgctacctagtaaataaaatcttaagaagatccgtggctttccttcaccagttcatagcatcgtgattcattgcccggattggactcgactctactcactggacatctaaccactccacttaattaacaatacccaccctacaggggtgttgtaaggattaaaatttaaaatacccgtgttttctacagtgcctggctcaaaagctactgcaagctcgttactgctcatcctccagaggcccacatcaagtcagccacgactcaaggagactccaaagataaaagctgaagccaaaatatatgattctaaacaccctcctcggctactgcaaagcactgtgagcactttctcaggacgagagccaagaagcccagcacctatgggtcaccacagtttccgaggtcccagatgaaaaagatgcgctcgctaccaccgtgcggcggtcctttctctcgcaatagtctcaatgctcccgggccctgcctccggacgccaggacagaggtaccaaaatctcacctcctgcaaagaaacctaattgctacgggggccggaagaggaagaggtgcggctccgacagccagaggggcgggcatacgcagcctccctcggctcagcctgctactggggatgcagagcgtcctggtcgccatgaaaacaggccacacctcggcgatcccggccggtggtttgcaagtgcgcaggcgcgcgcccccttccgcgcatgagcagtgctgctcccaacccgccagtcgcggtctccggcgccagctacgccgctgccgctgtcactatggcccattacaaagccgccgactcgaagcgtgagcagttccggaggtacttggagaagtcgggggtgctggacacgctgaccaaggttttttaaagcatcacttaggagctgctactccagaaaatccagaaatagagctgcttcgcctagaactggccgaaatgaaagagaagtatgaagctattgtagaagaaaataaaaaactgaaagcaaagcttgctcagtatgaaccacctcaggaggagaagcgtgctgaataggattcttctcagtttgaaagacaatgaaaaatggttttgtatgacttgaatagtttgtatagtatataatcttttctgaacagatgctatagaactcttttaatatgtttaattcacctatcacactctgttaaaaacacatagaatcatcaataaaaactcaatataactttctttgggt

SEQ ID NO: 357408 - DNA, 697 bp, Homo sapiens
tgtgaatcactgacttcactaatggcctgctttcctcacaagaagacaacttggactcagatgaagaccagtccctttctgcagtttcctttaacacagcaagatagccagcacttccaggtgaaatctcccttaagactagcagagaattggaactttttctgttactttcttcagagctatatcgacgtatctggacaagtgataaaaaacaatagctattatggtctacggtgtgccagccactgtttaagggctttatgtatgttaactttggagatgggtgccgttttccaggtgagggaactgaaacttgggggaaattaagtcagggtcacacagccagaaagtggccactaggatctcaaccaaggcagtgtggcttcagagtttgtgctcacaagtgctgtctgtagtgccattcaaataaaaaaggtcacatgccacaagctaggctgattcccagcaccttcccccaaaagaatgtaaagggaagaaccaggacactactatcagcaactctttatccagtttttcatggagacaacggttgacctgtttggacaatggacattacagtgattgattggcaggatgcatgacacgctgggcttgaaaagggactgtttgtatggcaccccactttttaccagcagagctctgaaaaaggcaataattagaatcatgcaaaagcata

SEQ ID NO: 357409 - DNA, 2101 bp, Homo sapiens
ctcttctcgccagccaatggaagcggtctgcctagccctcgcgggggcaaggcggcgaccgaggcgcgtgggtctgggaaggcgcgcggatttggcccctcttctcacatcagcgggtccaggcccaaccgacagactatgggggctccggcaaccaggcgctgcgtggagtggctgctgggcctctacttcctcagccacatccccatcaccctgttcatggacctgcaggcggtgctgccgcgcgagctctacccagtcgagtttagaaacctgctgaagtggtatgctaaggagttcaaagacccactgctacaggagcccccagcctggtttaagtcctttctgttttgcgagcttgtgtttcagctgcctttctttcccattgcaacgtatgccttcctcaaaggaagctgcaagtggattcgaactcctgcaatcatctactctgttcacaccatgacaaccttaattccgatactctccacatttctgtttgaggatttctccaaagccagtggtttcaagggacaaagacctgagactttgcatgaacggttaacccttgtgtctgtctatgccccctacttactcatcccattcatacttttaattttcatgttgcggagcccctactacaagtatgaagagaaaagaaaaaaaaaatgaaggaaacaaccactggcccagggtagagatgcctacagggtggttgcttgttggatacaatacaaggaacactgctcagaacccacgtcttcagcagcatttgaaacactggcagcaatgcacaagagcaagatggtgtcaggaaccatgtcaaaccctcaccttcttccattttttttttttttttaagacagtctcactctgttgcccaggctggagtaaagggcagtggcatgatctcggctcactgcaacctccgcctcctgggctcaagccatcttccttagcctcccaagtagctagaactacaggtgtgtaccaacacgtatggctaatttgttttgttttttttgtgtgtgtggagacagggttttgccatgttgcccaggttggtctcgaacgcctaggctcaagtgatctgcccacctcagtctccctaagtgctgggattacagacgtgaaccactgggcccagcccaaaccttcaccttctaagggcactgggatgaacagaccgatcggcttgagggtgggcaaaggggtgtgggctaggttataaggaagtggtaccaaataactgtgtgcctgagttccaccgcaagattactaaaagcaggaccagaccagaaactgctaaagaacatggcctgtttgacatgttcatgagtcacctgacccacagcatatatgcttatgactaaaccctccactcctgattctcaagagtgtatcacctgtcagcaaaatgaatagtgggatattttgggccattttaaatgtgaaattttgcctctttaatgttaattcaaaactatatcaatgttttcttgttcccacctctaacccaaggaaaaaagagaaaacatactatgcaaaggaagtttaaacttaagttttccttaagggtcagcccaacaatgactttcagtcaaatggattaaactggaaaatgtttttgtttctgttgtaaacagatcatcctaggcgaaagttttttttgtttgtttgcttttaaattagtttatttctaaatcttagtcttccacatttctagaggccacctgacacaagtccctgtatctgaagtctagcatctcaaggctgatctggaagtgtgctagtatgctccctagtggataacttaatcttttaatacagttccgtcattcccatcttgttttcagaagagaaggtggctacagccaggcataacatatccactgtgtgcatagagggtctcttcacgttgatgcttggcattccatcagctttctctaagtctttgctcaagttcaaccttaaaatgatgttagacaacaggtcccagtcagttccctctattttcacccattttgctcacaagccatattggcccgattagtggtactgtctgactcacgtgtgtgatccaaataaaggtagctgctgacca

SEQ ID NO: 357410 - DNA, 1043 bp, Homo sapiens
actctgggttccagttgcctctctcgggtcctgcccatgcctcccccgctcctaacccaactttagttcggtgttttcctcgggctttgtctctatcccagccccttctcccaagcggcgggggcgaacgctttgtttcctttaaagtcacttcttccctgggtttaaggtttcccgcgattccacctctggccggttgtcagtgtctgagggaagtagtctggatgaagtggtgtccaaagtcacatgttaggtttgctttaagcttctggttttttgtttgtttgtttggaagggctttaaaataccagtctgatcccaaagaaaaaatccgagtagaaatagacctgtctgaaggtttagcaccttggttggtgcagctggggcgttcacagatcgtcactgcttcgagatcaggttccagcaacttccagagctcaggagtaaattgccatcttttcagattggctcttcaatattgggttcgagtaacaatgatctcctgagtaaaaataaaggtgaaaatcccgatttcctggttgttggagagcattctttcaaccccaaactctgctttaatgctttgtttttttcttcaaagctatagttttagtttcccggttcgttgaggtttttttctcgtatctggaccctgtgaccttcttccatggaattcctgtcctcagttttgtttctccatcttatctataactgtaggcaggactgacttgtctacccgaagattttattttgcgtctgtttttccttaaatgctttttatctgccgaggaggggttctttacctgagggtcatgaactcccaaaaatgggtgcaagtgtgtgtgccttttgtttcctgcaaggagaatatagcttccatcgacttttcaaggggcctaactctcccaaaaaggccacggctcaagaatgttctaccactcccataagtcactcttttttgtttgcttctagaaccaaacacaactggaagacctctgacctccttttgcatgggaaaagcgtaggtagcgtgtagcaagttg

SEQ ID NO: 357411 - DNA, 2120 bp, Homo sapiens
actctgggttccagttgcctctctcgggtcctgcccatgcctcccccgctcctaacccaactttagttcggtgttttcctcgggctttgtctctatcccagccccttctcccaagcggcgggggcgaacgctttgtttcctttaaagtcacttcttccctgggtttaaggtttcccgcgattccacctctggccggttgtcagtgtctgagggaagtagtctggatgaagtggtgtccaaagtcacatgtcagcatggatccgcatcctttttatttgacaagtttagaaacctgctgaagtggtatgctaaggagttcaaagacccactgctacaggagcccccagcctggtttaagtcctttctgttttgcgagcttgtgtttcagctgcctttctttcccattgcaacgtatgccttcctcaaaggaagctgcaagtggattcgaactcctgcaatcatctactctgttcacaccatgacaaccttaattccgatactctccacatttctgtttgaggatttctccaaagccagtggtttcaagggacaaagacctgagactttgcatgaacggttaacccttgtgtctgtctatgccccctacttactcatcccattcatacttttaattttcatgttgcggagcccctactacaagtatgaagagaaaagaaaaaaaaaatgaaggaaacaaccactggcccagggtagagatgcctacagggtggttgcttgttggatacaatacaaggaacactgctcagaacccacgtcttcagcagcatttgaaacactggcagcaatgcacaagagcaagatggtgtcaggaaccatgtcaaaccctcaccttcttccattttttttttttttttaagacagtctcactctgttgcccaggctggagtaaagggcagtggcatgatctcggctcactgcaacctccgcctcctgggctcaagccatcttccttagcctcccaagtagctagaactacaggtgtgtaccaacacgtatggctaatttgttttgttttttttgtgtgtgtggagacagggttttgccatgttgcccaggttggtctcgaacgcctaggctcaagtgatctgcccacctcagtctccctaagtgctgggattacagacgtgaaccactgggcccagcccaaaccttcaccttctaagggcactgggatgaacagaccgatcggcttgagggtgggcaaaggggtgtgggctaggttataaggaagtggtaccaaataactgtgtgcctgagttccaccgcaagattactaaaagcaggaccagaccagaaactgctaaagaacatggcctgtttgacatgttcatgagtcacctgacccacagcatatatgcttatgactaaaccctccactcctgattctcaagagtgtatcacctgtcagcaaaatgaatagtgggatattttgggccattttaaatgtgaaattttgcctctttaatgttaattcaaaactatatcaatgttttcttgttcccacctctaacccaaggaaaaaagagaaaacatactatgcaaaggaagtttaaacttaagttttccttaagggtcagcccaacaatgactttcagtcaaatggattaaactggaaaatgtttttgtttctgttgtaaacagatcatcctaggcgaaagttttttttgtttgtttgcttttaaattagtttatttctaaatcttagtcttccacatttctagaggccacctgacacaagtccctgtatctgaagtctagcatctcaaggctgatctggaagtgtgctagtatgctccctagtggataacttaatcttttaatacagttccgtcattcccatcttgttttcagaagagaaggtggctacagccaggcataacatatccactgtgtgcatagagggtctcttcacgttgatgcttggcattccatcagctttctctaagtctttgctcaagttcaaccttaaaatgatgttagacaacaggtcccagtcagttccctctattttcacccattttgctcacaagccatattggcccgattagtggtactgtctgactcacgtgtgtgatccaaataaaggtagctgctgacca

SEQ ID NO: 357412 - DNA, 1108 bp, Homo sapiens
cggccgggcgcggtggctcacgcctgtaatcccagcactttgggaggctgaggcgggcggatcacgaggtctcgaacgcctaggctcaagtgatctgcccacctcagtctccctaagtgctgggattacagacgtgaaccactgggcccagcccaaaccttcaccttctaagggcactgggatgaacagaccgatcggcttgagggtgggcaaaggggtgtgggctaggttataaggaagtggtaccaaataactgtgtgcctgagttccaccgcaagattactaaaagcaggaccagaccagaaactgctaaagaacatggcctgtttgacatgttcatgagtcacctgacccacagcatatatgcttatgactaaaccctccactcctgattctcaagagtgtatcacctgtcagcaaaatgaatagtgggatattttgggccattttaaatgtgaaattttgcctctttaatgttaattcaaaactatatcaatgttttcttgttcccacctctaacccaaggaaaaaagagaaaacatactatgcaaaggaagtttaaacttaagttttccttaagggtcagcccaacaatgactttcagtcaaatggattaaactggaaaatgtttttgtttctgttgtaaacagatcatcctaggcgaaagttttttttgtttgtttgcttttaaattagtttatttctaaatcttagtcttccacatttctagaggccacctgacacaagtccctgtatctgaagtctagcatctcaaggctgatctggaagtgtgctagtatgctccctagtggataacttaatcttttaatacagttccgtcattcccatcttgttttcagaagagaaggtggctacagccaggcataacatatccactgtgtgcatagagggtctcttcacgttgatgcttggcattccatcagctttctctaagtctttgctcaagttcaaccttaaaatgatgttagacaacaggtcccagtcagttccctctattttcacccattttgctcacaagccatattggcccgattagtggtactgtctgactcacgtgtgtgatccaaataaaggtagctgctgacca

SEQ ID NO: 357413 - DNA, 2511 bp, Homo sapiens
ctcttctcgccagccaatggaagcggtctgcctagccctcgcgggggcaaggcggcgaccgaggcgcgtgggtctgggaaggcgcgcggatttggcccctcttctcacatcagcgggtccaggcccaaccgacagactatgggggctccggcaaccaggcgctgcgtggagtggctgctgggcctctacttcctcagccacatccccatcaccctgttcatggacctgcaggcggtgctgccgcgcgagctctacccagtcgagtttagaaacctgctgaagtggtatgctaaggagttcaaagacccactgctacaggagcccccagcctggtttaagtcctttctgttttgcgagcttgtgtttcagctgcctttctttcccattgcaacgtatgccttcctcaaaggaagctgcaagtggattcgaactcctgcaatcatctactctgttcacaccatgacaaccttaattccgatactctccacatttctgtttgaggatttctccaaagccagtggtttcaagggacaaagacctgagactttgcatgaacggttaacccttgtgtctgtctatgccccctacttactcatcccattcatacttttaattttcatgttgcggagcccctactacaagtatgaagagaaaagaaaaaaaaaatgaaggaaacaaccactggcccagggtagagatgcctacagggtggttgcttgttggatacaatacaaggaacactgctcagaacccacgtcttcagcagcatttgaaacactggcagcaatgcacaagagcaagatggtgtcaggaaccatgtcaaaccctcaccttcttccattttttttttttttttaagacagtctcactctgttgcccaggctggagtaaagggcagtggcatgatctcggctcactgcaacctccgcctcctgggctcaagccatcttccttagcctcccaagtagctagaactacaggtgtgtaccaacacgtatggctaatttgttttgttttttttgtgtgtgtggagacagggttttgccatgttgcccaggttggtctcgaacgcctaggctcaagtgatctgcccacctcagtctccctaagtgctgggattacagacgtgaaccactgggcccagcccaaaccttcaccttctaagggcactgggatgaacagaccgatcggcttgagggtgggcaaaggggtgtgggctaggttataaggaagtggtaccaaataactgtgtgcctgagttccaccgcaagattactaaaagcaggaccagaccagaaactgctaaagaacatggcctgtttgacatgttcatgagtcacctgacccacagcatatatgcttatgactaaaccctccactcctgattctcaagagtgtatcacctgtcagcaaaatgaatagtgggatattttgggccattttaaatgtgaaattttgcctctttaatgttaattcaaaactatatcaatgttttcttgttcccacctctaacccaaggaaaaaagagaaaacatactatgcaaaggaagtttaaacttaagttttccttaagggtcagcccaacaatgactttcagtcaaatggattaaactggaaaatgtttttgtttctgttgtaaacagatcatcctaggcgaaagttttttttgtttgtttgcttttaaattagtttatttctaaatcttagtcttccacatttctagaggccacctgacacaagtccctgtatctgaagtctagcatctcaaggctgatctggaagtgtgctagtatgctccctagtggataacttaatcttttaatacagttccgtcattcccatcttgttttcagaagagaaggtggctacagccaggcataacatatccactgtgtgcatagagggtctcttcacgttgatgcttggcattccatcagctttctctaagtctttgctcaagttcaaccttaaaatgatgttagacaacaggtcccagtcagttccctctattttcacccattttgctcacaagccatattggcccgattagtggtactgtctgactcacgtgtgtgatccaaataaaggtagctgctgaccaaaaaaaaaaaaaaaaaaaaaaaaaaggggggggggtaaaagtttccccgggggggcccaagtttggggtacccggtttttttgtccaaggggggcccctatataggggaggtcggtataattaaggctagggcactgggccggttggttttaaacaacggtcggtgcagcgtgcgaaaattggctacggtggggactctttggggaagggagcctttactttttgggggggggtgacattatttgggacaaaacttcccttacaggagaatttaaaggctctagaggaaatttacaaacttttttcaaggttgtcatatggtgttaaaccatagggggtagtatgcttgggggtttgaaaaagtttggatagacgggggttatgacttgttgtgaaaactcttttcccgg

SEQ ID NO: 357414 - DNA, 756 bp, Homo sapiens
ggcacgataactggaagtactttgttttcagtgttgtatatgcccttaagcaatatggcaacaggacctgaatgcccgcacaagagttttcaagtgctgtgccccatagcacatagtgctgtgtcctgaaccagctccccgtggctgtgtggggaagttgttgccggctttgttctgatggcttggaactggcttcagtgacgaggagctggaggagcatcaccagagcctcaaggcgctggtgctgcccagcccacgcccttacgtgcggatagatggcgctgtgattcccgaccactggctggaccccagcgctgtgtgggaggtgaagtgcgctgacctctccctctctcccatctaccctgctgcgcggggcctggtggatagtgacaagggcatctcccttcgcttccctcggtttattcgagtccgtgaagacaagcagccggagcaggccaccaccagtgctcaggtggcctgtttgtaccggaagcaaagtcagattcagaaccaacaaggcgaggactcaggctctgaccctgaagatacctactaagccctcgccctcctagggcctgggtacagggcatgagttggacggaccccagggttattattgcctttgctttttagcaaatctgctgtggcaggctgtggattttgagagtcaggggaggggtgtgtgtgtgagggggtggcttactccggagtctgggattcatcccgtcatttctttcaataaataattattggata

SEQ ID NO: 357415 - DNA, 800 bp, Homo sapiens
ggcacgataactggaagtactttgttttcagtgttgtatatgcccttaagcaatatggcaacaggacctgaatgcccgcacaagagttttcaagtgctgtgccccatagcacatagtgctgtgtcctgaaccagctccccgtggctgtgtggggaagttgttgccggctttgttctgatgggtaatgtgattacttagtgtccgttaacctaaacgatcagtgacagaagtgacttttataaatcacaaatgttttggccaccaatctacattgtcaccattttgcattatttagaatagatttttaaatgagctattgtcaggacaaaaggcaaaaagaatccttaagactctcaatgcaaaaggggctttccaggtgacgtttatattggtgattattgcccacttgctgcgtatctgccagcatccagcattactgctaatttttagcctttcctattttggtaggtgaaagaagctcttggcagtgttaacattggagatgggctgggcatggccactcacgcctgtaatcccagcactttgggaggctgaggtgggaggatcacttgagcccaggagttcgggaccagcctgggcaacatagtgagaccccacctctacaaaaacttttttaaaaaattagccaggcgtggtggcgcatgcctgtggtcccagctacttgggaggctgaggcaggaggattgcttgagcccaggaggtggaggttgcagtgagccaagattgcaccactgcactccagcctggataacagagctacaccctgtctcaaaaaaaaa

SEQ ID NO: 357416 - DNA, 184 bp, Homo sapiens
tacatgtaccgggcttgcatgtacccttgcatgtacccttgcatgacgggcagagggcacagatccacgccctggaaggcggggaggtgaagatcttcagcaggaatcaggaagacaacactgggaagtacccggacatcatcagccgcatccccaagattaaactccccccggtacatgcaag

SEQ ID NO: 357417 - DNA, 3062 bp, Homo sapiens
ggcgggggccacctggaagtgctgagggggcggggctagaagaaggagcagctgacagacgaagaaaagtgctggacaggaagggagaattctgacgccaacatgcagcgaagtatcatgtcatttttccaccccaagaaagagggtaaagcaaagaagcctgagaaggaggcatccaatagcagcagagagacggagccccctccaaaggcggcactgaaggagtggaatggagtggtgtccgagagtgactctccggtgaagaggccagggaggaaggcggcccgggtcctgggcagcgaaggggaagaggaggatgaagcccttagccctgctaaaggccagaagcctgccctggactgctcacaggtctccccgccccgtcctgccacatctcctgagaacaatgcttccctctctgacacctctcccatggacagttccccatcagggattccgaagcgtcgcacagctcggaagcagctcccgaaacggaccattcaggaagtcctggaagagcagagtgaggacgaggacagagaagccaagaggaagaaggaggaggaagaagaggagaccccgaaagaaagcctcacagaggctgaagtggcaacagagaaggaaggagaagacggggaccagcccaccacgcctcccaagcccctaaagacctccaaagcagagaccccgacggaaagcgtttcagagcctgaggtggccacgaagcaggaactgcaggaggaggaagagcagaccaagcctccccgcagagctcccaagacgctcagcagcttcttcaccccccggaagccagcagtcaaaaaagaagtgaaggaagaggagccaggggctccaggaaaggagggagctgctgagggacccctggatccatctggttacaatcctgccaagaacaactatcatcccgtggaagatgcctgctggaaaccgggccagaaggttccttacctggctgtggcccggacgtttgagaagatcgaggaggtgtctgctcggctccggatggtggagacgctgagcaacttgctgcgctccgtggtggccctgtcgcctccagacctcctccctgtcctctacctcagcctcaaccaccttgggccaccccagcagggcctggagcttggcgtgggtgatggtgtccttctcaaggcagtggcccaggccacaggtcggcagctggagtccgtccgggctgaggcagccgagaaaggcgacgtggggctggtggccgagaacagccgcagcacccagaggctcatgctgccaccacctccgctcactgcctccggggtcttcagcaagttccgcgacatcgccaggctcactggcagtgcttccacagccaagaagatagacatcatcaaaggcctctttgtggcctgccgccactcagaagcccggttcatcgctaggtccctgagcggacggctgcgccttgggctggcagagcagtcggtgctggctgccctctcccaggcagtgagcctcacgcccccgggccaagaattcccaccagccatggtggatgctgggaagggcaagacagcagaggccagaaagacgtggctggaggagcaaggcatgatcctgaagcagacgttctgcgaggttcccgacctggaccgaattatccccgtgctgctggagcacggcctggaacgtctcccggagcactgcaagctgagcccagggattcccctgaaaccaatgttggcccatcccacccggggcatcagcgaggtcctgaaacgctttgaggaggcagctttcacctgcgaatacaaatatgacgggcagagggcacagatccacgccctggaaggcggggaggtgaagatcttcagcaggaatcaggaagacaacactgggaagtacccggacatcatcagccgcatccccaagattaaactcccatcggtcacatccttcatcctggacaccgaagccgtggcttgggaccgggaaaagaagcagatccagccattccaagtgctcaccacccgcaaacgcaaggaggtggatgcgtctgagatccaggtgcaggtgtgtttgtacgccttcgacctcatctacctcaatggagagtccctggtacgtgagcccctttcccggcgccggcagctgctccgggagaactttgtggagacagagggcgagtttgtcttcgccacctccctggacaccaaggacatcgagcagatcgccgagttcctggagcagtcagtgaaagactcctgcgaggggctgatggtgaagaccctggatgttgatgccacctacgagatcgccaagagatcgcacaactggctcaagctgaagaaggactaccttgatggcgtgggtgacaccctggacctggtggtgatcggcgcctacctgggccgggggaagcgggccggccggtacgggggcttcctgctggcctcctacgacgaggacagtgaggagctgcaggccatatgcaagcttggaactggcttcagtgacgaggagctggaggagcatcaccagagcctcaaggcgctggtgctgcccagcccacgcccttacgtgcggatagatggcgctgtgattcccgaccactggctggaccccagcgctgtgtgggaggtgaagtgcgctgacctctccctctctcccatctaccctgctgcgcggggcctggtggatagtgacaagggcatctcccttcgcttccctcggtttattcgagtccgtgaagacaagcagccggagcaggccaccaccagtgctcaggtggcctgtttgtaccggaagcaaagtcagattcagaaccaacaaggcgaggactcaggctctgaccctgaagatacctactaagccctcgccctcctagggcctgggtacagggcatgagttggacggaccccagggttattattgcctttgctttttagcaaatctgctgtggcaggctgtggattttgagagtcaggggaggggtgtgtgtgtgagggggtggcttactccggagtctgggattcatcccgtcatttctttcaataaataattattggata

SEQ ID NO: 357418 - DNA, 3252 bp, Homo sapiens
cggagggcggcgggtgcgccgaatgcttggggcctatgcttcgccatgtcggggtgtctgcagaggagtgggcgtggggacgctgaggctgccgagagcgcggtggagacggaagagcgcgggctgcgggccgccggagagtgcagagaggtgtctcccagagggaggggggccaggtagagggtagacgagagacagagacagttggacaggtcctctgagaagaggccttgaggagcagctgacagacgaagaaaagtgctggacaggaagggagaattctgacgccaacatgcagcgaagtatcatgtcatttttccaccccaagaaagagggtaaagcaaagaagcctgagaaggaggcatccaatagcagcagagagacggagccccctccaaaggcggcactgaaggagtggaatggagtggtgtccgagagtgactctccggtgaagaggccagggaggaaggcggcccgggtcctgggcagcgaaggggaagaggaggatgaagcccttagccctgctaaaggccagaagcctgccctggactgctcacaggtctccccgccccgtcctgccacatctcctgagaacaatgcttccctctctgacacctctcccatggacagttccccatcagggattccgaagcgtcgcacagctcggaagcagctcccgaaacggaccattcaggaagtcctggaagagcagagtgaggacgaggacagagaagccaagaggaagaaggaggaggaagaagaggagaccccgaaagaaagcctcacagaggctgaagtggcaacagagaaggaaggagaagacggggaccagcccaccacgcctcccaagcccctaaagacctccaaagcagagaccccgacggaaagcgtttcagagcctgaggtggccacgaagcaggaactgcaggaggaggaagagcagaccaagcctccccgcagagctcccaagacgctcagcagcttcttcaccccccggaagccagcagtcaaaaaagaagtgaaggaagaggagccaggggctccaggaaaggagggagctgctgagggacccctggatccatctggttacaatcctgccaagaacaactatcatcccgtggaagatgcctgctggaaaccgggccagaaggttccttacctggctgtggcccggacgtttgagaagatcgaggaggtgtctgctcggctccggatggtggagacgctgagcaacttgctgcgctccgtggtggccctgtcgcctccagacctcctccctgtcctctacctcagcctcaaccaccttgggccaccccagcagggcctggagcttggcgtgggtgatggtgtccttctcaaggcagtggcccaggccacaggtcggcagctggagtccgtccgggctgaggcagccgagaaaggcgacgtggggctggtggccgagaacagccgcagcacccagaggctcatgctgccaccacctccgctcactgcctccggggtcttcagcaagttccgcgacatcgccaggctcactggcagtgcttccacagccaagaagatagacatcatcaaaggcctctttgtggcctgccgccactcagaagcccggttcatcgctaggtccctgagcggacggctgcgccttgggctggcagagcagtcggtgctggctgccctctcccaggcagtgagcctcacgcccccgggccaagaattcccaccagccatggtggatgctgggaagggcaagacagcagaggccagaaagacgtggctggaggagcaaggcatgatcctgaagcagacgttctgcgaggttcccgacctggaccgaattatccccgtgctgctggagcacggcctggaacgtctcccggagcactgcaagctgagcccagggattcccctgaaaccaatgttggcccatcccacccggggcatcagcgaggtcctgaaacgctttgaggaggcagctttcacctgcgaatacaaatatgacgggcagagggcacagatccacgccctggaaggcggggaggtgaagatcttcagcaggaatcaggaagacaacactgggaagtacccggacatcatcagccgcatccccaagattaaactcccatcggtcacatccttcatcctggacaccgaagccgtggcttgggaccgggaaaagaagcagatccagccattccaagtgctcaccacccgcaaacgcaaggaggtggatgcgtctgagatccaggtgcaggtgtgtttgtacgccttcgacctcatctacctcaatggagagtccctggtacgtgagcccctttcccggcgccggcagctgctccgggagaactttgtggagacagagggcgagtttgtcttcgccacctccctggacaccaaggacatcgagcagatcgccgagttcctggagcagtcagtgaaagactcctgcgaggggctgatggtgaagaccctggatgttgatgccacctacgagatcgccaagagatcgcacaactggctcaagctgaagaaggactaccttgatggcgtgggtgacaccctggacctggtggtgatcggcgcctacctgggccgggggaagcgggccggccggtacgggggcttcctgctggcctcctacgacgaggacagtgaggagctgcaggccatatgcaagcttggaactggcttcagtgacgaggagctggaggagcatcaccagagcctcaaggcgctggtgctgcccagcccacgcccttacgtgcggatagatggcgctgtgattcccgaccactggctggaccccagcgctgtgtgggaggtgaagtgcgctgacctctccctctctcccatctaccctgctgcgcggggcctggtggatagtgacaagggcatctcccttcgcttccctcggtttattcgagtccgtgaagacaagcagccggagcaggccaccaccagtgctcaggtggcctgtttgtaccggaagcaaagtcagattcagaaccaacaaggcgaggactcaggctctgaccctgaagatacctactaagccctcgccctcctagggcctgggtacagggcatgagttggacggaccccagggttattattgcctttgctttttagcaaatctgctgtggcaggctgtggattttgagagtcaggggaggggtgtgtgtgtgagggggtggcttactccggagtctgggattcatcccgtcatttctttcaataaataattattggata

SEQ ID NO: 357419 - DNA, 3105 bp, Homo sapiens
ctccgcgcgacggcggcggtgcggacggtgcccaggtcccgcccctaggctctgccccgcccccgcccgcagacgtctgcgcgcgaatgccgtggcgcgaacttgggactgcagaggcgcgcctggcggatctgagtgtgttgcccgggcagcggcgcgcgggaccaacgcaaggagcagctgacagacgaagaaaagtgctggacaggaagggagaattctgacgccaacatgcagcgaagtatcatgtcatttttccaccccaagaaagagggtaaagcaaagaagcctgagaaggaggcatccaatagcagcagagagacggagccccctccaaaggcggcactgaaggagtggaatggagtggtgtccgagagtgactctccggtgaagaggccagggaggaaggcggcccgggtcctgggcagcgaaggggaagaggaggatgaagcccttagccctgctaaaggccagaagcctgccctggactgctcacaggtctccccgccccgtcctgccacatctcctgagaacaatgcttccctctctgacacctctcccatggacagttccccatcagggattccgaagcgtcgcacagctcggaagcagctcccgaaacggaccattcaggaagtcctggaagagcagagtgaggacgaggacagagaagccaagaggaagaaggaggaggaagaagaggagaccccgaaagaaagcctcacagaggctgaagtggcaacagagaaggaaggagaagacggggaccagcccaccacgcctcccaagcccctaaagacctccaaagcagagaccccgacggaaagcgtttcagagcctgaggtggccacgaagcaggaactgcaggaggaggaagagcagaccaagcctccccgcagagctcccaagacgctcagcagcttcttcaccccccggaagccagcagtcaaaaaagaagtgaaggaagaggagccaggggctccaggaaaggagggagctgctgagggacccctggatccatctggttacaatcctgccaagaacaactatcatcccgtggaagatgcctgctggaaaccgggccagaaggttccttacctggctgtggcccggacgtttgagaagatcgaggaggtgtctgctcggctccggatggtggagacgctgagcaacttgctgcgctccgtggtggccctgtcgcctccagacctcctccctgtcctctacctcagcctcaaccaccttgggccaccccagcagggcctggagcttggcgtgggtgatggtgtccttctcaaggcagtggcccaggccacaggtcggcagctggagtccgtccgggctgaggcagccgagaaaggcgacgtggggctggtggccgagaacagccgcagcacccagaggctcatgctgccaccacctccgctcactgcctccggggtcttcagcaagttccgcgacatcgccaggctcactggcagtgcttccacagccaagaagatagacatcatcaaaggcctctttgtggcctgccgccactcagaagcccggttcatcgctaggtccctgagcggacggctgcgccttgggctggcagagcagtcggtgctggctgccctctcccaggcagtgagcctcacgcccccgggccaagaattcccaccagccatggtggatgctgggaagggcaagacagcagaggccagaaagacgtggctggaggagcaaggcatgatcctgaagcagacgttctgggattcccctgaaaccaatgttggcccatcccacccggggcatcagcgaggtcctgaaacgctttgaggaggcagctttcacctgcgaatacaaatatgacgggcagagggcacagatccacgccctggaaggcggggaggtgaagatcttcagcaggaatcaggaagacaacactgggaagtacccggacatcatcagccgcatccccaagattaaactcccatcggtcacatccttcatcctggacaccgaagccgtggcttgggaccgggaaaagaagcagatccagccattccaagtgctcaccacccgcaaacgcaaggaggtggatgcgtctgagatccaggtgcaggtgtgtttgtacgccttcgacctcatctacctcaatggagagtccctggtacgtgagcccctttcccggcgccggcagctgctccgggagaactttgtggagacagagggcgagtttgtcttcgccacctccctggacaccaaggacatcgagcagatcgccgagttcctggagcagtcagtgaaagactcctgcgaggggctgatggtgaagaccctggatgttgatgccacctacgagatcgccaagagatcgcacaactggctcaagctgaagaaggactaccttgatggcgtgggtgacaccctggacctggtggtgatcggcgcctacctgggccgggggaagcgggccggccggtacgggggcttcctgctggcctcctacgacgaggacagtgaggagctgcaggccatatgcaagcttggaactggcttcagtgacgaggagctggaggagcatcaccagagcctcaaggcgctggtgctgcccagcccacgcccttacgtgcggatagatggcgctgtgattcccgaccactggctggaccccagcgctgtgtgggaggtgaagtgcgctgacctctccctctctcccatctaccctgctgcgcggggcctggtggatagtgacaagggcatctcccttcgcttccctcggtttattcgagtccgtgaagacaagcagccggagcaggccaccaccagtgctcaggtggcctgtttgtaccggaagcaaagtcagattcagaaccaacaaggcgaggactcaggctctgaccctgaagatacctactaagccctcgccctcctagggcctgggtacagggcatgagttggacggaccccagggttattattgcctttgctttttagcaaatctgctgtggcaggctgtggattttgagagtcaggggaggggtgtgtgtgtgagggggtggcttactccggagtctgggattcatcccgtcatttctttcaataaataattattggata

SEQ ID NO: 357420 - DNA, 1197 bp, Homo sapiens
ctgaggacctcgaatcgtggtgctgcttctttacccggacatatcagcgcatcccaagattaaactcccatcggtcacatccttcatcctggacaccgaagccgtggcttgggaccgggaaaagaagcagatccagccattccaagtgctcaccacccgcaaacgcaaggaggtggatgcgtctgagatccaggtgcaggtgtgtttgtacgccttcgacctcatctacctcaatggagagtccctggtacgtgagcccctttcccggcgccggcagctgctccgggagaactttgtggagacagagggcgagtttgtcttcgccacctccctggacaccaaggacatcgagcagatcgccgagttcctggagcagtcagtgaaagactcctgcgaggggctgatggtgaagaccctggatgttgatgccacctacgagatcgccaagagatcgcacaactggctcaagctgaagaaggactaccttgatggcgtgggtgacaccctggacctggtggtgatcggcgcctacctgggccgggggaagcgggccggccggtacgggggcttcctgctggcctcctacgacgaggacagtgaggagctgcaggccatatgcaagcttggaactggcttcagtgacgaggagctggaggagcatcaccagagcctcaaggcgctggtgctgcccagcccacgcccttacgtgcggatagatggcgctgtgattcccgaccactggctggaccccagcgctgtgtgggaggtgaagtgcgctgacctctccctctctcccatctaccctgctgcgcggggcctggtggatagtgacaagggcatctcccttcgcttccctcggtttattcgagtccgtgaagacaagcagccggagcaggccaccaccagtgctcaggtggcctgtttgtaccggaagcaaagtcagattcagaaccaacaaggcgaggactcaggctctgaccctgaagatacctactaagccctcgccctcctagggcctgggtacagggcatgagttggacggaccccagggttattattgcctttgctttttagcaaatctgctgtggcaggctgtggattttgagagtcaggggaggggtgtgtgtgtgagggggtggcttactccggagtctgggattcatcccgtcatttctttcaataaataattattggata

SEQ ID NO: 357421 - DNA, 1379 bp, Homo sapiens
ggaggccgacgcaagacagtcgcttgaattcaggaggcggaggctgcagtcagccaagattgcaccaccgcactccagcctgggcgacagagcgagattccgtctcaaaaaaacaaaaacaaaaaacaaaactgatgagatgcccgtaaagtgttaattcaagctccagcaaggccgcagccccccgtctgatgctcctgaagtcaccgactctaaatggtgtcgggccctcttgccagtgactagccccatgctttaagctctcagaatccttctgacatcagggttcttccctctcaaggctttccacgaaccctgtcactagttgtgacccgcacatgtcctgttcgcctcacatttagggcttattgtctttattctcacaaagatgtctcatctctcttctccctgccggccctgcagtccctggtacgtgagcccctttcccggcgccggcagctgctccgggagaactttgtggagacagagggcgagtttgtcttcgccacctccctggacaccaaggacatcgagcagatcgccgagttcctggagcagtcagtgaaagactcctgcgaggggctgatggtgaagaccctggatgttgatgccacctacgagatcgccaagagatcgcacaactggctcaagctgaagaaggactaccttgatggcgtgggtgacaccctggacctggtggtgatcggcgcctacctgggccgggggaagcgggccggccggtacgggggcttcctgctggcctcctacgacgaggacagtgaggagctgcaggccatatgcaagcttggaactggcttcagtgacgaggagctggaggagcatcaccagagcctcaaggcgctggtgctgcccagcccacgcccttacgtgcggatagatggcgctgtgattcccgaccactggctggaccccagcgctgtgtgggaggtgaagtgcgctgacctctccctctctcccatctaccctgctgcgcggggcctggtggatagtgacaagggcatctcccttcgcttccctcggtttattcgagtccgtgaagacaagcagccggagcaggccaccaccagtgctcaggtggcctgtttgtaccggaagcaaagtcagattcagaaccaacaaggcgaggactcaggctctgaccctgaagatacctactaagccctcgccctcctagggcctgggtacagggcatgagttggacggaccccagggttattattgcctttgctttttagcaaatctgctgtggcaggctgtggattttgagagtcaggggaggggtgtgtgtgtgagggggtggcttactccggagtctgggattcatcccgtcatttctttcaataaataattattggata

SEQ ID NO: 357422 - DNA, 1431 bp, Homo sapiens
ctccgcgcgacggcggcggtgcggacggtgcccaggtcccgcccctaggctctgccccgcccccgcccgcagacgtctgcgcgcgaatgccgtggcgcgaacttgggactgcagaggcgcgcctggcggatctgagtgtgttgcccgggcagcggcgcgcgggaccaacgcaaggagcagctgacagacgaagaaaagtgctggacaggaagggagaattctgacgccaacatgcagcgaagtatcatgtcatttttccaccccaagaaagagggtaaagcaaagaagcctgagaaggaggcatccaatagcagcagagagacggagccccctccaaaggcggcactgaaggagtggaatggagtggtgtccgagagtgactctccggtgaagaggccagggaggaaggcggcccgggtcctgggcagcgaaggggaagaggaggatgaagcccttagccctgctaaaggccagaagcctgccctggactgctcacaggtctccccgccccgtcctgccacatctcctgagaacaatgcttccctctctgacacctctcccatggacagttccccatcagggattccgaagcgtcgcacagctcggaagcagctcccgaaacggaccattcaggaagtcctggaagagcagagtgaggacgaggacagagaagccaagaggaagaaggaggaggaagaagaggagaccccgaaagaaagcctcacagaggctgaagtggcaacagagaaggaaggagaagacggggaccagcccaccacgcctcccaagcccctaaagacctccaaagcagagaccccgacggaaagcgtttcagagcctgaggtggccacgaagcaggaactgcaggaggaggaagagcagaccaagcctccccgcagagctcccaagacgctcagcagcttcttcaccccccggaagccagcagtcaaaaaagaagtgaaggaagaggagccaggggctccaggaaaggagggagctgctgagggacccctggatccatctggttacaatcctgccaagaacaactatcatcccgtggaagatgcctgctggaaaccgggccagaaggttccttacctggctgtggcccggacgtttgagaagatcgaggaggtgtctgctcggctccggatggtggagacgctgagcaacttgctgcgctccgtggtggccctgtcgcctccagacctcctccctgtcctctacctcagcctcaaccaccttggggcctgggtacagggcatgagttggacggaccccagggttattattgcctttgctttttagcaaatctgctgtggcaggctgtggattttgagagtcaggggaggggtgtgtgtgtgagggggtggcttactccggagtctgggattcatcccgtcatttctttcaataaataattattggata

SEQ ID NO: 357423 - DNA, 1193 bp, Homo sapiens
  misc_feature (807)..(807): n is a, c, g, or t
  misc_feature (809)..(809): n is a, c, g, or t
ctccgcgcgacggcggcggtgcggacggtgcccaggtcccgcccctaggctctgccccgcccccgcccgcagacgtctgcgcgcgaatgccgtggcgcgaacttgggactgcagaggcgcgcctggcggatctgagtgtgttgcccgggcagcggcgcgcgggaccaacgcaaggagcagctgacagacgaagaaaagtgctggacaggaagggagaattctgacgccaacatgcagcgaagtatcatgtcatttttccaccccaagaaagagggtaaagcaaagaagcctgagaaggaggcatccaatagcagcagagagacggagccccctccaaaggcggcactgaaggagtggaatggagtggtgtccgagagtgactctccggtgaagaggccagggaggaaggcggcccgggtcctgggcagcgaaggggaagaggaggatgaagcccttagccctgctaaaggccagaagcctgccctggactgctcacaggtctccccgccccgtcctgccacatctcctgagaacaatgcttccctctctgacacctctcccatggacagttccccatcagggattccgaagcgtcgcacagctcggaagcagctcccgaaacggaccattcaggaagtcctggaagagcagagtgaggacgaggacagagaagccaagaggaagaaggaggaggaagaagaggagaccccgaaagaaagcctcacagaggctgaagtggcaacagagaaggaaggagaagacggggaccagcccaccacgcctcccaagcccctaaagacctccagnanagacccgacgacagcgtcagagctagaggtggaccaggaagcaggagccgcacgatgacggagaccgacaagctcgcgcagaagtcccaacaggccagcacttctcaccaccggacacaggtcaaaaaactgaagaaaagaacaggtcagcaagcaggccaccgagacccgagctacaggttcgctggcgtctccattttggacggacagccctggtgcacaacgcaaagatcctaacgtgctgacgagttaaaatatacaagtctgtaccgaggtgagatacacaaccacagccgttccactacacgcagacacaagaacacacgcaacgatggttctaccagagccaccgacagttcataaagcaagagacacttagctgct

SEQ ID NO: 357424 - DNA, 671 bp, Homo sapiens
tctctacatctctgtccctgtcccactgtgtctctgtctccttcctccaggtctctggccctttctctgcctcttttgtctttaatgtcctgcctcagcccccagggcctttcatttctttccatctcccattcctcccaactcccacctttctcaactttttacttcaagggggtcttgtttcttttcccttctttcactttctgtttctctttctatttctgtttacttcaagggggtgtcttgtttcttttcccttatttcacttcctatttctgtttacttcaagggggtgcctgtttttttcccttcctccctctccccagccctccaacacttggtcttgactttgagattccagaccctctgttcctctcttcctctgctcactgcaggcgctggtgctgcccagcccacgcccttacgtgcggatagatggcgctgtgattcccgaccactggctggaccccagcgctgtgtgggaggtgaagtgcgctgacctctccctctctcccatctaccctgctgcgcggggcctggtgagtggcagaggacctggccgtggccctgtgtgggattctgggcgggcacacagagagcagagtagggaggggaccttggctcacatctgctcttccaggtaaggatcaggaagatgagcttgcatttta

SEQ ID NO: 357425 - DNA, 3191 bp, Homo sapiens
ctccgcgcgacggcggcggtgcggacggtgcccaggtcccgcccctaggctctgccccgcccccgcccgcagacgtctgcgcgcgaatgccgtggcgcgaacttgggactgcagaggcgcgcctggcggatctgagtgtgttgcccgggcagcggcgcgcgggaccaacgcaaggagcagctgacagacgaagaaaagtgctggacaggaagggagaattctgacgccaacatgcagcgaagtatcatgtcatttttccaccccaagaaagagggtaaagcaaagaagcctgagaaggaggcatccaatagcagcagagagacggagccccctccaaaggcggcactgaaggagtggaatggagtggtgtccgagagtgactctccggtgaagaggccagggaggaaggcggcccgggtcctgggcagcgaaggggaagaggaggatgaagcccttagccctgctaaaggccagaagcctgccctggactgctcacaggtctccccgccccgtcctgccacatctcctgagaacaatgcttccctctctgacacctctcccatggacagttccccatcagggattccgaagcgtcgcacagctcggaagcagctcccgaaacggaccattcaggaagtcctggaagagcagagtgaggacgaggacagagaagccaagaggaagaaggaggaggaagaagaggagaccccgaaagaaagcctcacagaggctgaagtggcaacagagaaggaaggagaagacggggaccagcccaccacgcctcccaagcccctaaagacctccaaagcagagaccccgacggaaagcgtttcagagcctgaggtggccacgaagcaggaactgcaggaggaggaagagcagaccaagcctccccgcagagctcccaagacgctcagcagcttcttcaccccccggaagccagcagtcaaaaaagaagtgaaggaagaggagccaggggctccaggaaaggagggagctgctgagggacccctggatccatctggttacaatcctgccaagaacaactatcatcccgtggaagatgcctgctggaaaccgggccagaaggttccttacctggctgtggcccggacgtttgagaagatcgaggaggtgtctgctcggctccggatggtggagacgctgagcaacttgctgcgctccgtggtggccctgtcgcctccagacctcctccctgtcctctacctcagcctcaaccaccttgggccaccccagcagggcctggagcttggcgtgggtgatggtgtccttctcaaggcagtggcccaggccacaggtcggcagctggagtccgtccgggctgaggcagccgagaaaggcgacgtggggctggtggccgagaacagccgcagcacccagaggctcatgctgccaccacctccgctcactgcctccggggtcttcagcaagttccgcgacatcgccaggctcactggcagtgcttccacagccaagaagatagacatcatcaaaggcctctttgtggcctgccgccactcagaagcccggttcatcgctaggtccctgagcggacggctgcgccttgggctggcagagcagtcggtgctggctgccctctcccaggcagtgagcctcacgcccccgggccaagaattcccaccagccatggtggatgctgggaagggcaagacagcagaggccagaaagacgtggctggaggagcaaggcatgatcctgaagcagacgttctgcgaggttcccgacctggaccgaattatccccgtgctgctggagcacggcctggaacgtctcccggagcactgcaagctgagcccagggattcccctgaaaccaatgttggcccatcccacccggggcatcagcgaggtcctgaaacgctttgaggaggcagctttcacctgcgaatacaaatatgacgggcagagggcacagatccacgccctggaaggcggggaggtgaagatcttcagcaggaatcaggaagacaacactgggaagtacccggacatcatcagccgcatccccaagattaaactcccatcggtcacatccttcatcctggacaccgaagccgtggcttgggaccgggaaaagaagcagatccagccattccaagtgctcaccacccgcaaacgcaaggaggtggatgcgtctgagatccaggtgcaggtgtgtttgtacgccttcgacctcatctacctcaatggagagtccctggtacgtgagcccctttcccggcgccggcagctgctccgggagaactttgtggagacagagggcgagtttgtcttcgccacctccctggacaccaaggacatcgagcagatcgccgagttcctggagcagtcagtgaaagactcctgcgaggggctgatggtgaagaccctggatgttgatgccacctacgagatcgccaagagatcgcacaactggctcaagctgaagaaggactaccttgatggcgtgggtgacaccctggacctggtggtgatcggcgcctacctgggccgggggaagcgggccggccggtacgggggcttcctgctggcctcctacgacgaggacagtgaggagctgcaggccatatgcaagcttggaactggcttcagtgacgaggagctggaggagcatcaccagagcctcaaggcgctggtgctgcccagcccacgcccttacgtgcggatagatggcgctgtgattcccgaccactggctggaccccagcgctgtgtgggaggtgaagtgcgctgacctctccctctctcccatctaccctgctgcgcggggcctggtggatagtgacaagggcatctcccttcgcttccctcggtttattcgagtccgtgaagacaagcagccggagcaggccaccaccagtgctcaggtggcctgtttgtaccggaagcaaagtcagattcagaaccaacaaggcgaggactcaggctctgaccctgaagatacctactaagccctcgccctcctagggcctgggtacagggcatgagttggacggaccccagggttattattgcctttgctttttagcaaatctgctgtggcaggctgtggattttgagagtcaggggaggggtgtgtgtgtgagggggtggcttactccggagtctgggattcatcccgtcatttctttcaataaataattattggata

SEQ ID NO: 357426 - DNA, 1127 bp, Homo sapiens
  misc_feature (741)..(741): n is a, c, g, or t
  misc_feature (743)..(743): n is a, c, g, or t
tggaggaagaggatggccagtgttgacggatgagcagaagtcccgaatcaggccatgaagcccatgaccaaggaggagtgggatgcgcggcagagcatcatccgcaaggagcagctgacagacgaagaaaagtgctggacaggaagggagaattctgacgccaacatgcagcgaagtatcatgtcatttttccaccccaagaaagagggtaaagcaaagaagcctgagaaggaggcatccaatagcagcagagagacggagccccctccaaaggcggcactgaaggagtggaatggagtggtgtccgagagtgactctccggtgaagaggccagggaggaaggcggcccgggtcctgggcagcgaaggggaagaggaggatgaagcccttagccctgctaaaggccagaagcctgccctggactgctcacaggtctccccgccccgtcctgccacatctcctgagaacaatgcttccctctctgacacctctcccatggacagttccccatcagggattccgaagcgtcgcacagctcggaagcagctcccgaaacggaccattcaggaagtcctggaagagcagagtgaggacgaggacagagaagccaagaggaagaaggaggaggaagaagaggagaccccgaaagaaagcctcacagaggctgaagtggcaacagagaaggaaggagaagacggggaccagcccaccacgcctcccaagcccctaaagacctccagnanagacccgacgacagcgtcagagctagaggtggaccaggaagcaggagccgcacgatgacggagaccgacaagctcgcgcagaagtcccaacaggccagcacttctcaccaccggacacaggtcaaaaaactgaagaaaagaacaggtcagcaagcaggccaccgagacccgagctacaggttcgctggcgtctccattttggacggacagccctggtgcacaacgcaaagatcctaacgtgctgacgagttaaaatatacaagtctgtaccgaggtgagatacacaaccacagccgttccactacacgcagacacaagaacacacgcaacgatggttctaccagagccaccgacagttcataaagcaagagacacttagctgct

SEQ ID NO: 357427 - DNA, 3125 bp, Homo sapiens
tggaggaagaggatggccagtgttgacggatgagcagaagtcccgaatcaggccatgaagcccatgaccaaggaggagtgggatgcgcggcagagcatcatccgcaaggagcagctgacagacgaagaaaagtgctggacaggaagggagaattctgacgccaacatgcagcgaagtatcatgtcatttttccaccccaagaaagagggtaaagcaaagaagcctgagaaggaggcatccaatagcagcagagagacggagccccctccaaaggcggcactgaaggagtggaatggagtggtgtccgagagtgactctccggtgaagaggccagggaggaaggcggcccgggtcctgggcagcgaaggggaagaggaggatgaagcccttagccctgctaaaggccagaagcctgccctggactgctcacaggtctccccgccccgtcctgccacatctcctgagaacaatgcttccctctctgacacctctcccatggacagttccccatcagggattccgaagcgtcgcacagctcggaagcagctcccgaaacggaccattcaggaagtcctggaagagcagagtgaggacgaggacagagaagccaagaggaagaaggaggaggaagaagaggagaccccgaaagaaagcctcacagaggctgaagtggcaacagagaaggaaggagaagacggggaccagcccaccacgcctcccaagcccctaaagacctccaaagcagagaccccgacggaaagcgtttcagagcctgaggtggccacgaagcaggaactgcaggaggaggaagagcagaccaagcctccccgcagagctcccaagacgctcagcagcttcttcaccccccggaagccagcagtcaaaaaagaagtgaaggaagaggagccaggggctccaggaaaggagggagctgctgagggacccctggatccatctggttacaatcctgccaagaacaactatcatcccgtggaagatgcctgctggaaaccgggccagaaggttccttacctggctgtggcccggacgtttgagaagatcgaggaggtgtctgctcggctccggatggtggagacgctgagcaacttgctgcgctccgtggtggccctgtcgcctccagacctcctccctgtcctctacctcagcctcaaccaccttgggccaccccagcagggcctggagcttggcgtgggtgatggtgtccttctcaaggcagtggcccaggccacaggtcggcagctggagtccgtccgggctgaggcagccgagaaaggcgacgtggggctggtggccgagaacagccgcagcacccagaggctcatgctgccaccacctccgctcactgcctccggggtcttcagcaagttccgcgacatcgccaggctcactggcagtgcttccacagccaagaagatagacatcatcaaaggcctctttgtggcctgccgccactcagaagcccggttcatcgctaggtccctgagcggacggctgcgccttgggctggcagagcagtcggtgctggctgccctctcccaggcagtgagcctcacgcccccgggccaagaattcccaccagccatggtggatgctgggaagggcaagacagcagaggccagaaagacgtggctggaggagcaaggcatgatcctgaagcagacgttctgcgaggttcccgacctggaccgaattatccccgtgctgctggagcacggcctggaacgtctcccggagcactgcaagctgagcccagggattcccctgaaaccaatgttggcccatcccacccggggcatcagcgaggtcctgaaacgctttgaggaggcagctttcacctgcgaatacaaatatgacgggcagagggcacagatccacgccctggaaggcggggaggtgaagatcttcagcaggaatcaggaagacaacactgggaagtacccggacatcatcagccgcatccccaagattaaactcccatcggtcacatccttcatcctggacaccgaagccgtggcttgggaccgggaaaagaagcagatccagccattccaagtgctcaccacccgcaaacgcaaggaggtggatgcgtctgagatccaggtgcaggtgtgtttgtacgccttcgacctcatctacctcaatggagagtccctggtacgtgagcccctttcccggcgccggcagctgctccgggagaactttgtggagacagagggcgagtttgtcttcgccacctccctggacaccaaggacatcgagcagatcgccgagttcctggagcagtcagtgaaagactcctgcgaggggctgatggtgaagaccctggatgttgatgccacctacgagatcgccaagagatcgcacaactggctcaagctgaagaaggactaccttgatggcgtgggtgacaccctggacctggtggtgatcggcgcctacctgggccgggggaagcgggccggccggtacgggggcttcctgctggcctcctacgacgaggacagtgaggagctgcaggccatatgcaagcttggaactggcttcagtgacgaggagctggaggagcatcaccagagcctcaaggcgctggtgctgcccagcccacgcccttacgtgcggatagatggcgctgtgattcccgaccactggctggaccccagcgctgtgtgggaggtgaagtgcgctgacctctccctctctcccatctaccctgctgcgcggggcctggtggatagtgacaagggcatctcccttcgcttccctcggtttattcgagtccgtgaagacaagcagccggagcaggccaccaccagtgctcaggtggcctgtttgtaccggaagcaaagtcagattcagaaccaacaaggcgaggactcaggctctgaccctgaagatacctactaagccctcgccctcctagggcctgggtacagggcatgagttggacggaccccagggttattattgcctttgctttttagcaaatctgctgtggcaggctgtggattttgagagtcaggggaggggtgtgtgtgtgagggggtggcttactccggagtctgggattcatcccgtcatttctttcaataaataattattggata

SEQ ID NO: 357428 - DNA, 3101 bp, Homo sapiens
ctccgcgcgacggcggcggtgcggacggtgcccaggtcccgcccctaggctctgccccgcccccgcccgcagacgtctgcgcgcgaatgccgtggcgcgaacttgggactgcagaggcgcgcctggcggatctgagtgtgttgcccgggcagcggcgcgcgggaccaacgcaaggagcagctgacagacgaagaaaagtgctggacaggaagggagaattctgacgccaacatgcagcgaagtatcatggcggcactgaaggagtggaatggagtggtgtccgagagtgactctccggtgaagaggccagggaggaaggcggcccgggtcctgggcagcgaaggggaagaggaggatgaagcccttagccctgctaaaggccagaagcctgccctggactgctcacaggtctccccgccccgtcctgccacatctcctgagaacaatgcttccctctctgacacctctcccatggacagttccccatcagggattccgaagcgtcgcacagctcggaagcagctcccgaaacggaccattcaggaagtcctggaagagcagagtgaggacgaggacagagaagccaagaggaagaaggaggaggaagaagaggagaccccgaaagaaagcctcacagaggctgaagtggcaacagagaaggaaggagaagacggggaccagcccaccacgcctcccaagcccctaaagacctccaaagcagagaccccgacggaaagcgtttcagagcctgaggtggccacgaagcaggaactgcaggaggaggaagagcagaccaagcctccccgcagagctcccaagacgctcagcagcttcttcaccccccggaagccagcagtcaaaaaagaagtgaaggaagaggagccaggggctccaggaaaggagggagctgctgagggacccctggatccatctggttacaatcctgccaagaacaactatcatcccgtggaagatgcctgctggaaaccgggccagaaggttccttacctggctgtggcccggacgtttgagaagatcgaggaggtgtctgctcggctccggatggtggagacgctgagcaacttgctgcgctccgtggtggccctgtcgcctccagacctcctccctgtcctctacctcagcctcaaccaccttgggccaccccagcagggcctggagcttggcgtgggtgatggtgtccttctcaaggcagtggcccaggccacaggtcggcagctggagtccgtccgggctgaggcagccgagaaaggcgacgtggggctggtggccgagaacagccgcagcacccagaggctcatgctgccaccacctccgctcactgcctccggggtcttcagcaagttccgcgacatcgccaggctcactggcagtgcttccacagccaagaagatagacatcatcaaaggcctctttgtggcctgccgccactcagaagcccggttcatcgctaggtccctgagcggacggctgcgccttgggctggcagagcagtcggtgctggctgccctctcccaggcagtgagcctcacgcccccgggccaagaattcccaccagccatggtggatgctgggaagggcaagacagcagaggccagaaagacgtggctggaggagcaaggcatgatcctgaagcagacgttctgcgaggttcccgacctggaccgaattatccccgtgctgctggagcacggcctggaacgtctcccggagcactgcaagctgagcccagggattcccctgaaaccaatgttggcccatcccacccggggcatcagcgaggtcctgaaacgctttgaggaggcagctttcacctgcgaatacaaatatgacgggcagagggcacagatccacgccctggaaggcggggaggtgaagatcttcagcaggaatcaggaagacaacactgggaagtacccggacatcatcagccgcatccccaagattaaactcccatcggtcacatccttcatcctggacaccgaagccgtggcttgggaccgggaaaagaagcagatccagccattccaagtgctcaccacccgcaaacgcaaggaggtggatgcgtctgagatccaggtgcaggtgtgtttgtacgccttcgacctcatctacctcaatggagagtccctggtacgtgagcccctttcccggcgccggcagctgctccgggagaactttgtggagacagagggcgagtttgtcttcgccacctccctggacaccaaggacatcgagcagatcgccgagttcctggagcagtcagtgaaagactcctgcgaggggctgatggtgaagaccctggatgttgatgccacctacgagatcgccaagagatcgcacaactggctcaagctgaagaaggactaccttgatggcgtgggtgacaccctggacctggtggtgatcggcgcctacctgggccgggggaagcgggccggccggtacgggggcttcctgctggcctcctacgacgaggacagtgaggagctgcaggccatatgcaagcttggaactggcttcagtgacgaggagctggaggagcatcaccagagcctcaaggcgctggtgctgcccagcccacgcccttacgtgcggatagatggcgctgtgattcccgaccactggctggaccccagcgctgtgtgggaggtgaagtgcgctgacctctccctctctcccatctaccctgctgcgcggggcctggtggatagtgacaagggcatctcccttcgcttccctcggtttattcgagtccgtgaagacaagcagccggagcaggccaccaccagtgctcaggtggcctgtttgtaccggaagcaaagtcagattcagaaccaacaaggcgaggactcaggctctgaccctgaagatacctactaagccctcgccctcctagggcctgggtacagggcatgagttggacggaccccagggttattattgcctttgctttttagcaaatctgctgtggcaggctgtggattttgagagtcaggggaggggtgtgtgtgtgagggggtggcttactccggagtctgggattcatcccgtcatttctttcaataaataattattggata

SEQ ID NO: 357429 - DNA, 3340 bp, Homo sapiens
ctccgcgcgacggcggcggtgcggacggtgcccaggtcccgcccctaggctctgccccgcccccgcccgcagacgtctgcgcgcgaatgccgtggcgcgaacttgggactgcagaggcgcgcctggcggatctgagtgtgttgcccgggcagcggcgcgcgggaccaacgcaaggagcagctgacagacgaagaaaagtgctggacaggaagggagaattctgacgccaacatgcagcgaagtatcatgtcatttttccaccccaagaaagagggtaaagcaaagaagcctgagaaggaggcatccaatagcagcagagagacggagccccctccaaaggcggcactgaaggagtggaatggagtggtgtccgagagtgactctccggtgaagaggccagggaggaaggcggcccgggtcctgggcagcgaaggggaagaggaggatgaagcccttagccctgctaaaggccagaagcctgccctggactgctcacaggtctccccgccccgtcctgccacatctcctgagaacaatgcttccctctctgacacctctcccatggacagttccccatcagggattccgaagcgtcgcacagctcggaagcagctcccgaaacggaccattcaggaagtcctggaagagcagagtgaggacgaggacagagaagccaagaggaagaaggaggaggaagaagaggagaccccgaaagaaagcctcacagaggctgaagtggcaacagagaaggaaggagaagacggggaccagcccaccacgcctcccaagcccctaaagacctccaaagcagagaccccgacggaaagcgtttcagagcctgaggtggccacgaagcaggaactgcaggaggaggaagagcagaccaagcctccccgcagagctcccaagacgctcagcagcttcttcaccccccggaagccagcagtcaaaaaagaagtgaaggaagaggagccaggggctccaggaaaggagggagctgctgagggacccctggatccatctggttacaatcctgccaagaacaactatcatcccgtggaagatgcctgctggaaaccgggccagaaggttccttacctggctgtggcccggacgtttgagaagatcgaggaggtgtctgctcggctccggatggtggagacgctgagcaacttgctgcgctccgtggtggccctgtcgcctccagacctcctccctgtcctctacctcagcctcaaccaccttgggccaccccagcagggcctggagcttggcgtgggtgatggtgtccttctcaaggcagtggcccaggccacaggtcggcagctggagtccgtccgggctgaggcagccgagaaaggcgacgtggggctggtggccgagaacagccgcagcacccagaggctcatgctgccaccacctccgctcactgcctccggggtcttcagcaagttccgcgacatcgccaggctcactggcagtgcttccacagccaagaagatagacatcatcaaaggcctctttgtggcctgccgccactcagaagcccggttcatcgctaggtccctgagcggacggctgcgccttgggctggcagagcagtcggtgctggctgccctctcccaggcagtgagcctcacgcccccgggccaagaattcccaccagccatggtggatgctgggaagggcaagacagcagaggccagaaagacgtggctggaggagcaaggcatgatcctgaagcagacgttctgcgaggttcccgacctggaccgaattatccccgtgctgctggagcacggcctggaacgtctcccggagcactgcaagctgagcccagggattcccctgaaaccaatgttggcccatcccacccggggcatcagcgaggtcctgaaacgctttgaggaggcagctttcacctgcgaatacaaatatgacgggcagagggcacagatccacgccctggaaggcggggaggtgaagatcttcagcaggaatcaggaagacaacactgggaagtacccggacatcatcagccgcatccccaagattaaactcccatcggtcacatccttcatcctggacaccgaagccgtggcttgggaccgggaaaagaagcagatccagccattccaagtgctcaccacccgcaaacgcaaggaggtggatgcgtctgagatccaggtgcaggtgtgtttgtacgccttcgacctcatctacctcaatggagagtccctggtacgtgagcccctttcccggcgccggcagctgctccgggagaactttgtggagacagagggcgagtttgtcttcgccacctccctggacaccaaggacatcgagcagatcgccgagttcctggagcagtcagtgaaagactcctgcgaggggctgatggtgaagaccctggatgttgatgccacctacgagatcgccaagagatcgcacaactggctcaagctgaagaaggactaccttgatggcgtgggtgacaccctggacctggtggtgatcggcgcctacctgggccgggggaagcgggccggccggtacgggggcttcctgctggcctcctacgacgaggacagtgaggagctgcaggccatatgcaaggtcctggggaactggggctgatggcagaagcaggagggaaggagattagactcccgggggtatttcctattgcacaacccagaccgaggggtgctcacatccccctgtgaaggatccgttctccccagtttttatttactttttctggttctatgagcaactcttgcttcatatagaaaaacaggctgggatagaaagatgtcaggaatgtgtgtcagtgagagattgagattagctacaaatagtggtggctcacataagaaaagaatttttttgttatgaaatgagaagtgtggagggggcagtctgatgccattagggattcaggttcctcctctccccacatttttttttgtccccacattttttttttctgccatgtgcctctggcctcatcatcacaatgtggctgcaggagttccagccctcatggccatgcctgctccacgcaccagggaagagcaaagggggttggaccctgagtcagcctcagccagtgaacaccttctgctcaagttctgttgctcatcactttgctccatggctcacccctagctgcaaggaattctgggaaatgtaaagtgatttactttttttcaagttaaagtttttcttaaagctgtgcacattttggactagattttctccagcctgtttttactcttactttgaaacagctgtttcaaatgactcgtaatctgcttaaatcctacatgctttttta

SEQ ID NO: 357430 - DNA, 893 bp, Homo sapiens
cactgtgtctctgtctccttcctccaggtctctggccctttctctgcctcttttgtctttaatgtcctgcctcagcccccagggcctttcatttctttccatctcccattcctcccaactcccacctttctcaactttttacttcaagggggtcttgtttcttttcccttctttcactttctgtttctctttctatttctgtttacttcaagggggtgtcttgtttcttttcccttatttcacttcctatttctgtttacttcaagggggtgcctgtttttttcccttcctccctctccccagccctccaacacttggtcttgactttgagattccagaccctctgttcctctcttcctctgctcactgcaggcgctggtgctgcccagcccacgcccttacgtgcggatagatggcgctgtgattcccgaccactggctggaccccagcgctgtgtgggaggtgaagtgcgctgacctctccctctctcccatctaccctgctgcgcggggcctggtggatagtgacaagggcatctcccttcgcttccctcggtttattcgagtccgtgaagacaagcagccggagcaggccaccaccagtgctcaggtggcctgtttgtaccggaagcaaagtcagattcagaaccaacaaggcgaggactcaggctctgaccctgaagatacctactaagccctcgccctcctagggcctgggtacagggcatgagttggacggaccccagggttattattgcctttgctttttagcaaatctgctgtggcaggctgtggattttgagagtcaggggaggggtgtgtgtgtgagggggtggcttactccggagtctgggattcatcccgtcatttctttcaataaataattattggata

SEQ ID NO: 357431 - DNA, 458 bp, Homo sapiens
ttatggccttgacttcgtagcaaagctactgtggcagcctgtgaattttaagagtcaggggaggggtgtgtgtgtgagggggtggatagtgacaagggcatctcccttcgcttccctcggtttattcgagtccgtgaagacaagcagccggagcaggccaccaccagtgctcaggtggcctgtttgtaccggaagcaaagtcagattcagaaccaacaaggcgaggactcaggctctgaccctgaagatacctactaagccctcgccctcctagggcctgggtacagggcatgagttggacggaccccagggttattattgcctttgctttttagcaaatctgctgtggcaggctgtggattttgagagtcaggggaggggtgtgtgtgtgagggggtggcttactccggagtctgggattcatcccgtcatttctttcaataaataattattggata

SEQ ID NO: 357432 - DNA, 325 bp, Homo sapiens
gagggattgaagggtgcggcctgcactggggcagtgactgtgtgcaggcagagaaggggagagggcccagagccttccagaggctacatcagtgggtgtgagctctccgggatgggagcacacgagccagcgaggtcagatacaccaagccctttgcctccccagctcggaagcagctcccgaaacggaccattcaggaagtcctggaagagcagagtgaggacgaggacagagaagccaagaggaagaaggaggaggaaggtgagcccccagaaggagagaagtgtgtgtgtgtgtgtgtgtgtgtgtgtgaagccaagaggaa

SEQ ID NO: 357433 - DNA, 482 bp, Homo sapiens
tttctgcatctattgagatggtgatatgggtttgtcttatagccacgagccgcacaccgactgggcaaaatacttcaaagggaaaaagatccatggagaaattgacattaaagtagaacaggccgaattctctgatctcaaccttgtggcccatgccaatggtggattctctgtggatatggaagttcttcggaacggggtgaaggtcgtgcggtctctgaagccggattttgtgctgatccgccagcacgccttcagcatggcacgcaacggagactaccgcagtttggtcattgggctgcagtatgctggaatccccagtgttaactccttgcattctgtctacaacttctgtgacaagccctgggtgtttgcccagatggttcgactgcataagaaactggggacagaagaattccctctaattgatcagaccttctaccccaatcacaaagaaatggtgagtttggggaaaatagagt

SEQ ID NO: 357434 - DNA, 360 bp, Homo sapiens
ccggctcgatcttagctgctaattggggaaagtgttatttcatatggaaaagtaataccaagtaggttaggaaatggcagcagcacaacgcatgctgaggggtgatttactgcacttaaatcatttagcagtataagttaactctttgccccaaatctctccagcacacctatttcccatcataattttccaaatcctcaagaaacccctactgttgagccccttcccatggatcttccatccctctgaagatccacatcttcaaatgccacccaacacctagccccacaaggatttcccttcaccagctcccctcaacctcctgggttcaagcaattctcctgcctcagcctcccaagt

SEQ ID NO: 357435 - DNA, 3260 bp, Homo sapiens
cacgggcgcgaccatctgcgctgcggcgccggcgactcagcgctgcctcagtctgcggtgggcagcggaggagtcgtgtcgtgcctgagagcgcagctgtgctcctgggcaccgcgcagtccgcccccgcggctcctggccagaccacccctaggaccccctgccccaagtcgcagccatgaactacctgcggcgccgcctgtcggacagcaactttatggccaatctgccaaatgggtacatgacagacctgcagcgtccgcagccgcccccaccgccgcccggtgcccacagccccggagccacgcccggtcccgggaccgccactgccgagaggtcctccggggtcgccccagcggcctctccggccgcccctagccccgggtcctcggggggcggtggcttcttctcgtcgctgtccaacgcggtcaagcagaccacggcggcggcagctgccaccttcagcgagcaggtgggcggcggctctgggggcgcaggccgcgggggagccgcctccagggtgctgctggtcatcgacgagccgcacaccgactgggcaaaatacttcaaagggaaaaagatccatggagaaattgacattaaagtagaacaggccgaattctctgatctcaaccttgtggcccatgccaatggtggattctctgtggatatggaagttcttcggaacggggtgaaggtcgtgcggtctctgaagccggattttgtgctgatccgccagcacgccttcagcatggcacgcaacggagactaccgcagtttggtcattgggctgcagtatgctggaatccccagtgttaactccttgcattctgtctacaacttctgtgacaagccctgggtgtttgcccagatggttcgactgcataagaaactggggacagaagaattccctctaattgatcagaccttctaccccaatcacaaagaaatgctcagcagtacaacgtaccccgtggttgtgaagatggggcacgcacactctgggatgggcaaggtcaaggttgacaaccagcatgacttccaggacatcgcaagtgtcgtcgcactgaccaagacgtatgccactgccgagcccttcatcgatgccaaatatgacgtgcgtgtccagaagattgggcagaactacaaggcctacatgaggacgtcagtgtcagggaactggaagaccaatactggctctgcgatcctggagcaaattgccatgtctgacagatacaagctgtgggtggacacgtgctcagagatttttgggggactggacatctgcgcagtggaagcgctacatggcaaggacggaagggatcacatcattgaggtggtgggttcctccatgccgctcattggtgaccaccaggatgaagacaaacagctcatcgtagagctcgtggtcaacaagatggctcaggccctgccccggcagcgacagcgcggatgcctcccctggcaggggctcccatggccagactccgtccccaggggccctgcccttgggccgccagacctcccagcagcccgcagggcccccggctcagcagcgacccccaccacagggcggccctccacagccgggtccaggcccccagcgccagggacccccattgcagcagcgcccgcccccgcagggccagcagcacctttcaggccttggacccccagctggcagccccctgccccagcgccttccaagtcccacctcagcgccccagcagcccgcgtcccaggccgcgccgccgacccagggtcaaggccgccaatcccggccagtggcgggaggccccggggcgcctccagcagcccgcccgcccgcctctccgtctccccagcgccaggcgggccccccacaggctacccgtcagacatccgtctctggcccggctccgccaaaggcctctggggccccaccgggcgggcagcagcgccagggcccgccccagaaacccccaggcccagccggccccacacgccaggccagccaggcgggtcccgtgccccgcactgggccacccaccacgcagcagcctcggcccagcggcccgggccccgctggacgtcccaaaccacagctggcccagaaacccagccaggacgtgccgccacccgccaccgccgctgcagggggacctccgcacccccagctcaacaaatcccagtctctgaccaatgccttcaaccttccagagccagccccgcccaggcccagccttagccaggacgaggtgaaagctgagaccatccgcagcctgaggaagtctttcgccagcctcttctccgactgataccccactctgagaaccccaaaatccctgggcaacccttctctgggccctgaatccatttctcacttttggagtctccaaatcccttgagaacccatctcccggttctccaagattccacctctcattcctcaagatccccgagtaccttgagaaacctgactcctcctggccctaaatccggttctcacatgtggaatccccaagtccttttagaaccccactcgtggtcacttcaggatctacttctgttttagaacctccacattcctgaagacctccgcccctggtttccccagagggcgttttccttcctggaagtgcccaaataccaggcaacccattgcagaatcccttcctggagccctgaagttcctggaaaaccctatttttggtcccaaatctctccagcacacctatttcccatcataattttccaaatcctcaagaaacccctactgttgagccccttcccatggatcttccatccctctgaagatccacatcttcaaatgccacccaacacctagccccacaaggatttcccttcaccagctcccctcaacctcattcaataccttgggagcccctcccacttccaggacccctcggttcccccagggaccccctccccagtttcctgcctctgacagctgtctttaaatatgcaaactccacccatcttcccagaatcctttgcacacggaaggccagtggtctccgcttccccacctttgctgtggtgtctgtgtctgtgactgacgtggcctccttttgtgccgtgcttggcatatgtggtcctcgttcatcgtgccgcctgtggtgatgcgtgcagtgacgctgtttatgtggtccgcacctccccctgaccttcactccttgcctggactcaccccacccctcagcggctctgaaccccaagagaagagtcgggaaacaaaataaacaagcaaaggcccagca

SEQ ID NO: 357436 - DNA, 3183 bp, Homo sapiens
cacgggcgcgaccatctgcgctgcggcgccggcgactcagcgctgcctcagtctgcggtgggcagcggaggagtcgtgtcgtgcctgagagcgcagctgtgctcctgggcaccgcgcagtccgcccccgcggctcctggccagaccacccctaggaccccctgccccaagtcgcagccatgaactacctgcggcgccgcctgtcggacagcaactttatggccaatctgccaaatgggtacatgacagacctgcagcgtccgcagccgcccccaccgccgcccggtgcccacagccccggagccacgcccggtcccgggaccgccactgccgagaggtcctccggggtcgccccagcggcctctccggccgcccctagccccgggtcctcggggggcggtggcttcttctcgtcgctgtccaacgcggtcaagcagaccacggcggcggcagctgccaccttcagcgagcaggtgggcggcggctctgggggcgcaggccgcgggggagccgcctccagggtgctgctggtcatcgacgagccgcacaccgactgggcaaaatacttcaaagggaaaaagatccatggagaaattgacattaaagtagaacaggccgaattctctgatctcaaccttgtggcccatgccaatggtggattctctgtggatatggaagttcttcggaacggggtgaaggtcgtgcggtctctgaagccggattttgtgctgatccgccagcacgccttcagcatggcacgcaacggagactaccgcagtttggtcattgggctgcagtatgctggaatccccagtgttaactccttgcattctgtctacaacttctgtgacaagccctgggtgtttgcccagatggttcgactgcataagaaactggggacagaagaattccctctaattgatcagaccttctaccccaatcacaaagaaatgctcagcagtacaacgtaccccgtggttgtgaagatggggcacgcacactctgggatgggcaaggtcaaggttgacaaccagcatgacttccaggacatcgcaagtgtcgtcgcactgaccaagacgtatgccactgccgagcccttcatcgatgccaaatatgacgtgcgtgtccagaagattgggcagaactacaaggcctacatgaggacgtcagtgtcagggaactggaagaccaatactggctctgcgatcctggagcaaattgccatgtctgacagatacaagctgtgggtggacacgtgctcagagatttttgggggactggacatctgcgcagtggaagcgctacatggcaaggacggaagggatcacatcattgaggtggtgggttcctccatgccgctcattggtgaccaccaggatgaagacaaacagctcatcgtagagctcgtggtcaacaagatggctcaggccctgccccggcagcgacagcgcggatgcctcccctggcaggggctcccatggccagactccgtccccaggggccctgcccttgggccgccagacctcccagcagcccgcagggcccccggctcagcagcgacccccaccacagggcggccctccacagccgggtccaggcccccagcgccagggacccccattgcagcagcgcccgcccccgcagggccagcagcacctttcaggccttggacccccagctggcagccccctgccccagcgccttccaagtcccacctcagcgccccagcagcccgcgtcccaggccgcgccgccgacccagggtcaaggccgccaatcccggccagtggcgggaggccccggggcgcctccagcagcccgcccgcccgcctctccgtctccccagcgccaggcgggccccccacaggctacccgtcagacatccgtctctggcccggctccgccaaaggcctctggggccccaccgggcgggcagcagcgccagggcccgccccagaaacccccaggcccagccggccccacacgccaggccagccaggcgggtcccgtgccccgcactgggccacccaccacgcagcagcctcggcccagcggcccgggccccgctggacgtcccaaaccacagctggcccagaaacccagccaggacgtgccgccacccgccaccgccgctgcagggggacctccgcacccccagctcaacaaatcccagtctctgaccaatgccttcaaccttccagagccagccccgcccaggcccagccttagccaggacgaggtgaaagctgagaccatccgcagcctgaggaagtctttcgccagcctcttctccgactgataccccactctgagaaccccaaaatccctgggcaacccttctctgggccctgaatccatttctcacttttggagtctccaaatcccttgagaacccatctcccggttctccaagattccacctctcattcctcaagatccccgagtaccttgagaaacctgactcctcctggccctaaatccggttctcacatgtggaatccccaagtccttttagaaccccactcgtggtcacttcaggatctacttctgttttagaacctccacattcctgaagacctccgcccctggtttccccagagggcgttttccttcctggaagtgcccaaataccaggcaacccattgcagaatcccttcctggagccctgaagttcctggaaaaccctatttttggtcccaaatctctccagcacacctatttcccatcataattttccaaatcctcaagaaacccctactgttgagccccttcccatggatcttccatccctctgaagatccacatcttcaaatgccacttccaggacccctcggttcccccagggaccccctccccagtttcctgcctctgacagctgtctttaaatatgcaaactccacccatcttcccagaatcctttgcacacggaaggccagtggtctccgcttccccacctttgctgtggtgtctgtgtctgtgactgacgtggcctccttttgtgccgtgcttggcatatgtggtcctcgttcatcgtgccgcctgtggtgatgcgtgcagtgacgctgtttatgtggtccgcacctccccctgaccttcactccttgcctggactcaccccacccctcagcggctctgaaccccaagagaagagtcgggaaacaaaataaacaagcaaaggcccagca

SEQ ID NO: 357437 - DNA, 2565 bp, Homo sapiens
cctgcgcctttcagaaccaatgagccggaacggggtgaaggtcgtgcggtctctgaagccggattttgtgctgatccgccagcacgccttcagcatggcacgcaacggagactaccgcagtttggtcattgggctgcagtatgctggaatccccagtgttaactccttgcattctgtctacaacttctgtgacaagccctgggtgtttgcccagatggttcgactgcataagaaactggggacagaagaattccctctaattgatcagaccttctaccccaatcacaaagaaatgctcagcagtacaacgtaccccgtggttgtgaagatggggcacgcacactctgggatgggcaaggtcaaggttgacaaccagcatgacttccaggacatcgcaagtgtcgtcgcactgaccaagacgtatgccactgccgagcccttcatcgatgccaaatatgacgtgcgtgtccagaagattgggcagaactacaaggcctacatgaggacgtcagtgtcagggaactggaagaccaatactggctctgcgatcctggagcaaattgccatgtctgacagatacaagctgtgggtggacacgtgctcagagatttttgggggactggacatctgcgcagtggaagcgctacatggcaaggacggaagggatcacatcattgaggtggtgggttcctccatgccgctcattggtgaccaccaggatgaagacaaacagctcatcgtagagctcgtggtcaacaagatggctcaggccctgccccggcagcgacagcgcggatgcctcccctggcaggggctcccatggccagactccgtccccaggggccctgcccttgggccgccagacctcccagcagcccgcagggcccccggctcagcagcgacccccaccacagggcggccctccacagccgggtccaggcccccagcgccagggacccccattgcagcagcgcccgcccccgcagggccagcagcacctttcaggccttggacccccagctggcagccccctgccccagcgccttccaagtcccacctcagcgccccagcagcccgcgtcccaggccgcgccgccgacccagggtcaaggccgccaatcccggccagtggcgggaggccccggggcgcctccagcagcccgcccgcccgcctctccgtctccccagcgccaggcgggccccccacaggctacccgtcagacatccgtctctggcccggctccgccaaaggcctctggggccccaccgggcgggcagcagcgccagggcccgccccagaaacccccaggcccagccggccccacacgccaggccagccaggcgggtcccgtgccccgcactgggccacccaccacgcagcagcctcggcccagcggcccgggccccgctggacgtcccaaaccacagctggcccagaaacccagccaggacgtgccgccacccgccaccgccgctgcagggggacctccgcacccccagctcaaagccagccccgcccaggcccagccttagccaggacgaggtgaaagctgagaccatccgcagcctgaggaagtctttcgccagcctcttctccgactgataccccactctgagaaccccaaaatccctgggcaacccttctctgggccctgaatccatttctcacttttggagtctccaaatcccttgagaacccatctcccggttctccaagattccacctctcattcctcaagatccccgagtaccttgagaaacctgactcctcctggccctaaatccggttctcacatgtggaatccccaagtccttttagaaccccactcgtggtcacttcaggatctacttctgttttagaacctccacattcctgaagacctccgcccctggtttccccagagggcgttttccttcctggaagtgcccaaataccaggcaacccattgcagaatcccttcctggagccctgaagttcctggaaaaccctatttttggtcccaaatctctccagcacacctatttcccatcataattttccaaatcctcaagaaacccctactgttgagccccttcccatggatcttccatccctctgaagatccacatcttcaaatgccacccaacacctagccccacaaggatttcccttcaccagctcccctcaacctcattcaataccttgggagcccctcccacttccaggacccctcggttcccccagggaccccctccccagtttcctgcctctgacagctgtctttaaatatgcaaactccacccatcttcccagaatcctttgcacacggaaggccagtggtctccgcttccccacctttgctgtggtgtctgtgtctgtgactgacgtggcctccttttgtgccgtgcttggcatatgtggtcctcgttcatcgtgccgcctgtggtgatgcgtgcagtgacgctgtttatgtggtccgcacctccccctgaccttcactccttgcctggactcaccccacccctcagcggctctgaaccccaagagaagagtcgggaaacaaaataaacaagcaaaggcccagca

SEQ ID NO: 357438 - DNA, 1830 bp, Homo sapiens
ctcctccagggcctcccaggcacctggctgacccaccctctgcaacttcctgcccagcccagagccttccctgccaaactcgcccccccgccaccaacccatccctaaaactcctggcccgagtcctagtcctcctatcatctggctcttcccactccatcctcatacttttcctcctccttcacatccttctggcccatctcagtctccccgcgaatcatcacccatctgccttttctggtccattccaactcccatcccagctcagacgtcctccctgccccacccagctgctctgccttaggctgacttgcccaacagcctgtccttggtccaagccctttctatgccctcctagacacctcacccttagattggaaacttccctgctcatcttcccctttgtatcaaactagccaagaattcacagagaaggttctgcccaggactcttgccacgaatcccacacttcaccctggatccaagtcctcccagcctgtcccagatctcgcctccctggcccaggactccacccactccacctgagtgctcccagccttgagaacctgttagggtccaggcccatggtggcaggtggggaggtcacaggcacagccccaggatcagaggggcagggctggggctgggcctggggtaacgttgtgtttctctccccttcctccccttcctcttcccccttcctcccaggcctccaccttgtctctctctagcaaatcccagtctctgaccaatgccttcaaccttccagagccagccccgcccaggcccagccttagccaggacgaggtgaaagctgagaccatccgcagcctgaggaagtctttcgccagcctcttctccgactgataccccactctgagaaccccaaaatccctgggcaacccttctctgggccctgaatccatttctcacttttggagtctccaaatcccttgagaacccatctcccggttctccaagattccacctctcattcctcaagatccccgagtaccttgagaaacctgactcctcctggccctaaatccggttctcacatgtggaatccccaagtccttttagaaccccactcgtggtcacttcaggatctacttctgttttagaacctccacattcctgaagacctccgcccctggtttccccagagggcgttttccttcctggaagtgcccaaataccaggcaacccattgcagaatcccttcctggagccctgaagttcctggaaaaccctatttttggtcccaaatctctccagcacacctatttcccatcataattttccaaatcctcaagaaacccctactgttgagccccttcccatggatcttccatccctctgaagatccacatcttcaaatgccacccaacacctagccccacaaggatttcccttcaccagctcccctcaacctcattcaataccttgggagcccctcccacttccaggacccctcggttcccccagggaccccctccccagtttcctgcctctgacagctgtctttaaatatgcaaactccacccatcttcccagaatcctttgcacacggaaggccagtggtctccgcttccccacctttgctgtggtgtctgtgtctgtgactgacgtggcctccttttgtgccgtgcttggcatatgtggtcctcgttcatcgtgccgcctgtggtgatgcgtgcagtgacgctgtttatgtggtccgcacctccccctgaccttcactccttgcctggactcaccccacccctcagcggctctgaaccccaagagaagagtcgggaaacaaaataaacaagcaaaggcccagca

SEQ ID NO: 357439 - DNA, 3183 bp, Homo sapiens
cacgggcgcgaccatctgcgctgcggcgccggcgactcagcgctgcctcagtctgcggtgggcagcggaggagtcgtgtcgtgcctgagagcgcagctgtgctcctgggcaccgcgcagtccgcccccgcggctcctggccagaccacccctaggaccccctgccccaagtcgcagccatgaactacctgcggcgccgcctgtcggacagcaactttatggccaatctgccaaatgggtacatgacagacctgcagcgtccgcagccgcccccaccgccgcccggtgcccacagccccggagccacgcccggtcccgggaccgccactgccgagaggtcctccggggtcgccccagcggcctctccggccgcccctagccccgggtcctcggggggcggtggcttcttctcgtcgctgtccaacgcggtcaagcagaccacggcggcggcagctgccaccttcagcgagcaggtgggcggcggctctgggggcgcaggccgcgggggagccgcctccagggtgctgctggtcatcgacgagccgcacaccgactgggcaaaatacttcaaagggaaaaagatccatggagaaattgacattaaagtagaacaggccgaattctctgatctcaaccttgtggcccatgccaatggtggattctctgtggatatggaagttcttcggaacggggtgaaggtcgtgcggtctctgaagccggattttgtgctgatccgccagcacgccttcagcatggcacgcaacggagactaccgcagtttggtcattgggctgcagtatgctggaatccccagtgttaactccttgcattctgtctacaacttctgtgacaagccctgggtgtttgcccagatggttcgactgcataagaaactggggacagaagaattccctctaattgatcagaccttctaccccaatcacaaagaaatgctcagcagtacaacgtaccccgtggttgtgaagatggggcacgcacactctgggatgggcaaggtcaaggttgacaaccagcatgacttccaggacatcgcaagtgtcgtcgcactgaccaagacgtatgccactgccgagcccttcatcgatgccaaatatgacgtgcgtgtccagaagattgggcagaactacaaggcctacatgaggacgtcagtgtcagggaactggaagaccaatactggctctgcgatcctggagcaaattgccatgtctgacagatacaagctgtgggtggacacgtgctcagagatttttgggggactggacatctgcgcagtggaagcgctacatggcaaggacggaagggatcacatcattgaggtggtgggttcctccatgccgctcattggtgaccaccaggatgaagacaaacagctcatcgtagagctcgtggtcaacaagatggctcaggccctgccccggcagcgacagcgcggatgcctcccctggcaggggctcccatggccagactccgtccccaggggccctgcccttgggccgccagacctcccagcagcccgcagggcccccggctcagcagcgacccccaccacagggcggccctccacagccgggtccaggcccccagcgccagggacccccattgcagcagcgcccgcccccgcagggccagcagcacctttcaggccttggacccccagctggcagccccctgccccagcgccttccaagtcccacctcagcgccccagcagcccgcgtcccaggccgcgccgccgacccagggtcaaggccgccaatcccggccagtggcgggaggccccggggcgcctccagcagcccgcccgcccgcctctccgtctccccagcgccaggcgggccccccacaggctacccgtcagacatccgtctctggcccggctccgccaaaggcctctggggccccaccgggcgggcagcagcgccagggcccgccccagaaacccccaggcccagccggccccacacgccaggccagccaggcgggtcccgtgccccgcactgggccacccaccacgcagcagcctcggcccagcggcccgggccccgctggacgtcccaaaccacagctggcccagaaacccagccaggacgtgccgccacccgccaccgccgctgcagggggacctccgcacccccagctcaacaaatcccagtctctgaccaatgccttcaaccttccagagccagccccgcccaggcccagccttagccaggacgaggtgaaagctgagaccatccgcagcctgaggaagtctttcgccagcctcttctccgactgataccccactctgagaaccccaaaatccctgggcaacccttctctgggccctgaatccatttctcacttttggagtctccaaatcccttgagaacccatctcccggttctccaagattccacctctcattcctcaagatccccgagtaccttgagaaacctgactcctcctggccctaaatccggttctcacatgtggaatccccaagtccttttagaaccccactcgtggtcacttcaggatctacttctgttttagaacctccacattcctgaagacctccgcccctggtttccccagagggcgttttccttcctggaagtgcccaaataccaggcaacccattgcagaatcccttcctggagccctgaagttcctggaaaaccctatttttggtcccaaatctctccagcacacctatttcccatcataattttccaaatcctcaagaaacccctactgttgagccccttcccatggatcttccatccctctgaagatccacatcttcaaatgccacccaacacctagccccacaaggatttcccttcaccagctcccctcaacctcattcaataccttgggagcccctcccacttccaggacccctcggttcccccagggaccccctccccagtttcctgcctctgacagctgtctttaaatatgcaaactccacccatcttcccagaatccttttgtgccgtgcttggcatatgtggtcctcgttcatcgtgccgcctgtggtgatgcgtgcagtgacgctgtttatgtggtccgcacctccccctgaccttcactccttgcctggactcaccccacccctcagcggctctgaaccccaagagaagagtcgggaaacaaaataaacaagcaaaggcccagca

SEQ ID NO: 357440 - DNA, 3222 bp, Homo sapiens
cacgggcgcgaccatctgcgctgcggcgccggcgactcagcgctgcctcagtctgcggtgggcagcggaggagtcgtgtcgtgcctgagagcgcagctgtgctcctgggcaccgcgcagtccgcccccgcggctcctggccagaccacccctaggaccccctgccccaagtcgcagccatgaactacctgcggcgccgcctgtcggacagcaactttatggccaatctgccaaatgggtacatgacagacctgcagcgtccgcagccgcccccaccgccgcccggtgcccacagccccggagccacgcccggtcccgggaccgccactgccgagaggtcctccggggtcgccccagcggcctctccggccgcccctagccccgggtcctcggggggcggtggcttcttctcgtcgctgtccaacgcggtcaagcagaccacggcggcggcagctgccaccttcagcgagcaggtgggcggcggctctgggggcgcaggccgcgggggagccgcctccagggtgctgctggtcatcgacgagccgcacaccgactgggcaaaatacttcaaagggaaaaagatccatggagaaattgacattaaagtagaacaggccgaattctctgatctcaaccttgtggcccatgccaatggtggattctctgtggatatggaagttcttcggaacggggtgaaggtcgtgcggtctctgaagccggattttgtgctgatccgccagcacgccttcagcatggcacgcaacggagactaccgcagtttggtcattgggctgcagtatgctggaatccccagtgttaactccttgcattctgtctacaacttctgtgacaagccctgggtgtttgcccagatggttcgactgcataagaaactggggacagaagaattccctctaattgatcagaccttctaccccaatcacaaagaaatgctcagcagtacaacgtaccccgtggttgtgaagatggggcacgcacactctgggatgggcaaggtcaaggttgacaaccagcatgacttccaggacatcgcaagtgtcgtcgcactgaccaagacgtatgccactgccgagcccttcatcgatgccaaatatgacgtgcgtgtccagaagattgggcagaactacaaggcctacatgaggacgtcagtgtcagggaactggaagaccaatactggctctgcgatcctggagcaaattgccatgtctgacagatacaagctgtgggtggacacgtgctcagagatttttgggggactggacatctgcgcagtggaagcgctacatggcaaggacggaagggatcacatcattgaggtggtgggttcctccatgccgctcattggtgaccaccaggatgaagacaaacagctcatcgtagagctcgtggtcaacaagatggctcaggccctgccccggcagcgacagcgcggatgcctcccctggcaggggctcccatggccagactccgtccccaggggccctgcccttgggccgccagacctcccagcagcccgcagggcccccggctcagcagcgacccccaccacagggcggccctccacagccgggtccaggcccccagcgccagggacccccattgcagcagcgcccgcccccgcagggccagcagcacctttcaggccttggacccccagctggcagccccctgccccagcgccttccaagtcccacctcagcgccccagcagcccgcgtcccaggccgcgccgccgacccagggtcaaggccgccaatcccggccagtggcgggaggccccggggcgcctccagcagcccgcccgcccgcctctccgtctccccagcgccaggcgggccccccacaggctacccgtcagacatccgtctctggcccggctccgccaaaggcctctggggccccaccgggcgggcagcagcgccagggcccgccccagaaacccccaggcccagccggccccacacgccaggccagccaggcgggtcccgtgccccgcactgggccacccaccacgcagcagcctcggcccagcggcccgggccccgctggacgtcccaaaccacagctggcccagaaacccagccaggacgtgccgccacccgccaccgccgctgcagggggacctccgcacccccagctcaaagccagccccgcccaggcccagccttagccaggacgaggtgaaagctgagaccatccgcagcctgaggaagtctttcgccagcctcttctccgactgataccccactctgagaaccccaaaatccctgggcaacccttctctgggccctgaatccatttctcacttttggagtctccaaatcccttgagaacccatctcccggttctccaagattccacctctcattcctcaagatccccgagtaccttgagaaacctgactcctcctggccctaaatccggttctcacatgtggaatccccaagtccttttagaaccccactcgtggtcacttcaggatctacttctgttttagaacctccacattcctgaagacctccgcccctggtttccccagagggcgttttccttcctggaagtgcccaaataccaggcaacccattgcagaatcccttcctggagccctgaagttcctggaaaaccctatttttggtcccaaatctctccagcacacctatttcccatcataattttccaaatcctcaagaaacccctactgttgagccccttcccatggatcttccatccctctgaagatccacatcttcaaatgccacccaacacctagccccacaaggatttcccttcaccagctcccctcaacctcattcaataccttgggagcccctcccacttccaggacccctcggttcccccagggaccccctccccagtttcctgcctctgacagctgtctttaaatatgcaaactccacccatcttcccagaatcctttgcacacggaaggccagtggtctccgcttccccacctttgctgtggtgtctgtgtctgtgactgacgtggcctccttttgtgccgtgcttggcatatgtggtcctcgttcatcgtgccgcctgtggtgatgcgtgcagtgacgctgtttatgtggtccgcacctccccctgaccttcactccttgcctggactcaccccacccctcagcggctctgaaccccaagagaagagtcgggaaacaaaataaacaagcaaaggcccagca

SEQ ID NO: 357441 - DNA, 2701 bp, Homo sapiens
ttctggacacgcacgtcatatttggcatcgatgaagggctcggcagtggcatacgtcttggtcagtgccacgacacttgcgatgtcctggaagtcatgctggttgtcaaccttgaccttgcccatgccaatggtggattctctgtggatatggaagttcttcggaacggggtgaaggtcgtgcggtctctgaagccggattttgtgctgatccgccagcacgccttcagcatggcacgcaacggagactaccgcagtttggtcattgggctgcagtatgctggaatccccagtgttaactccttgcattctgtctacaacttctgtgacaagccctgggtgtttgcccagatggttcgactgcataagaaactggggacagaagaattccctctaattgatcagaccttctaccccaatcacaaagaaatgctcagcagtacaacgtaccccgtggttgtgaagatggggcacgcacactctgggatgggcaaggtcaaggttgacaaccagcatgacttccaggacatcgcaagtgtcgtcgcactgaccaagacgtatgccactgccgagcccttcatcgatgccaaatatgacgtgcgtgtccagaagattgggcagaactacaaggcctacatgaggacgtcagtgtcagggaactggaagaccaatactggctctgcgatcctggagcaaattgccatgtctgacagatacaagctgtgggtggacacgtgctcagagatttttgggggactggacatctgcgcagtggaagcgctacatggcaaggacggaagggatcacatcattgaggtggtgggttcctccatgccgctcattggtgaccaccaggatgaagacaaacagctcatcgtagagctcgtggtcaacaagatggctcaggccctgccccggcagcgacagcgcggatgcctcccctggcaggggctcccatggccagactccgtccccaggggccctgcccttgggccgccagacctcccagcagcccgcagggcccccggctcagcagcgacccccaccacagggcggccctccacagccgggtccaggcccccagcgccagggacccccattgcagcagcgcccgcccccgcagggccagcagcacctttcaggccttggacccccagctggcagccccctgccccagcgccttccaagtcccacctcagcgccccagcagcccgcgtcccaggccgcgccgccgacccagggtcaaggccgccaatcccggccagtggcgggaggccccggggcgcctccagcagcccgcccgcccgcctctccgtctccccagcgccaggcgggccccccacaggctacccgtcagacatccgtctctggcccggctccgccaaaggcctctggggccccaccgggcgggcagcagcgccagggcccgccccagaaacccccaggcccagccggccccacacgccaggccagccaggcgggtcccgtgccccgcactgggccacccaccacgcagcagcctcggcccagcggcccgggccccgctggacgtcccaaaccacagctggcccagaaacccagccaggacgtgccgccacccgccaccgccgctgcagggggacctccgcacccccagctcaaagccagccccgcccaggcccagccttagccaggacgaggtgaaagctgagaccatccgcagcctgaggaagtctttcgccagcctcttctccgactgataccccactctgagaaccccaaaatccctgggcaacccttctctgggccctgaatccatttctcacttttggagtctccaaatcccttgagaacccatctcccggttctccaagattccacctctcattcctcaagatccccgagtaccttgagaaacctgactcctcctggccctaaatccggttctcacatgtggaatccccaagtccttttagaaccccactcgtggtcacttcaggatctacttctgttttagaacctccacattcctgaagacctccgcccctggtttccccagagggcgttttccttcctggaagtgcccaaataccaggcaacccattgcagaatcccttcctggagccctgaagttcctggaaaaccctatttttggtcccaaatctctccagcacacctatttcccatcataattttccaaatcctcaagaaacccctactgttgagccccttcccatggatcttccatccctctgaagatccacatcttcaaatgccacccaacacctagccccacaaggatttcccttcaccagctcccctcaacctcattcaataccttgggagcccctcccacttccaggacccctcggttcccccagggaccccctccccagtttcctgcctctgacagctgtctttaaatatgcaaactccacccatcttcccagaatcctttgcacacggaaggccagtggtctccgcttccccacctttgctgtggtgtctgtgtctgtgactgacgtggcctccttttgtgccgtgcttggcatatgtggtcctcgttcatcgtgccgcctgtggtgatgcgtgcagtgacgctgtttatgtggtccgcacctccccctgaccttcactccttgcctggactcaccccacccctcagcggctctgaaccccaagagaagagtcgggaaacaaaataaacaagcaaaggcccagca

SEQ ID NO: 357442 - DNA, 407 bp, Homo sapiens
ggcgccagcccttccgccacggccgtctctggagagcagcagccatggccctacgctaccctatggccgtgggcctcaacaagggccacaaagtgaccaagaacgtgagcaagcccaggcacagccgacgccgcgggcgtctgaccaaacacaccaagttcgtgcgggacatgattcgggaggtgtgtggctttgccccgtacgagcggcgcgccatggagttactgaaggtctccaaggacaaacgggccctcaaatttatcaagaaaagggtggggacgcacatccgcgccaagaggaagcgggaggagctgagcaacgtactggccgccatgaggaaagctgctgccaagaaagactgagcccctcccctgccctctccctgaaataaagaacagcttgacaga

SEQ ID NO: 357443 - DNA, 14790 bp, Homo sapiens
tcttggagcgttctcagtttctcaacagatcttcacttgctaggcagccagaagccggcggcagtggcggcaccgcctcctcctcacattcccggggtggcggggttagatgagcggccccagtcgcggcgccgggggcgctgttcatgccggttcccgacggctccgtggctgctgcggggctggggctggggctacccgccgcggactccccgggtcactaccagctgctgctgtcaggccgggccctggccgaccgctaccggaggatttataccgctgcgctcaatgacagggaccaggggggcggcagcgctggacacccagcctccaggaataagaaaattttaaataagaagaaattgaaaagaaaacagaagagcaaatcaaaagtgaagacaagaagcaagtctgaaaacttagagaatacagtaatcataccagatatcaaactacatagcaatccttctgctttcaatatttactgtaatgtacgccattgcgttctggaatggcagaaaaaggaaatatcattggcagccgcatctaagaactctgtgcagagtggagaatcagatagtgatgaagaagaggaatccaaagagccccctatcaagcttccaaagattattgaggttggcctttgtgaagtttttgaattgatcaaagagacacgattttctcatccatccctgtgtctcaggagtctccaagccctgctcaacgtgctgcagggccagcagccagaagtgctccagtctgagccacctgaggtcctagagtctctcttccagcttcttttggaaatcaccgttcgaagtactgggatgaatgacagcacaggacagtccttaacagcactttcctgtgcttgcctctttagtctggtggcttcttggggagaaacaggaaggacacttcaggccatctctgctatcctcaccaacaatggaagccatgcttgccaaactattcaggtgccaacaattctaaattcgctacagagaagtgtacaagcagttttggtgggaaaaattcaaattcaggactggtttagtaatggcattaagaaagcagctttaatgcacaagtggccattaaaagaaatatctgttgatgaagatgaccaatgtctacttcagaatgatggattttttctttatctattatgcaaggatggattatataaaataggctctggatacagtggaacagttaggggccatatatacaattctacatcccgtattagaaacagaaaagaaaaaaagtcttggttagggtatgctcagggttatttattatatagagatgtgaataaccacagcatgacagccataaggataagccctgaaacactggagcaagatggtactgtgatgttaccagattgccacactgaaggtcaaaatattttattcactgatggagaatatattaatcagatagctgcttcaagagatgatggctttgttgtcagaatatttgccacaagcactgaacctgttctacagcaagaattgcaacttaaactggctagaaaatgcttacatgcctgtggtatctcactattcgatctggaaaaggacttgcatattataagtacaggatttgatgaggagtcagcaattcttggtgcaggacgagagtttgcgctaatgaaaacagcaaatggaaagatatattacactggcaaataccagagtcttggaatcaaacaaggtggtccttcagcaggaaaatgggttgagctaccaattacaaaatctccaaagatagtacacttctcagttggacacgatggctctcacgcccttttagttgcagaagatgggagcatattctttacaggatctgctagtaaaggagaagatggagaatcaattaagagcagacggcaatccaaaccttataaacctaaaaagataattaagatggaaggaaagattgtggtatatacagcctgcaataatggaagtagttctgttatttctaaagatggagaactctacatgtttggaaaagatgccatttactctgatagttcaagtttggtaactgatttgaagggccattttgtaactcaggtagctatgggcaaagctcacacttgtgttttaatgaagaatggagaggtgtggacatttggtgtaaataataaaggacagtgtggacgagatactggtgccatgaaccaaggtgggaaagggtttggagttgaaaatatggcaacagcaatggatgaagacctggaagaagaactagatgaaaaagatgagaagtctatgatgtgccctccaggcatgcacaaatggaagctggagcagtgcatggtttgcactgtctgtggagactgtacaggttatggagccagctgtgtcagtagtggacggccagacagagtccccggagggatctgtggttgtggttccggagaatctggttgtgctgtgtgtggatgttgcaaggcctgtgcaagagagttagatggtcaagaggcaagacaaagaggaattcttgatgcagtgaaagaaatgatacctttagatcttcttttagctgtcccagtgcccggggttaacattgaagaacaccttcagttacgacaagaagaaaaacggcaacgtgtaatcagaaggcacagattagaggaaggaagaggcccccttgtatttgctggtcctatttttatgaaccatcgagaacaggctctagccagactcagatcccatccagcacacgtaaagcataaacgggacaagcacaaagatggaagtggagaaagaggcgaaaaggatgcaagcaaaatcacaacataccctccaggctctgtgcgatttgactgtgagctccgggcagtccaagtcagctgtggatttcaccattcagtggttttaatggaaaatggagatgtctatacatttggttatgggcagcatgggcagctaggacatggagatgtcaactccaggggatgtcccactcttgttcaagcattgccaggccctagcacacaagtcactgcaggcagcaaccatacggcagtacttttaatggatggacaggtcttcacatttggaagtttttctaaaggacaactgggcagaccaattttggatgtgccatattggaatgcaaagccagctcccatgcctaacattggatcaaaatatggaagaaaagctacttggataggtgcaagtggggaccaaacttttttacgaattgatgaagcacttattaattctcatgtacttgctacatcagaaatttttgccagtaaacacataataggcttggtacctgcttctatatcagaacctcctccatttaaatgccttctgataaataaagtggatgggagttgtaaaacttttaatgactcagaacaagaggatctgcaaggatttggtgtgtgtcttgatcctgtatatgatgtaatttggaggtttcgaccaaatactagagagctgtggtgttacaatgcggtggttgctgatgccaggcttccctctgcagcagacatgcagtccagatgtagtatcctaagtcctgaacttgccttaccaacaggatcaagggccctcactacccgatctcatgcagctttgcacattttaggttgtcttgataccttggcagctatgcaggacttaaaaatgggtgttgcaagtacagaggaagagactcaagcagtaatgaaggtttattctaaagaagattatagtgtggtaaacaggtttgaaagtcatggaggaggctggggttattctgcccattcagtagaagctatacgtttcagtgccgacactgatattttacttggtggtcttggtctgtttggaggtagaggagaatatactgctaaaattaagctgtttgaattgggtcctgatggaggagatcatgaaactgatggtgaccttcttgcagagactgatgtattggcttatgactgtgctgctagagaaaaatatgcaatgatgtttgatgagcctgttctcctgcaagctgggtggtggtatgtggcatgggcccgagtgtcaggacccagcagtgactgtggatctcatggacaggcatctattaccacagatgatggggttgttttccagttcaagagttcaaagaaatcaaataatggtacagatgttaatgcgggtcagatacctcagttattatacagacttccaaccagtgatggcagtgcttcaaaaggcaaacagcaaaccagtgaacctgtacacattttaaagaggtcttttgcaagaactgtctcagtggaatgttttgagtcattgttgagtattcttcactggagctggaccaccttagtcttaggagttgaagaacttagaggattaaaaggattccagttcacagctacactcctagatttagagagactgcgctttgtgggtacctgttgtctgaggttattgcgtgtctatacctgtgaaatttacccagtgtcagctacaggaaaagcagttgtagaagaaactagcaaattagcagagtgtattggaaaaaccagaactttgttaagaaaaattttatcagaaccacttgatcactgcatggtgaaattggataatgatcctcaaggatatctcagtcaacccttgagtcttctagaagctgtccttcaggaatgtcataatactttcactgcctgctttcattctttctacccaactcctgccttacagtgggcttgcctttgtgatctgctgaattgtttggatcaggatatccaagaagcaaacttcaagacatcaagtagccgactccttgcagctgttatgtcagctctgtgtcacacgtctgttaagctgacttccatcttcccgattgcgtatgatggagaagtattactacgatcaattgttaaacaagttagtacagagaacgactcaacactagttcatcgttttccccttttggtggcacatatggaaaaactcagccagagtgaagagaatatctcagggatgacaagcttccgtgaagttctggagaaaatgctggtcattgttgtgctaccagtcaggaacagcctgaggagagaaaatgaactcttctcctcccacctcgtctctaacacctgtggattactggccagcattgtcagtgaactgacagcgtcagccctgggatctgaggttgatggacttaattctcttcactctgtaaaagctagtgctaaccgatttacaaaaacaagtcagggcagaagttggaacactgggaacgggtcccctgatgcaatctgtttttcagtagacaaacctggaatagttgtggttggtttctctgtctatggaggaggtggaattcatgaatatgaattagaggtgttggttgatgatagtgaacatgcaggagattcaactcattcccacagatggacatctctggaattagtgaaaggaacgtacacaacggatgactcacccagtgatatagctgagatcagacttgacaaagtggttcctttaaaggaaaatgttaaatatgctgtgcgcttgaggaactatggaagccgtacagccaatggagatggaggaatgaccacagttcagtgccctgatggtgtgacattcacattcagcacgtgcagcttgagcagtaacggcacaaaccaaaccagaggacagatcccacagatactctactataggagtgaatttgatggagatttacaatcccaacttctgagtaaagccaatgaagaagataaaaactgtagcagagcattgtctgttgtaagcactgtcgttcgagcctctaaggacctcctgcacagagctcttgctgtggatgctgatgacattccagaactgctgagttcttccagtctgttttccatgctgctcccccttattatagcctacataggaccagtagctgctgctattcccaaggtggctgtagaagtctttggccttgtccaacaattgcttccgtcagttgccattttgaatcagaagtatgcaccgcctgccttcaaccctaatcagtcgacagatagcaccacaggaaaccagcctgaacagggcctctctgcttgtacaacctccagtcactatgctgtcatagagagtgagcacccgtataaacctgcctgtgtgatgcattacaaggtgacattcccagaatgtgtgaggtggatgacaatcgaatttgaccctcagtgtggtactgcacagtcagaagatgtccttcgtttgttgattcctgtcagaactgttcagaattcaggatatggaccaaaattgacatctgttcatgaaaatcttaattcatggatagaattaaagaaattttcaggatcctctgggtggcctactatggttttggtgttgccaggaaatgaggcccttttttcattggagactgcatcagattatgtgaaagatgacaaagcttctttctatggttttaagtgttttgcaattggatatgaatttagccctggacctgatgagggagtcatccaattggaaaaagaattagccaatcttggtggggtttgtgcagcagctctgatgaagaaggacctagcacttcctattggtaatgaattagaagaagaccttgaaattcttgaggaggctgcattgcaggtgtgcaaaacccattctggaattcttggaaagggtctagctctttctcattcaccaactatattagaagcacttgagggaaatttaccactccaaatccaaagcaatgaacagtcttttctggatgattttattgcctgtgtcccaggatcaagtggtggaaggcttgcaaggtggcttcagccagattcatatgcggatcctcagaaaacatctttgatcctgaataaggatgatattcgttgtggttggcctaccaccataactgttcaaacaaaagaccagtatggggatgtggtacatgttcccaatatgaaggtggaagtgaaagctgtccctgtttctcagaaaaaaatgtctttacaacaagatcaagcaaagaaacctcaaaggattcctggcagtcctgcagtaacagctgcatcttctaatactgacatgacttatggagggctggcatcaccaaagctagatgtttcatatgaaccaatgatagtgaaggaagctcgatatattgccataacaatgatgaaggtttatgaaaattattcatttgaagaactacgttttgcatcaccaactcctaagagacccagtgagaatatgctgatccgtgtcaataatgatgggacttattgtgcaaattggactccaggggctattggactctacactcttcatgttaccattgatggcattgaaatcgatgctggtctggaagtaaaagtaaaagacccaccaaaagggatgataccaccaggaactcagttggtcaaaccaaagtctgaacctcagcctaataaggttcgaaaatttgtggccaaggacagtgcggggcttcgcatccgtagccacccttcccttcagagtgagcagataggcatagtgaaagtcaatggaactatcacttttattgatgagatccataatgatgatggtgtgtggctgaggctgaatgatgagacaataaagaagtatgtccctaacatgaatggttacactgaagcctggtgcctctcttttaatcaacatcttggcaagagtcttctggtccctgttgacgaatctaaaactaatactgatgactttttcaaagacataaactcctgctgcccacaggaagcaacaatgcaagaacaagatatgccattcttgcgaggagggccaggcatgtacaaggtagtgaagacgggaccttcaggtcacaacatcagaagctgccctaaccttagaggtatcccaattggaatgttagttctgggaaacaaagtcaaagcagtgggagaggtaaccaattctgaagggacatgggtgcaactggatcagaacagcatggtagagttctgtgagagtgatgaaggagaggcatggtccttagctagagacagaggcggaaaccagtacctccgacatgaagatgaacaagctcttctggatcagaattctcaaactcctcctccaagccctttctcagtgcaagcttttaataaaggggcaagttgcagtgcccaaggatttgattatggactcggaaatagcaaaggtgatcgaggaaacatctcaacatcttctaaaccagcctctacatcaggaaaatcagagctgtcctctaaacacagcagatcgcttaaacctgatggacgtatgagccggactactgctgatcagaagaagccaaggggcacagaaagtttatctgctagtgaatccctcatcttaaaatctgatgctgcaaagttgaggtcagattcccacagtaggtcattatcccccaaccataacaccttgcagacattgaaatctgatgggaggatgccttctagctccagagctgaatccccaggaccaggttctcggttgtcatctcctaagccaaagactctcccagccaataggtctagcccatcgggtgctagttctccacgctcctcctcaccacatgataaaaatctacctcaaaaaagtactgctcctgttaagacaaagcttgatcctcctcgggaacgttctaaatcagactcttacacacttgatccagataccctccgcaagaagaaaatgcccctcacagaacctttgagaggacggtcaacgtcaccaaaaccaaaatcagtaccaaaggattctacagattcccctggatctgaaaatagagctccctctccccatgtggtacaggaaaacctccacagtgaggtggtcgaagtctgcacctcaagtactttaaaaacaaatagtctaacagacagcacctgcgatgacagcagtgaatttaagagtgtggatgaaggttcaaataaagttcattttagcattggaaaagcaccactgaaagatgaacaggaaatgagagcatctcccaaaataagtcgaaaatgtgctaatagacacaccaggcccaaaaaagaaaaatcgagttttcttttcaaaggagatggatccaagcctttagagccagccaagcaagccatgtctccttctgtggccgaatgtgccagagctgtgtttgcttccttcctctggcatgaaggcatagtacatgatgcaatggcttgttcttctttcctaaagtttcatcctgaactttccaaagaacatgctcctataaggagtagtttaaatagccaacaacctacagaggaaaaagaaaccaagttaaaaaatagacattcattagaaatatcatctgcactgaatatgtttaatattgcaccccatggaccagatatatctaagatgggtagcatcaacaaaaacaaggtattgtctatgcttaaggaaccacctctgcatgaaaaatgtgaggatgggaaaaccgagaccacttttgaaatgtccatgcataacacaatgaagtctaagtctcctcttcccttaactttacaacatttagtggctttttgggaagacatctctttggctactatcaaagctgcttcccagaatatgatttttccaagtcctggttcctgtgcagttcttaaaaagaaagagtgtgagaaagagaataagaagtccaaaaaggaaaaaaagaaaaaagaaaaggcagaagttaggcccaggggtaatttgtttggagagatggcccagctggcagtaggaggaccagagaaagataccatctgtgaactgtgtggggagtcacatccatacccggtgacctatcacatgagacaagctcacccaggttgtggccgatatgctggtggacaaggttacaatagcattgggcatttttgtggaggatgggctggtaactgtggtgatggtggcataggaggaagcacttggtatctggtatgtgatcgctgtagagaaaaatacctccgcgaaaaacaggctgctgcaagggagaaggtcaaacaatctaggagaaaaccaatgcaagtcaagacccctcgtgccttgcccaccatggaagctcaccaggtgattaaagccaatgcactcttcctgctgtccctgagcagtgcagcagaaccgagcattctgtgttaccatcctgcaaagccattccaatctcagttgcccagtgtaaaagaaggcatttctgaggatcttcctgtgaaaatgccttgtctctacctgcagacattagctaggcatcatcatgaaaattttgtgggctatcaagatgacaatctattccaggatgaaatgagatatctacgttcaacatctgtacctgccccgtatatatcagtaactcctgatgcaagtcctaatgtatttgaagagccagagagcaatatgaagtctatgccaccaagtttagaaaccagtcccataactgatactgatcttgcaaagagaactgtcttccaaagatcatactcagttgttgcttccgaatatgataaacaacactccattttacctgcacgagttaaagctattcctagaagaagagttaacagtggagacactgaagttggttcttcccttttgagacatccgtctcctgagctttctcggctaatctcagcccacagctctctttctaaaggagaacgaaatttccagtggccagttttagcttttgttatacaacatcatgatctagaaggtcttgaaatagcaatgaaacaggccctaaggaaatctgcttgtcgagtttttgctatggaggctttcaactggcttctgtgtaatgtcatccaaaccacttctctccatgatattctgtggcattttgtggcatcactgactcctgcaccagtggaaccagaggaagaagaggatgaagaaaataaaacaagcaaagaaaattcagaacaagagaaagatacaagagtatgtgaacatccactctcagacatagtgattgccggggaagctgctcatcctttaccacacacctttcaccgcttgctgcagaccatctcagaccttatgatgtctctccccagcggcagttcattacagcaaatggccctgaggtgctggagtctcaaattcaagcaatctgatcaccagttccttcatcagagcaacgtctttcatcacattaacaatattttgtcaaagtcagatgatggcgatagtgaagagagttttagcatcagtatacagtctggctttgaagctatgagtcaggaattatgcatagtaatgtgcttaaaggacttaaccagcattgttgacataaaaacttcaagccgacctgccatgattggcagtttgacagacggctccacagaaaccttttgggaatcaggagatgaagataaaaacaaaactaagaacatcaccatcaactgtgtaaaaggaatcaatgcccgctatgtgtctgttcacgtggacaattcccgagatcttgggaataaagttacctcaatgaccttcttaactggcaaagcagtagaagatttgtgcagaataaagcaggttgatctggattccaggcacattggctgggtaacaagtgaacttccaggaggggataatcacatcataaaaattgaattaaaaggcccagaaaatacactgagagttcgacaagtcaaagtcctgggctggaaagatggtgaaagcacaaaaatagctggccagatttcagccagtgtggcccagcagaggaactgtgaagctgagactctgcgagtattcagactgattacgtctcaagtatttggaaagctcatctctggagatgctgaacctacaccagaacaagaggaaaaagcactattgtcatcacctgaaggagaagaaaaagtatacaatgcaacatcagatgctgacctgaaagaacatatggttggaatcatattcagcaggagtaagctgactaacttacaaaaacaggtgtgtgctcatattgtccaagctattcgcatggaagctaccagagtccgtgaagaatgggaacatgctatatcaagcaaagaaaatgccaattctcagccaaatgatgaagatgcctcctctgatgcctactgctttgagctgctctctatggttttagcactgagtggctctaacgttggccggcaatatctggctcaacagctaaccctgcttcaggatctcttctcgctgcttcacacagcctctcctagagtccagagacaggtaacctctttactaagaagagttttgcctgaagtaacccctagtcgtctggccagcatcataggagtgaaatccctccccccagcagatatcagtgatatcattcactcaacagagaaaggagactggaataagctgggtatcttggacatgtttctaggatgcattgccaaagcactcactgtacagctaaaagccaaaggaaccaccatcactggaacagctggtaccactgtgggcaaaggagttacaacagttactcttccgatgattttcaattccagttatctccgacgaggtgaaagtcattggtggatgaagggctcaacccctacccagatctcagagatcatcattaaacttatcaaggatatggcagcaggtcatctgtcagaagcttggtcccgagtgacaaaaaatgctattgcagaaaccatcattgccttgaccaagatggaagaagaatttaggtctccagtgagatgtattgcaacaactagactctggcttgctctcgcatccctatgtgttcttgatcaggaccacgtagatcgtctctcctcggggagatggatgggaaaggatggacaacaaaaacaaatgcctatgtgtgataaccatgatgatggtgaaactgcagcaatcattttatgcaatgtctgtggaaatttatgtacagactgtgacagattccttcaccttcatcgaagaaccaaaactcatcaaagacaggtcttcaaagaagaagaagaagctataaaggttgaccttcatgaaggttgtggtagaaccaaattgttctggttgatggcactggcagattctaaaacaatgaaggcaatggtggaattccgagaacacacaggcaaacccaccacgagtagctcagaagcatgtcgcttctgtggttccaggagtggaacagagttatctgctgttggcagtgtttgttctgatgcagattgccaggaatacgctaagatagcctgtagtaagacgcatccttgtggccatccatgcgggggtgttaaaaacgaagagcactgtctgccctgtctacacggctgtgacaaaagtgccacaagcctgaagcaagacgccgatgacatgtgcatgatatgtttcaccgaagcgctctcggcagcaccagccattcagctggattgtagtcacatattccacttacagtgctgtcggcgagtattagaaaatcgatggcttggcccaaggataacatttggatttatatcttgtcccatttgcaagaacaaaattaatcacatagtactaaaagacctacttgatccaataaaagaactctatgaggatgtcagaagaaaagccttaatgagattggaatatgaaggtctgcataagagtgaagctatcacaactcctggtgtgaggttttataatgacccagctggctatgcaatgaatagatatgcatattatgtgtgctacaaatgcagaaaggcatattttggtggtgaagctcgctgcgatgctgaggctggacggggagatgattatgatcccagagagctcatttgtggtgcctgttctgatgtttccagggctcagatgtgtcccaaacatggcacagactttttggaatataaatgtcgctactgctgttcagtggctgtttttttctgttttggaacaacacatttttgtaatgcttgtcatgatgattttcaaagaatgactagcattcctaaggaagaactaccacactgtcctgcaggtcccaaaggcaagcagttagaaggaactgaatgtccactccatgttgttcatccacccactggggaagagtttgctctgggatgtggagtgtgcagaaatgcccacactttttagaacacgcagatcctttgtctacagagagaaaaattgccttcatcccccaagaggatgcggtgaagtttaaactctgctcaggataaggacgggaccatttttacatccatgaaaatgaaccattcacagtgcaagaaggataccaaataccatgtacataattcttgctatgaaaagtttccccattattttggtttatcttcttttgaacaaatgacatcaaacttgtgaggtgtttgcatgtggccattaccgtcattggcctgtgaagcattggacatttatagataattgatataaaagaatcgccatgcccatggactaagaacgatgctggctttcaagcaaaaaagaaaaataatcattgtttattgtatactgcctttttgtaatcctgtacaattgcatcacgggtggggataaaaagaggaatattctggtttatttcctagactgttatttaaaaaaaaaaaaaacattgtgttaggacagcatataaatgtaataagtatcacactgtatataaacatatcaatgtttgtcctgtataagaattactaaattacaaatgcaatttcatttaaacttctaggttaagtttgagcctgaaattttaatgaagtgcaatactgagtgtgcctcattatcttgcagctgtaaacatattggaatgtacatgtcaataaaaccactgtacatttttatacagtgataaagtcta

SEQ ID NO: 357444 - DNA, 674 bp, Homo sapiens
cgactctagagatccccctcgcgaacgtgttatccttgtgccacaagcctgaagcaagacgccgatgacatgtgcatgatatgtttcaccgaagcgctctcggcagcaccagccattcagctggattgtagtcacatattccacttacagtgctgtcggcgagtattagaaaatcgatggcttggcccaaggataacatttggatttatatcttgtcccatttgcaagaacaaaattaatcacatagtactaaaagacctacttgatccaataaaagaactctatgaggatgtcagaagaaaagccttaatgagattggaatatgaaggtctgcataagagtgaagctatcacaactcctggtgtgaggttttataatgacccagctggctatgcaatgaatagatatgcatattatgtgtgctacaaatgcagaaaggcatattttggtggtgaagctcgctgcgatgctgaggctggacggggagatgattatgatcccagagagctcatttgtggtgcctgttctgatgtttccagggctcagatgtgtcccaaacatggcacagactttttggaatataaatgtcgctactgctgttcagtggctgtttttttctgttttggataacacgttcgcgagggtacacgagctcgattcgtatctgtctactc

SEQ ID NO: 357445 - DNA, 649 bp, Homo sapiens
tattgtttttcgcctcactccagcatgagaaagaaaagagaggctggccgcatcagtttttatttttatttttgtacttcaaaaagtgataagttcacgtaaactacatgccattattattcataatgataattgcattttctatacaatcgatatcatttccatttttattataaaacagcagactggtttctgtcataaaacaaatctggcttgtattagaacaaatacatcctcatttaaagaattttaaggtttctttcttgcattgagtatcttaagctttataacaacgtctggctcttaattttagtaaatggcatgacacactatatccatggagagcttctgacaaaaacttacttatcagacagaatttcttcggtgtgttgtttactcagatggcttcagtttctctttagtaaaataatatttccatgttggtgctagagtacagaaaaatgttgttactgtgcacgcatcttctgcagatgatatcctgttccctttctttgttgatatttttctttcttaaactttgttgctcagaatatctttaatgctagccaaggagtcagggatttggacgtattttcatggacttccaaagcttttttcccccaggtgagttaactttaatctttattaa

SEQ ID NO: 357446 - DNA, 15122 bp, Homo sapiens
tcttggagcgttctcagtttctcaacagatcttcacttgctaggcagccagaagccggcggcagtggcggcaccgcctcctcctcacattcccggggtggcggggttagatgagcggccccagtcgcggcgccgggggcgctgttcatgccggttcccgacggctccgtggctgctgcggggctggggctggggctacccgccgcggactccccgggtcactaccagctgctgctgtcaggccgggccctggccgaccgctaccggaggatttataccgctgcgctcaatgacagggaccaggggggcggcagcgctggacacccagcctccaggaataagaaaattttaaataagaagaaattgaaaagaaaacagaagagcaaatcaaaagtgaagacaagaagcaagtctgaaaacttagagaatacagtaatcataccagatatcaaactacatagcaatccttctgctttcaatatttactgtaatgtacgccattgcgttctggaatggcagaaaaaggaaatatcattggcagccgcatctaagaactctgtgcagagtggagaatcagatagtgatgaagaagaggaatccaaagagccccctatcaagcttccaaagattattgaggttggcctttgtgaagtttttgaattgatcaaagagacacgattttctcatccatccctgtgtctcaggagtctccaagccctgctcaacgtgctgcagggccagcagccagaagtgctccagtctgagccacctgaggtcctagagtctctcttccagcttcttttggaaatcaccgttcgaagtactgggatgaatgacagcacaggacagtccttaacagcactttcctgtgcttgcctctttagtctggtggcttcttggggagaaacaggaaggacacttcaggccatctctgctatcctcaccaacaatggaagccatgcttgccaaactattcagagacttaggaatgccattagagctcatagcaggagtataagaactacgttcatggaaagcctcccagaggatatgaggtgccaacaattctaaattcgctacagagaagtgtacaagcagttttggtgggaaaaattcaaattcaggactggtttagtaatggcattaagaaagcagctttaatgcacaagtggccattaaaagaaatatctgttgatgaagatgaccaatgtctacttcagaatgatggattttttctttatctattatgcaaggatggattatataaaataggctctggatacagtggaacagttaggggccatatatacaattctacatcccgtattagaaacagaaaagaaaaaaagtcttggttagggtatgctcagggttatttattatatagagatgtgaataaccacagcatgacagccataaggataagccctgaaacactggagcaagatggtactgtgatgttaccagattgccacactgaaggtcaaaatattttattcactgatggagaatatattaatcagatagctgcttcaagagatgatggctttgttgtcagaatatttgccacaagcactgaacctgttctacagcaagaattgcaacttaaactggctagaaaatgcttacatgcctgtggtatctcactattcgatctggaaaaggacttgcatattataagtacaggatttgatgaggagtcagcaattcttggtgcaggacgagagtttgcgctaatgaaaacagcaaatggaaagatatattacactggcaaataccagagtcttggaatcaaacaaggtggtccttcagcaggaaaatgggttgagctaccaattacaaaatctccaaagatagtacacttctcagttggacacgatggctctcacgcccttttagttgcagaagatgggagcatattctttacaggatctgctagtaaaggagaagatggagaatcaattaagagcagacggcaatccaaaccttataaacctaaaaagataattaagatggaaggaaagattgtggtatatacagcctgcaataatggaagtagttctgttatttctaaagatggagaactctacatgtttggaaaagatgccatttactctgatagttcaagtttggtaactgatttgaagggccattttgtaactcaggtagctatgggcaaagctcacacttgtgttttaatgaagaatggagaggtgtggacatttggtgtaaataataaaggacagtgtggacgagatactggtgccatgaaccaaggtgggaaagggtttggagttgaaaatatggcaacagcaatggatgaagacctggaagaagaactagatgaaaaagatgagaagtctatgatgtgccctccaggcatgcacaaatggaagctggagcagtgcatggtttgcactgtctgtggagactgtacaggttatggagccagctgtgtcagtagtggacggccagacagagtccccggagggatctgtggttgtggttccggagaatctggttgtgctgtgtgtggatgttgcaaggcctgtgcaagagagttagatggtcaagaggcaagacaaagaggaattcttgatgcagtgaaagaaatgatacctttagatcttcttttagctgtcccagtgcccggggttaacattgaagaacaccttcagttacgacaagaagaaaaacggcaacgtgtaatcagaaggcacagattagaggaaggaagaggcccccttgtatttgctggtcctatttttatgaaccatcgagaacaggctctagccagactcagatcccatccagcacacgtaaagcataaacgggacaagcacaaagatggaagtggagaaagaggcgaaaaggatgcaagcaaaatcacaacataccctccaggctctgtgcgatttgactgtgagctccgggcagtccaagtcagctgtggatttcaccattcagtggttttaatggaaaatggagatgtctatacatttggttatgggcagcatgggcagctaggacatggagatgtcaactccaggggatgtcccactcttgttcaagcattgccaggccctagcacacaagtcactgcaggcagcaaccatacggcagtacttttaatggatggacaggtcttcacatttggaagtttttctaaaggacaactgggcagaccaattttggatgtgccatattggaatgcaaagccagctcccatgcctaacattggatcaaaatatggaagaaaagctacttggataggtgcaagtggggaccaaacttttttacgaattgatgaagcacttattaattctcatgtacttgctacatcagaaatttttgccagtaaacacataataggcttggtacctgcttctatatcagaacctcctccatttaaatgccttctgataaataaagtggatgggagttgtaaaacttttaatgactcagaacaagaggatctgcaaggatttggtgtgtgtcttgatcctgtatatgatgtaatttggaggtttcgaccaaatactagagagctgtggtgttacaatgcggtggttgctgatgccaggcttccctctgcagcagacatgcagtccagatgtagtatcctaagtcctgaacttgccttaccaacaggatcaagggccctcactacccgatctcatgcagctttgcacattttaggttgtcttgataccttggcagctatgcaggacttaaaaatgggtgttgcaagtacagaggaagagactcaagcagtaatgaaggtttattctaaagaagattatagtgtggtaaacaggtttgaaagtcatggaggaggctggggttattctgcccattcagtagaagctatacgtttcagtgccgacactgatattttacttggtggtcttggtctgtttggaggtagaggagaatatactgctaaaattaagctgtttgaattgggtcctgatggaggagatcatgaaactgatggtgaccttcttgcagagactgatgtattggcttatgactgtgctgctagagaaaaatatgcaatgatgtttgatgagcctgttctcctgcaagctgggtggtggtatgtggcatgggcccgagtgtcaggacccagcagtgactgtggatctcatggacaggcatctattaccacagatgatggggttgttttccagttcaagagttcaaagaaatcaaataatggtacagatgttaatgcgggtcagatacctcagttattatacagacttccaaccagtgatggcagtgcttcaaaaggcaaacagcaaaccagtgaacctgtacacattttaaagaggtcttttgcaagaactgtctcagtggaatgttttgagtcattgttgagtattcttcactggagctggaccaccttagtcttaggagttgaagaacttagaggattaaaaggattccagttcacagctacactcctagatttagagagactgcgctttgtgggtacctgttgtctgaggttattgcgtgtctatacctgtgaaatttacccagtgtcagctacaggaaaagcagttgtagaagaaactagcaaattagcagagtgtattggaaaaaccagaactttgttaagaaaaattttatcagaaccacttgatcactgcatggtgaaattggataatgatcctcaaggatatctcagtcaacccttgagtcttctagaagctgtccttcaggaatgtcataatactttcactgcctgctttcattctttctacccaactcctgccttacagtgggcttgcctttgtgatctgctgaattgtttggatcaggatatccaagaagcaaacttcaagacatcaagtagccgactccttgcagctgttatgtcagctctgtgtcacacgtctgttaagctgacttccatcttcccgattgcgtatgatggagaagtattactacgatcaattgttaaacaagttagtacagagaacgactcaacactagttcatcgttttccccttttggtggcacatatggaaaaactcagccagagtgaagagaatatctcagggatgacaagcttccgtgaagttctggagaaaatgctggtcattgttgtgctaccagtcaggaacagcctgaggagagaaaatgaactcttctcctcccacctcgtctctaacacctgtggattactggccagcattgtcagtgaactgacagcgtcagccctgggatctgaggttgatggacttaattctcttcactctgtaaaagctagtgctaaccgatttacaaaaacaagtcagggcagaagttggaacactgggaacgggtcccctgatgcaatctgtttttcagtagacaaacctggaatagttgtggttggtttctctgtctatggaggaggtggaattcatgaatatgaattagaggtgttggttgatgatagtgaacatgcaggagattcaactcattcccacagatggacatctctggaattagtgaaaggaacgtacacaacggatgactcacccagtgatatagctgagatcagacttgacaaagtggttcctttaaaggaaaatgttaaatatgctgtgcgcttgaggaactatggaagccgtacagccaatggagatggaggaatgaccacagttcagtgccctgatggtgtgacattcacattcagcacgtgcagcttgagcagtaacggcacaaaccaaaccagaggacagatcccacagatactctactataggagtgaatttgatggagatttacaatcccaacttctgagtaaagccaatgaagaagataaaaactgtagcagagcattgtctgttgtaagcactgtcgttcgagcctctaaggacctcctgcacagagctcttgctgtggatgctgatgacattccagaactgctgagttcttccagtctgttttccatgctgctcccccttattatagcctacataggaccagtagctgctgctattcccaaggtggctgtagaagtctttggccttgtccaacaattgcttccgtcagttgccattttgaatcagaagtatgcaccgcctgccttcaaccctaatcagtcgacagatagcaccacaggaaaccagcctgaacagggcctctctgcttgtacaacctccagtcactatgctgtcatagagagtgagcacccgtataaacctgcctgtgtgatgcattacaaggtgacattcccagaatgtgtgaggtggatgacaatcgaatttgaccctcagtgtggtactgcacagtcagaagatgtccttcgtttgttgattcctgtcagaactgttcagaattcaggatatggaccaaaattgacatctgttcatgaaaatcttaattcatggatagaattaaagaaattttcaggatcctctgggtggcctactatggttttggtgttgccaggaaatgaggcccttttttcattggagactgcatcagattatgtgaaagatgacaaagcttctttctatggttttaagtgttttgcaattggatatgaatttagccctggacctgatgagggagtcatccaattggaaaaagaattagccaatcttggtggggtttgtgcagcagctctgatgaagaaggacctagcacttcctattggtaatgaattagaagaagaccttgaaattcttgaggaggctgcattgcaggtgtgcaaaacccattctggaattcttggaaagggtctagctctttctcattcaccaactatattagaagcacttgagggaaatttaccactccaaatccaaagcaatgaacagtcttttctggatgattttattgcctgtgtcccaggatcaagtggtggaaggcttgcaaggtggcttcagccagattcatatgcggatcctcagaaaacatctttgatcctgaataaggatgatattcgttgtggttggcctaccaccataactgttcaaacaaaagaccagtatggggatgtggtacatgttcccaatatgaaggtggaagtgaaagctgtccctgtttctcagaaaaaaatgtctttacaacaagatcaagcaaagaaacctcaaaggattcctggcagtcctgcagtaacagctgcatcttctaatactgacatgacttatggagggctggcatcaccaaagctagatgtttcatatgaaccaatgatagtgaaggaagctcgatatattgccataacaatgatgaaggtttatgaaaattattcatttgaagaactacgttttgcatcaccaactcctaagagacccagtgagaatatgctgatccgtgtcaataatgatgggacttattgtgcaaattggactccaggggctattggactctacactcttcatgttaccattgatggcattgaaatcgatgctggtctggaagtaaaagtaaaagacccaccaaaagggatgataccaccaggaactcagttggtcaaaccaaagtctgaacctcagcctaataaggttcgaaaatttgtggccaaggacagtgcggggcttcgcatccgtagccacccttcccttcagagtgagcagataggcatagtgaaagtcaatggaactatcacttttattgatgagatccataatgatgatggtgtgtggctgaggctgaatgatgagacaataaagaagtatgtccctaacatgaatggttacactgaagcctggtgcctctcttttaatcaacatcttggcaagagtcttctggtccctgttgacaatatctttaatgctagccaaggagtcagggatttggacgtattttcatggacttccaaagcttttttcccccaggaatctaaaactaatactgatgactttttcaaagacataaactcctgctgcccacaggaagcaacaatgcaagaacaagatatgccattcttgcgaggagggccaggcatgtacaaggtagtgaagacgggaccttcaggtcacaacatcagaagctgccctaaccttagaggtatcccaattggaatgttagttctgggaaacaaagtcaaagcagtgggagaggtaaccaattctgaagggacatgggtgcaactggatcagaacagcatggtagagttctgtgagagtgatgaaggagaggcatggtccttagctagagacagaggcggaaaccagtacctccgacatgaagatgaacaagctcttctggatcagaattctcaaactcctcctccaagccctttctcagtgcaagcttttaataaaggggcaagttgcagtgcccaaggatttgattatggactcggaaatagcaaagttttgactgttttacccactgcaggtgaccaactgagtgccatattgaattccattcagtcacgacccaatctcccagctccttccatctttgatcaagctgcaaaacctccctcttccctagtacacagcccatttgtgttcggacagcccctttccttccagcagcctcagcttcagagtgatcgaggaaacatctcaacatcttctaaaccagcctctacatcaggaaaatcagagctgtcctctaaacacagcagatcgcttaaacctgatggacgtatgagccggactactgctgatcagaagaagccaaggggcacagaaagtttatctgctagtgaatccctcatcttaaaatctgatgctgcaaagttgaggtcagattcccacagtaggtcattatcccccaaccataacaccttgcagacattgaaatctgatgggaggatgccttctagctccagagctgaatccccaggaccaggttctcggttgtcatctcctaagccaaagactctcccagccaataggtctagcccatcgggtgctagttctccacgctcctcctcaccacatgataaaaatctacctcaaaaaagtactgctcctgttaagacaaagcttgatcctcctcgggaacgttctaaatcagactcttacacacttgatccagataccctccgcaagaagaaaatgcccctcacagaacctttgagaggacggtcaacgtcaccaaaaccaaaatcagtaccaaaggattctacagattcccctggatctgaaaatagagctccctctccccatgtggtacaggaaaacctccacagtgaggtggtcgaagtctgcacctcaagtactttaaaaacaaatagtctaacagacagcacctgcgatgacagcagtgaatttaagagtgtggatgaaggttcaaataaagttcattttagcattggaaaagcaccactgaaagatgaacaggaaatgagagcatctcccaaaataagtcgaaaatgtgctaatagacacaccaggcccaaaaaagaaaaatcgagttttcttttcaaaggagatggatccaagcctttagagccagccaagcaagccatgtctccttctgtggccgaatgtgccagagctgtgtttgcttccttcctctggcatgaaggcatagtacatgatgcaatggcttgttcttctttcctaaagtttcatcctgaactttccaaagaacatgctcctataaggagtagtttaaatagccaacaacctacagaggaaaaagaaaccaagttaaaaaatagacattcattagaaatatcatctgcactgaatatgtttaatattgcaccccatggaccagatatatctaagatgggtagcatcaacaaaaacaaggtattgtctatgcttaaggaaccacctctgcatgaaaaatgtgaggatgggaaaaccgagaccacttttgaaatgtccatgcataacacaatgaagtctaagtctcctcttcccttaactttacaacatttagtggctttttgggaagacatctctttggctactatcaaagctgcttcccagaatatgatttttccaagtcctggttcctgtgcagttcttaaaaagaaagagtgtgagaaagagaataagaagtccaaaaaggaaaaaaagaaaaaagaaaaggcagaagttaggcccaggggtaatttgtttggagagatggcccagctggcagtaggaggaccagagaaagataccatctgtgaactgtgtggggagtcacatccatacccggtgacctatcacatgagacaagctcacccaggttgtggccgatatgctggtggacaaggttacaatagcattgggcatttttgtggaggatgggctggtaactgtggtgatggtggcataggaggaagcacttggtatctggtatgtgatcgctgtagagaaaaatacctccgcgaaaaacaggctgctgcaagggagaaggtcaaacaatctaggagaaaaccaatgcaagtcaagacccctcgtgccttgcccaccatggaagctcaccaggtgattaaagccaatgcactcttcctgctgtccctgagcagtgcagcagaaccgagcattctgtgttaccatcctgcaaagccattccaatctcagttgcccagtgtaaaagaaggcatttctgaggatcttcctgtgaaaatgccttgtctctacctgcagacattagctaggcatcatcatgaaaattttgtgggctatcaagatgacaatctattccaggatgaaatgagatatctacgttcaacatctgtacctgccccgtatatatcagtaactcctgatgcaagtcctaatgtatttgaagagccagagagcaatatgaagtctatgccaccaagtttagaaaccagtcccataactgatactgatcttgcaaagagaactgtcttccaaagatcatactcagttgttgcttccgaatatgataaacaacactccattttacctgcacgagttaaagctattcctagaagaagagttaacagtggagacactgaagttggttcttcccttttgagacatccgtctcctgagctttctcggctaatctcagcccacagctctctttctaaaggagaacgaaatttccagtggccagttttagcttttgttatacaacatcatgatctagaaggtcttgaaatagcaatgaaacaggccctaaggaaatctgcttgtcgagtttttgctatggaggctttcaactggcttctgtgtaatgtcatccaaaccacttctctccatgatattctgtggcattttgtggcatcactgactcctgcaccagtggaaccagaggaagaagaggatgaagaaaataaaacaagcaaagaaaattcagaacaagagaaagatacaagagtatgtgaacatccactctcagacatagtgattgccggggaagctgctcatcctttaccacacacctttcaccgcttgctgcagaccatctcagaccttatgatgtctctccccagcggcagttcattacagcaaatggccctgaggtgctggagtctcaaattcaagcaatctgatcaccagttccttcatcagagcaacgtctttcatcacattaacaatattttgtcaaagtcagatgatggcgatagtgaagagagttttagcatcagtatacagtctggctttgaagctatgagtcaggaattatgcatagtaatgtgcttaaaggacttaaccagcattgttgacataaaaacttcaagccgacctgccatgattggcagtttgacagacggctccacagaaaccttttgggaatcaggagatgaagataaaaacaaaactaagaacatcaccatcaactgtgtaaaaggaatcaatgcccgctatgtgtctgttcacgtggacaattcccgagatcttgggaataaagttacctcaatgaccttcttaactggcaaagcagtagaagatttgtgcagaataaagcaggttgatctggattccaggcacattggctgggtaacaagtgaacttccaggaggggataatcacatcataaaaattgaattaaaaggcccagaaaatacactgagagttcgacaagtcaaagtcctgggctggaaagatggtgaaagcacaaaaatagctggccagatttcagccagtgtggcccagcagaggaactgtgaagctgagactctgcgagtattcagactgattacgtctcaagtatttggaaagctcatctctggagatgctgaacctacaccagaacaagaggaaaaagcactattgtcatcacctgaaggagaagaaaaagtatacaatgcaacatcagatgctgacctgaaagaacatatggttggaatcatattcagcaggagtaagctgactaacttacaaaaacaggtgtgtgctcatattgtccaagctattcgcatggaagctaccagagtccgtgaagaatgggaacatgctatatcaagcaaagaaaatgccaattctcagccaaatgatgaagatgcctcctctgatgcctactgctttgagctgctctctatggttttagcactgagtggctctaacgttggccggcaatatctggctcaacagctaaccctgcttcaggatctcttctcgctgcttcacacagcctctcctagagtccagagacaggtaacctctttactaagaagagttttgcctgaagtaacccctagtcgtctggccagcatcataggagtgaaatccctccccccagcagatatcagtgatatcattcactcaacagagaaaggagactggaataagctgggtatcttggacatgtttctaggatgcattgccaaagcactcactgtacagctaaaagccaaaggaaccaccatcactggaacagctggtaccactgtgggcaaaggagttacaacagttactcttccgatgattttcaattccagttatctccgacgaggtgaaagtcattggtggatgaagggctcaacccctacccagatctcagagatcatcattaaacttatcaaggatatggcagcaggtcatctgtcagaagcttggtcccgagtgacaaaaaatgctattgcagaaaccatcattgccttgaccaagatggaagaagaatttaggtctccagtgagatgtattgcaacaactagactctggcttgctctcgcatccctatgtgttcttgatcaggaccacgtagatcgtctctcctcggggagatggatgggaaaggatggacaacaaaaacaaatgcctatgtgtgataaccatgatgatggtgaaactgcagcaatcattttatgcaatgtctgtggaaatttatgtacagactgtgacagattccttcaccttcatcgaagaaccaaaactcatcaaagacaggtcttcaaagaagaagaagaagctataaaggttgaccttcatgaaggttgtggtagaaccaaattgttctggttgatggcactggcagattctaaaacaatgaaggcaatggtggaattccgagaacacacaggcaaacccaccacgagtagctcagaagcatgtcgcttctgtggttccaggagtggaacagagttatctgctgttggcagtgtttgttctgatgcagattgccaggaatacgctaagatagcctgtagtaagacgcatccttgtggccatccatgcgggggtgttaaaaacgaagagcactgtctgccctgtctacacggctgtgacaaaagtgccacaagcctgaagcaagacgccgatgacatgtgcatgatatgtttcaccgaagcgctctcggcagcaccagccattcagctggattgtagtcacatattccacttacagtgctgtcggcgagtattagaaaatcgatggcttggcccaaggataacatttggatttatatcttgtcccatttgcaagaacaaaattaatcacatagtactaaaagacctacttgatccaataaaagaactctatgaggatgtcagaagaaaagccttaatgagattggaatatgaaggtctgcataagagtgaagctatcacaactcctggtgtgaggttttataatgacccagctggctatgcaatgaatagatatgcatattatgtgtgctacaaatgcagaaaggcatattttggtggtgaagctcgctgcgatgctgaggctggacggggagatgattatgatcccagagagctcatttgtggtgcctgttctgatgtttccagggctcagatgtgtcccaaacatggcacagactttttggaatataaatgtcgctactgctgttcagtggctgtttttttctgttttggaacaacacatttttgtaatgcttgtcatgatgattttcaaagaatgactagcattcctaaggaagaactaccacactgtcctgcaggtcccaaaggcaagcagttagaaggaactgaatgtccactccatgttgttcatccacccactggggaagagtttgctctgggatgtggagtgtgcagaaatgcccacactttttagaacacgcagatcctttgtctacagagagaaaaattgccttcatcccccaagaggatgcggtgaagtttaaactctgctcaggataaggacgggaccatttttacatccatgaaaatgaaccattcacagtgcaagaaggataccaaataccatgtacataattcttgctatgaaaagtttccccattattttggtttatcttcttttgaacaaatgacatcaaacttgtgaggtgtttgcatgtggccattaccgtcattggcctgtgaagcattggacatttatagataattgatataaaagaatcgccatgcccatggactaagaacgatgctggctttcaagcaaaaaagaaaaataatcattgtttattgtatactgcctttttgtaatcctgtacaattgcatcacgggtggggataaaaagaggaatattctggtttatttcctagactgttatttaaaaaaaaaaaaaacattgtgttaggacagcatataaatgtaataagtatcacactgtatataaacatatcaatgtttgtcctgtataagaattactaaattacaaatgcaatttcatttaaacttctaggttaagtttgagcctgaaattttaatgaagtgcaatactgagtgtgcctcattatcttgcagctgtaaacatattggaatgtacatgtcaataaaaccactgtacatttttatacagtgataaagtcta

SEQ ID NO: 357447 - DNA, 8516 bp, Homo sapiens
atcacatctgtttatctgtgctctcccaagacagcattgatagttagaattctaaattgggatttttttaacccttttttcaaaacttagccccatctgttaatactgtatttataaaacagagcacataatatgataaaggaggttaatgattgaataatgaagctttgcaagaaactaaaaagcattatgttttagttacttttattcatccaaagaacaggaaaaattatcttaaatattggcatgttgcaattaaacatttagttcatcagtgtgccctgtataaagtacttgccatactctattatttcaccatgtaattactcagtttgcaagcatctaacccttgcacatcaataactaatgtcacctctgtcctgtggccttgggagccttaattgtaaaaagtagacttctggagaagctgaatacttgggagtagcagaagaaaaaaatcaagaaaattggaatatattactcattcaacacatatttattgaatacctactgtattcctggattcattcttggtattacatcagtgaagagtaacagacaaaaatacctgcccttgacaaagactggggcagattctccagcactactgtcctgagccatagagaaatagagcgtgactatacacacttaacacatgcacggaagcataaaaaacattttcctacatcatctgaatttgttcacatccttttttcttttaaaaaataataacatgcagttatagccagttaacaaatctaccttaatttcctaggaactgtctttgaaaaaatataaatacttccagataggtttatggattttcagttttttataccacttgaaacccttcagtcagattgcttttctcctaacaactaactggtatcacttgcactaagagtagaagtttttattttaaggaggaaaggtgatgttgaagtttgtaccatttacttgggtcacagacagcctggctctaatgcctcaaagaaaagcataaaatagaatgaaggagagacactgaatgaaggcagggtgctaaaaacaattaatgtccatgcagaaacatctaatgctttgccttagaaaagggaggtgattcttcttttcatcctgtttttctgtcattctcctgactccttgttttgagggtccacagttcagacttttaccactcattctgaggatccaccgtttctgtggtttccaagggaacacaggctctgagttctaagcagctaagcttcctgaacttttggagtgtaacctgtttataaataattaaataacagcttcagggcattcatgtgctcattgtaaactagtctaatctgatcataaaacagagtgcctcttaagcaactctttgttagcctaattgtatgcatacacttaaaaattataattgtgtctatgcataaattcagttctctaattcaacaaaacccataccgttgccctaaggatgcgaggtatcactctgctggaaatttagctctactctacatttaaaatacaagttttcacattaaataatttcttattccccaaaagattaatttctgtctctttctagtccctcactgaatttaaattctaactagttattgcactagggcagaggttgagatatcactgatagttcacactggatttgttcaacctgttgttttgcgtccatgaaaatagtttttggtggtaatgttgtgtaatgatgtgtagaaattttattagaaatatttcccccttctttcctttattcttcaagtattttagtatgtatgacaaacaatataaattttgtagctatgtttttttatttcagtgtttagtggctaaattatcagtaagttataattttattaataagtttcactgtaaaatggaccatacaggtgatcgaggaaacatctcaacatcttctaaaccagcctctacatcaggaaaatcagagctgtcctctaaacacagcagatcgcttaaacctgatggacgtatgagccggactactgctgatcagaagaagccaaggggcacagaaagtttatctgctagtgaatccctcatcttaaaatctgatgctgcaaagttgaggtcagattcccacagtaggtcattatcccccaaccataacaccttgcagacattgaaatctgatgggaggatgccttctagctccagagctgaatccccaggaccaggttctcggttgtcatctcctaagccaaagactctcccagccaataggtctagcccatcgggtgctagttctccacgctcctcctcaccacatgataaaaatctacctcaaaaaagtactgctcctgttaagacaaagcttgatcctcctcgggaacgttctaaatcagactcttacacacttgatccagataccctccgcaagaagaaaatgcccctcacagaacctttgagaggacggtcaacgtcaccaaaaccaaaatcagtaccaaaggattctacagattcccctggatctgaaaatagagctccctctccccatgtggtacaggaaaacctccacagtgaggtggtcgaagtctgcacctcaagtactttaaaaacaaatagtctaacagacagcacctgcgatgacagcagtgaatttaagagtgtggatgaaggttcaaataaagttcattttagcattggaaaagcaccactgaaagatgaacaggaaatgagagcatctcccaaaataagtcgaaaatgtgctaatagacacaccaggcccaaaaaagaaaaatcgagttttcttttcaaaggagatggatccaagcctttagagccagccaagcaagccatgtctccttctgtggccgaatgtgccagagctgtgtttgcttccttcctctggcatgaaggcatagtacatgatgcaatggcttgttcttctttcctaaagtttcatcctgaactttccaaagaacatgctcctataaggagtagtttaaatagccaacaacctacagaggaaaaagaaaccaagttaaaaaatagacattcattagaaatatcatctgcactgaatatgtttaatattgcaccccatggaccagatatatctaagatgggtagcatcaacaaaaacaaggtattgtctatgcttaaggaaccacctctgcatgaaaaatgtgaggatgggaaaaccgagaccacttttgaaatgtccatgcataacacaatgaagtctaagtctcctcttcccttaactttacaacatttagtggctttttgggaagacatctctttggctactatcaaagctgcttcccagaatatgatttttccaagtcctggttcctgtgcagttcttaaaaagaaagagtgtgagaaagagaataagaagtccaaaaaggaaaaaaagaaaaaagaaaaggcagaagttaggcccaggggtaatttgtttggagagatggcccagctggcagtaggaggaccagagaaagataccatctgtgaactgtgtggggagtcacatccatacccggtgacctatcacatgagacaagctcacccaggttgtggccgatatgctggtggacaaggttacaatagcattgggcatttttgtggaggatgggctggtaactgtggtgatggtggcataggaggaagcacttggtatctggtatgtgatcgctgtagagaaaaatacctccgcgaaaaacaggctgctgcaagggagaaggtcaaacaatctaggagaaaaccaatgcaagtcaagacccctcgtgccttgcccaccatggaagctcaccaggtgattaaagccaatgcactcttcctgctgtccctgagcagtgcagcagaaccgagcattctgtgttaccatcctgcaaagccattccaatctcagttgcccagtgtaaaagaaggcatttctgaggatcttcctgtgaaaatgccttgtctctacctgcagacattagctaggcatcatcatgaaaattttgtgggctatcaagatgacaatctattccaggatgaaatgagatatctacgttcaacatctgtacctgccccgtatatatcagtaactcctgatgcaagtcctaatgtatttgaagagccagagagcaatatgaagtctatgccaccaagtttagaaaccagtcccataactgatactgatcttgcaaagagaactgtcttccaaagatcatactcagttgttgcttccgaatatgataaacaacactccattttacctgcacgagttaaagctattcctagaagaagagttaacagtggagacactgaagttggttcttcccttttgagacatccgtctcctgagctttctcggctaatctcagcccacagctctctttctaaaggagaacgaaatttccagtggccagttttagcttttgttatacaacatcatgatctagaaggtcttgaaatagcaatgaaacaggccctaaggaaatctgcttgtcgagtttttgctatggaggctttcaactggcttctgtgtaatgtcatccaaaccacttctctccatgatattctgtggcattttgtggcatcactgactcctgcaccagtggaaccagaggaagaagaggatgaagaaaataaaacaagcaaagaaaattcagaacaagagaaagatacaagagtatgtgaacatccactctcagacatagtgattgccggggaagctgctcatcctttaccacacacctttcaccgcttgctgcagaccatctcagaccttatgatgtctctccccagcggcagttcattacagcaaatggccctgaggtgctggagtctcaaattcaagcaatctgatcaccagttccttcatcagagcaacgtctttcatcacattaacaatattttgtcaaagtcagatgatggcgatagtgaagagagttttagcatcagtatacagtctggctttgaagctatgagtcaggaattatgcatagtaatgtgcttaaaggacttaaccagcattgttgacataaaaacttcaagccgacctgccatgattggcagtttgacagacggctccacagaaaccttttgggaatcaggagatgaagataaaaacaaaactaagaacatcaccatcaactgtgtaaaaggaatcaatgcccgctatgtgtctgttcacgtggacaattcccgagatcttgggaataaagttacctcaatgaccttcttaactggcaaagcagtagaagatttgtgcagaataaagcaggttgatctggattccaggcacattggctgggtaacaagtgaacttccaggaggggataatcacatcataaaaattgaattaaaaggcccagaaaatacactgagagttcgacaagtcaaagtcctgggctggaaagatggtgaaagcacaaaaatagctggccagatttcagccagtgtggcccagcagaggaactgtgaagctgagactctgcgagtattcagactgattacgtctcaagtatttggaaagctcatctctggagatgctgaacctacaccagaacaagaggaaaaagcactattgtcatcacctgaaggagaagaaaaagtatacaatgcaacatcagatgctgacctgaaagaacatatggttggaatcatattcagcaggagtaagctgactaacttacaaaaacaggtgtgtgctcatattgtccaagctattcgcatggaagctaccagagtccgtgaagaatgggaacatgctatatcaagcaaagaaaatgccaattctcagccaaatgatgaagatgcctcctctgatgcctactgctttgagctgctctctatggttttagcactgagtggctctaacgttggccggcaatatctggctcaacagctaaccctgcttcaggatctcttctcgctgcttcacacagcctctcctagagtccagagacaggtaacctctttactaagaagagttttgcctgaagtaacccctagtcgtctggccagcatcataggagtgaaatccctccccccagcagatatcagtgatatcattcactcaacagagaaaggagactggaataagctgggtatcttggacatgtttctaggatgcattgccaaagcactcactgtacagctaaaagccaaaggaaccaccatcactggaacagctggtaccactgtgggcaaaggagttacaacagttactcttccgatgattttcaattccagttatctccgacgaggtgaaagtcattggtggatgaagggctcaacccctacccagatctcagagatcatcattaaacttatcaaggatatggcagcaggtcatctgtcagaagcttggtcccgagtgacaaaaaatgctattgcagaaaccatcattgccttgaccaagatggaagaagaatttaggtctccagtgagatgtattgcaacaactagactctggcttgctctcgcatccctatgtgttcttgatcaggaccacgtagatcgtctctcctcggggagatggatgggaaaggatggacaacaaaaacaaatgcctatgtgtgataaccatgatgatggtgaaactgcagcaatcattttatgcaatgtctgtggaaatttatgtacagactgtgacagattccttcaccttcatcgaagaaccaaaactcatcaaagacaggtcttcaaagaagaagaagaagctataaaggttgaccttcatgaaggttgtggtagaaccaaattgttctggttgatggcactggcagattctaaaacaatgaaggcaatggtggaattccgagaacacacaggcaaacccaccacgagtagctcagaagcatgtcgcttctgtggttccaggagtggaacagagttatctgctgttggcagtgtttgttctgatgcagattgccaggaatacgctaagatagcctgtagtaagacgcatccttgtggccatccatgcgggggtgttaaaaacgaagagcactgtctgccctgtctacacggctgtgacaaaagtgccacaagcctgaagcaagacgccgatgacatgtgcatgatatgtttcaccgaagcgctctcggcagcaccagccattcagctggattgtagtcacatattccacttacagtgctgtcggcgagtattagaaaatcgatggcttggcccaaggataacatttggatttatatcttgtcccatttgcaagaacaaaattaatcacatagtactaaaagacctacttgatccaataaaagaactctatgaggatgtcagaagaaaagccttaatgagattggaatatgaaggtctgcataagagtgaagctatcacaactcctggtgtgaggttttataatgacccagctggctatgcaatgaatagatatgcatattatgtgtgctacaaatgcagaaaggcatattttggtggtgaagctcgctgcgatgctgaggctggacggggagatgattatgatcccagagagctcatttgtggtgcctgttctgatgtttccagggctcagatgtgtcccaaacatggcacagactttttggaatataaatgtcgctactgctgttcagtggctgtttttttctgttttggaacaacacatttttgtaatgcttgtcatgatgattttcaaagaatgactagcattcctaaggaagaactaccacactgtcctgcaggtcccaaaggcaagcagttagaaggaactgaatgtccactccatgttgttcatccacccactggggaagagtttgctctgggatgtggagtgtgcagaaatgcccacactttttagaacacgcagatcctttgtctacagagagaaaaattgccttcatcccccaagaggatgcggtgaagtttaaactctgctcaggataaggacgggaccatttttacatccatgaaaatgaaccattcacagtgcaagaaggataccaaataccatgtacataattcttgctatgaaaagtttccccattattttggtttatcttcttttgaacaaatgacatcaaacttgtgaggtgtttgcatgtggccattaccgtcattggcctgtgaagcattggacatttatagataattgatataaaagaatcgccatgcccatggactaagaacgatgctggctttcaagcaaaaaagaaaaataatcattgtttattgtatactgcctttttgtaatcctgtacaattgcatcacgggtggggataaaaagaggaatattctggtttatttcctagactgttatttaaaaaaaaaaaaaacattgtgttaggacagcatataaatgtaataagtatcacactgtatataaacatatcaatgtttgtcctgtataagaattactaaattacaaatgcaatttcatttaaacttctaggttaagtttgagcctgaaattttaatgaagtgcaatactgagtgtgcctcattatcttgcagctgtaaacatattggaatgtacatgtcaataaaaccactgtacatttttatacagtgataaagtcta

SEQ ID NO: 357448 - DNA, 7266 bp, Homo sapiens
  misc_feature (22)..(22): n is a, c, g, or t
gagggatccctttattcgtgtngcacatccataatgatgatggtgtgtggctgaggctgaatgatgagacaataaagaagtatgtccctaacatgaatggttacactgaagcctggtgcctctcttttaatcaacatcttggcaagagtcttctggtccctgttgacgaatctaaaactaatactgatgactttttcaaagacataaactcctgctgcccacaggaagcaacaatgcaagaacaagatatgccattcttgcgaggagggccaggcatgtacaaggtagtgaagacgggaccttcaggtcacaacatcagaagctgccctaaccttagaggtatcccaattggaatgttagttctgggaaacaaagtcaaagcagtgggagaggtaaccaattctgaagggacatgggtgcaactggatcagaacagcatggtagagttctgtgagagtgatgaaggagaggcatggtccttagctagagacagaggcggaaaccagtacctccgacatgaagatgaacaagctcttctggatcagaattctcaaactcctcctccaagccctttctcagtgcaagcttttaataaaggggcaagttgcagtgcccaaggatttgattatggactcggaaatagcaaaggtgatcgaggaaacatctcaacatcttctaaaccagcctctacatcaggaaaatcagagctgtcctctaaacacagcagatcgcttaaacctgatggacgtatgagccggactactgctgatcagaagaagccaaggggcacagaaagtttatctgctagtgaatccctcatcttaaaatctgatgctgcaaagttgaggtcagattcccacagtaggtcattatcccccaaccataacaccttgcagacattgaaatctgatgggaggatgccttctagctccagagctgaatccccaggaccaggttctcggttgtcatctcctaagccaaagactctcccagccaataggtctagcccatcgggtgctagttctccacgctcctcctcaccacatgataaaaatctacctcaaaaaagtactgctcctgttaagacaaagcttgatcctcctcgggaacgttctaaatcagactcttacacacttgatccagataccctccgcaagaagaaaatgcccctcacagaacctttgagaggacggtcaacgtcaccaaaaccaaaatcagtaccaaaggattctacagattcccctggatctgaaaatagagctccctctccccatgtggtacaggaaaacctccacagtgaggtggtcgaagtctgcacctcaagtactttaaaaacaaatagtctaacagacagcacctgcgatgacagcagtgaatttaagagtgtggatgaaggttcaaataaagttcattttagcattggaaaagcaccactgaaagatgaacaggaaatgagagcatctcccaaaataagtcgaaaatgtgctaatagacacaccaggcccaaaaaagaaaaatcgagttttcttttcaaaggagatggatccaagcctttagagccagccaagcaagccatgtctccttctgtggccgaatgtgccagagctgtgtttgcttccttcctctggcatgaaggcatagtacatgatgcaatggcttgttcttctttcctaaagtttcatcctgaactttccaaagaacatgctcctataaggagtagtttaaatagccaacaacctacagaggaaaaagaaaccaagttaaaaaatagacattcattagaaatatcatctgcactgaatatgtttaatattgcaccccatggaccagatatatctaagatgggtagcatcaacaaaaacaaggtattgtctatgcttaaggaaccacctctgcatgaaaaatgtgaggatgggaaaaccgagaccacttttgaaatgtccatgcataacacaatgaagtctaagtctcctcttcccttaactttacaacatttagtggctttttgggaagacatctctttggctactatcaaagctgcttcccagaatatgatttttccaagtcctggttcctgtgcagttcttaaaaagaaagagtgtgagaaagagaataagaagtccaaaaaggaaaaaaagaaaaaagaaaaggcagaagttaggcccaggggtaatttgtttggagagatggcccagctggcagtaggaggaccagagaaagataccatctgtgaactgtgtggggagtcacatccatacccggtgacctatcacatgagacaagctcacccaggttgtggccgatatgctggtggacaaggttacaatagcattgggcatttttgtggaggatgggctggtaactgtggtgatggtggcataggaggaagcacttggtatctggtatgtgatcgctgtagagaaaaatacctccgcgaaaaacaggctgctgcaagggagaaggtcaaacaatctaggagaaaaccaatgcaagtcaagacccctcgtgccttgcccaccatggaagctcaccaggtgattaaagccaatgcactcttcctgctgtccctgagcagtgcagcagaaccgagcattctgtgttaccatcctgcaaagccattccaatctcagttgcccagtgtaaaagaaggcatttctgaggatcttcctgtgaaaatgccttgtctctacctgcagacattagctaggcatcatcatgaaaattttgtgggctatcaagatgacaatctattccaggatgaaatgagatatctacgttcaacatctgtacctgccccgtatatatcagtaactcctgatgcaagtcctaatgtatttgaagagccagagagcaatatgaagtctatgccaccaagtttagaaaccagtcccataactgatactgatcttgcaaagagaactgtcttccaaagatcatactcagttgttgcttccgaatatgataaacaacactccattttacctgcacgagttaaagctattcctagaagaagagttaacagtggagacactgaagttggttcttcccttttgagacatccgtctcctgagctttctcggctaatctcagcccacagctctctttctaaaggagaacgaaatttccagtggccagttttagcttttgttatacaacatcatgatctagaaggtcttgaaatagcaatgaaacaggccctaaggaaatctgcttgtcgagtttttgctatggaggctttcaactggcttctgtgtaatgtcatccaaaccacttctctccatgatattctgtggcattttgtggcatcactgactcctgcaccagtggaaccagaggaagaagaggatgaagaaaataaaacaagcaaagaaaattcagaacaagagaaagatacaagagtatgtgaacatccactctcagacatagtgattgccggggaagctgctcatcctttaccacacacctttcaccgcttgctgcagaccatctcagaccttatgatgtctctccccagcggcagttcattacagcaaatggccctgaggtgctggagtctcaaattcaagcaatctgatcaccagttccttcatcagagcaacgtctttcatcacattaacaatattttgtcaaagtcagatgatggcgatagtgaagagagttttagcatcagtatacagtctggctttgaagctatgagtcaggaattatgcatagtaatgtgcttaaaggacttaaccagcattgttgacataaaaacttcaagccgacctgccatgattggcagtttgacagacggctccacagaaaccttttgggaatcaggagatgaagataaaaacaaaactaagaacatcaccatcaactgtgtaaaaggaatcaatgcccgctatgtgtctgttcacgtggacaattcccgagatcttgggaataaagttacctcaatgaccttcttaactggcaaagcagtagaagatttgtgcagaataaagcaggttgatctggattccaggcacattggctgggtaacaagtgaacttccaggaggggataatcacatcataaaaattgaattaaaaggcccagaaaatacactgagagttcgacaagtcaaagtcctgggctggaaagatggtgaaagcacaaaaatagctggccagatttcagccagtgtggcccagcagaggaactgtgaagctgagactctgcgagtattcagactgattacgtctcaagtatttggaaagctcatctctggagatgctgaacctacaccagaacaagaggaaaaagcactattgtcatcacctgaaggagaagaaaaagtatacaatgcaacatcagatgctgacctgaaagaacatatggttggaatcatattcagcaggagtaagctgactaacttacaaaaacaggtgtgtgctcatattgtccaagctattcgcatggaagctaccagagtccgtgaagaatgggaacatgctatatcaagcaaagaaaatgccaattctcagccaaatgatgaagatgcctcctctgatgcctactgctttgagctgctctctatggttttagcactgagtggctctaacgttggccggcaatatctggctcaacagctaaccctgcttcaggatctcttctcgctgcttcacacagcctctcctagagtccagagacaggtaacctctttactaagaagagttttgcctgaagtaacccctagtcgtctggccagcatcataggagtgaaatccctccccccagcagatatcagtgatatcattcactcaacagagaaaggagactggaataagctgggtatcttggacatgtttctaggatgcattgccaaagcactcactgtacagctaaaagccaaaggaaccaccatcactggaacagctggtaccactgtgggcaaaggagttacaacagttactcttccgatgattttcaattccagttatctccgacgaggtgaaagtcattggtggatgaagggctcaacccctacccagatctcagagatcatcattaaacttatcaaggatatggcagcaggtcatctgtcagaagcttggtcccgagtgacaaaaaatgctattgcagaaaccatcattgccttgaccaagatggaagaagaatttaggtctccagtgagatgtattgcaacaactagactctggcttgctctcgcatccctatgtgttcttgatcaggaccacgtagatcgtctctcctcggggagatggatgggaaaggatggacaacaaaaacaaatgcctatgtgtgataaccatgatgatggtgaaactgcagcaatcattttatgcaatgtctgtggaaatttatgtacagactgtgacagattccttcaccttcatcgaagaaccaaaactcatcaaagacaggtcttcaaagaagaagaagaagctataaaggttgaccttcatgaaggttgtggtagaaccaaattgttctggttgatggcactggcagattctaaaacaatgaaggcaatggtggaattccgagaacacacaggcaaacccaccacgagtagctcagaagcatgtcgcttctgtggttccaggagtggaacagagttatctgctgttggcagtgtttgttctgatgcagattgccaggaatacgctaagatagcctgtagtaagacgcatccttgtggccatccatgcgggggtgttaaaaacgaagagcactgtctgccctgtctacacggctgtgacaaaagtgccacaagcctgaagcaagacgccgatgacatgtgcatgatatgtttcaccgaagcgctctcggcagcaccagccattcagctggattgtagtcacatattccacttacagtgctgtcggcgagtattagaaaatcgatggcttggcccaaggataacatttggatttatatcttgtcccatttgcaagaacaaaattaatcacatagtactaaaagacctacttgatccaataaaagaactctatgaggatgtcagaagaaaagccttaatgagattggaatatgaaggtctgcataagagtgaagctatcacaactcctggtgtgaggttttataatgacccagctggctatgcaatgaatagatatgcatattatgtgtgctacaaatgcagaaaggcatattttggtggtgaagctcgctgcgatgctgaggctggacggggagatgattatgatcccagagagctcatttgtggtgcctgttctgatgtttccagggctcagatgtgtcccaaacatggcacagactttttggaatataaatgtcgctactgctgttcagtggctgtttttttctgttttggaacaacacatttttgtaatgcttgtcatgatgattttcaaagaatgactagcattcctaaggaagaactaccacactgtcctgcaggtcccaaaggcaagcagttagaaggaactgaatgtccactccatgttgttcatccacccactggggaagagtttgctctgggatgtggagtgtgcagaaatgcccacactttttagaacacgcagatcctttgtctacagagagaaaaattgccttcatcccccaagaggatgcggtgaagtttaaactctgctcaggataaggacgggaccatttttacatccatgaaaatgaaccattcacagtgcaagaaggataccaaataccatgtacataattcttgctatgaaaagtttccccattattttggtttatcttcttttgaacaaatgacatcaaacttgtgaggtgtttgcatgtggccattaccgtcattggcctgtgaagcattggacatttatagataattgatataaaagaatcgccatgcccatggactaagaacgatgctggctttcaagcaaaaaagaaaaataatcattgtttattgtatactgcctttttgtaatcctgtacaattgcatcacgggtggggataaaaagaggaatattctggtttatttcctagactgttatttaaaaaaaaaaaaaacattgtgttaggacagcatataaatgtaataagtatcacactgtatataaacatatcaatgtttgtcctgtataagaattactaaattacaaatgcaatttcatttaaacttctaggttaagtttgagcctgaaattttaatgaagtgcaatactgagtgtgcctcattatcttgcagctgtaaacatattggaatgtacatgtcaataaaaccactgtacatttttatacagtgataaagtcta

SEQ ID NO: 357449 - DNA, 7525 bp, Homo sapiens
gaagctatcgagaatcataccgtctgcatctcggccatcgatgggttagtagatcatgtgccagtatcttggtactcataagaaaatacgtagccaataaatagtgtgagaactactaaggaaataaaattgagtccacggcaggagatctgaacctactgatactatcgtgcatggaattcttgggctctgacagtgtcgtacaccaatatgcaacaacctccatttcaaagtgagcagataggcatagtgaaagtcaatggaactatcacttttattgatgagatccataatgatgatggtgtgtggctgaggctgaatgatgagacaataaagaagtatgtccctaacatgaatggttacactgaagcctggtgcctctcttttaatcaacatcttggcaagagtcttctggtccctgttgacgaatctaaaactaatactgatgactttttcaaagacataaactcctgctgcccacaggaagcaacaatgcaagaacaagatatgccattcttgcgaggagggccaggcatgtacaaggtagtgaagacgggaccttcaggtcacaacatcagaagctgccctaaccttagaggtatcccaattggaatgttagttctgggaaacaaagtcaaagcagtgggagaggtaaccaattctgaagggacatgggtgcaactggatcagaacagcatggtagagttctgtgagagtgatgaaggagaggcatggtccttagctagagacagaggcggaaaccagtacctccgacatgaagatgaacaagctcttctggatcagaattctcaaactcctcctccaagccctttctcagtgcaagcttttaataaaggggcaagttgcagtgcccaaggatttgattatggactcggaaatagcaaaggtgatcgaggaaacatctcaacatcttctaaaccagcctctacatcaggaaaatcagagctgtcctctaaacacagcagatcgcttaaacctgatggacgtatgagccggactactgctgatcagaagaagccaaggggcacagaaagtttatctgctagtgaatccctcatcttaaaatctgatgctgcaaagttgaggtcagattcccacagtaggtcattatcccccaaccataacaccttgcagacattgaaatctgatgggaggatgccttctagctccagagctgaatccccaggaccaggttctcggttgtcatctcctaagccaaagactctcccagccaataggtctagcccatcgggtgctagttctccacgctcctcctcaccacatgataaaaatctacctcaaaaaagtactgctcctgttaagacaaagcttgatcctcctcgggaacgttctaaatcagactcttacacacttgatccagataccctccgcaagaagaaaatgcccctcacagaacctttgagaggacggtcaacgtcaccaaaaccaaaatcagtaccaaaggattctacagattcccctggatctgaaaatagagctccctctccccatgtggtacaggaaaacctccacagtgaggtggtcgaagtctgcacctcaagtactttaaaaacaaatagtctaacagacagcacctgcgatgacagcagtgaatttaagagtgtggatgaaggttcaaataaagttcattttagcattggaaaagcaccactgaaagatgaacaggaaatgagagcatctcccaaaataagtcgaaaatgtgctaatagacacaccaggcccaaaaaagaaaaatcgagttttcttttcaaaggagatggatccaagcctttagagccagccaagcaagccatgtctccttctgtggccgaatgtgccagagctgtgtttgcttccttcctctggcatgaaggcatagtacatgatgcaatggcttgttcttctttcctaaagtttcatcctgaactttccaaagaacatgctcctataaggagtagtttaaatagccaacaacctacagaggaaaaagaaaccaagttaaaaaatagacattcattagaaatatcatctgcactgaatatgtttaatattgcaccccatggaccagatatatctaagatgggtagcatcaacaaaaacaaggtattgtctatgcttaaggaaccacctctgcatgaaaaatgtgaggatgggaaaaccgagaccacttttgaaatgtccatgcataacacaatgaagtctaagtctcctcttcccttaactttacaacatttagtggctttttgggaagacatctctttggctactatcaaagctgcttcccagaatatgatttttccaagtcctggttcctgtgcagttcttaaaaagaaagagtgtgagaaagagaataagaagtccaaaaaggaaaaaaagaaaaaagaaaaggcagaagttaggcccaggggtaatttgtttggagagatggcccagctggcagtaggaggaccagagaaagataccatctgtgaactgtgtggggagtcacatccatacccggtgacctatcacatgagacaagctcacccaggttgtggccgatatgctggtggacaaggttacaatagcattgggcatttttgtggaggatgggctggtaactgtggtgatggtggcataggaggaagcacttggtatctggtatgtgatcgctgtagagaaaaatacctccgcgaaaaacaggctgctgcaagggagaaggtcaaacaatctaggagaaaaccaatgcaagtcaagacccctcgtgccttgcccaccatggaagctcaccaggtgattaaagccaatgcactcttcctgctgtccctgagcagtgcagcagaaccgagcattctgtgttaccatcctgcaaagccattccaatctcagttgcccagtgtaaaagaaggcatttctgaggatcttcctgtgaaaatgccttgtctctacctgcagacattagctaggcatcatcatgaaaattttgtgggctatcaagatgacaatctattccaggatgaaatgagatatctacgttcaacatctgtacctgccccgtatatatcagtaactcctgatgcaagtcctaatgtatttgaagagccagagagcaatatgaagtctatgccaccaagtttagaaaccagtcccataactgatactgatcttgcaaagagaactgtcttccaaagatcatactcagttgttgcttccgaatatgataaacaacactccattttacctgcacgagttaaagctattcctagaagaagagttaacagtggagacactgaagttggttcttcccttttgagacatccgtctcctgagctttctcggctaatctcagcccacagctctctttctaaaggagaacgaaatttccagtggccagttttagcttttgttatacaacatcatgatctagaaggtcttgaaatagcaatgaaacaggccctaaggaaatctgcttgtcgagtttttgctatggaggctttcaactggcttctgtgtaatgtcatccaaaccacttctctccatgatattctgtggcattttgtggcatcactgactcctgcaccagtggaaccagaggaagaagaggatgaagaaaataaaacaagcaaagaaaattcagaacaagagaaagatacaagagtatgtgaacatccactctcagacatagtgattgccggggaagctgctcatcctttaccacacacctttcaccgcttgctgcagaccatctcagaccttatgatgtctctccccagcggcagttcattacagcaaatggccctgaggtgctggagtctcaaattcaagcaatctgatcaccagttccttcatcagagcaacgtctttcatcacattaacaatattttgtcaaagtcagatgatggcgatagtgaagagagttttagcatcagtatacagtctggctttgaagctatgagtcaggaattatgcatagtaatgtgcttaaaggacttaaccagcattgttgacataaaaacttcaagccgacctgccatgattggcagtttgacagacggctccacagaaaccttttgggaatcaggagatgaagataaaaacaaaactaagaacatcaccatcaactgtgtaaaaggaatcaatgcccgctatgtgtctgttcacgtggacaattcccgagatcttgggaataaagttacctcaatgaccttcttaactggcaaagcagtagaagatttgtgcagaataaagcaggttgatctggattccaggcacattggctgggtaacaagtgaacttccaggaggggataatcacatcataaaaattgaattaaaaggcccagaaaatacactgagagttcgacaagtcaaagtcctgggctggaaagatggtgaaagcacaaaaatagctggccagatttcagccagtgtggcccagcagaggaactgtgaagctgagactctgcgagtattcagactgattacgtctcaagtatttggaaagctcatctctggagatgctgaacctacaccagaacaagaggaaaaagcactattgtcatcacctgaaggagaagaaaaagtatacaatgcaacatcagatgctgacctgaaagaacatatggttggaatcatattcagcaggagtaagctgactaacttacaaaaacaggtgtgtgctcatattgtccaagctattcgcatggaagctaccagagtccgtgaagaatgggaacatgctatatcaagcaaagaaaatgccaattctcagccaaatgatgaagatgcctcctctgatgcctactgctttgagctgctctctatggttttagcactgagtggctctaacgttggccggcaatatctggctcaacagctaaccctgcttcaggatctcttctcgctgcttcacacagcctctcctagagtccagagacaggtaacctctttactaagaagagttttgcctgaagtaacccctagtcgtctggccagcatcataggagtgaaatccctccccccagcagatatcagtgatatcattcactcaacagagaaaggagactggaataagctgggtatcttggacatgtttctaggatgcattgccaaagcactcactgtacagctaaaagccaaaggaaccaccatcactggaacagctggtaccactgtgggcaaaggagttacaacagttactcttccgatgattttcaattccagttatctccgacgaggtgaaagtcattggtggatgaagggctcaacccctacccagatctcagagatcatcattaaacttatcaaggatatggcagcaggtcatctgtcagaagcttggtcccgagtgacaaaaaatgctattgcagaaaccatcattgccttgaccaagatggaagaagaatttaggtctccagtgagatgtattgcaacaactagactctggcttgctctcgcatccctatgtgttcttgatcaggaccacgtagatcgtctctcctcggggagatggatgggaaaggatggacaacaaaaacaaatgcctatgtgtgataaccatgatgatggtgaaactgcagcaatcattttatgcaatgtctgtggaaatttatgtacagactgtgacagattccttcaccttcatcgaagaaccaaaactcatcaaagacaggtcttcaaagaagaagaagaagctataaaggttgaccttcatgaaggttgtggtagaaccaaattgttctggttgatggcactggcagattctaaaacaatgaaggcaatggtggaattccgagaacacacaggcaaacccaccacgagtagctcagaagcatgtcgcttctgtggttccaggagtggaacagagttatctgctgttggcagtgtttgttctgatgcagattgccaggaatacgctaagatagcctgtagtaagacgcatccttgtggccatccatgcgggggtgttaaaaacgaagagcactgtctgccctgtctacacggctgtgacaaaagtgccacaagcctgaagcaagacgccgatgacatgtgcatgatatgtttcaccgaagcgctctcggcagcaccagccattcagctggattgtagtcacatattccacttacagtgctgtcggcgagtattagaaaatcgatggcttggcccaaggataacatttggatttatatcttgtcccatttgcaagaacaaaattaatcacatagtactaaaagacctacttgatccaataaaagaactctatgaggatgtcagaagaaaagccttaatgagattggaatatgaaggtctgcataagagtgaagctatcacaactcctggtgtgaggttttataatgacccagctggctatgcaatgaatagatatgcatattatgtgtgctacaaatgcagaaaggcatattttggtggtgaagctcgctgcgatgctgaggctggacggggagatgattatgatcccagagagctcatttgtggtgcctgttctgatgtttccagggctcagatgtgtcccaaacatggcacagactttttggaatataaatgtcgctactgctgttcagtggctgtttttttctgttttggaacaacacatttttgtaatgcttgtcatgatgattttcaaagaatgactagcattcctaaggaagaactaccacactgtcctgcaggtcccaaaggcaagcagttagaaggaactgaatgtccactccatgttgttcatccacccactggggaagagtttgctctgggatgtggagtgtgcagaaatgcccacactttttagaacacgcagatcctttgtctacagagagaaaaattgccttcatcccccaagaggatgcggtgaagtttaaactctgctcaggataaggacgggaccatttttacatccatgaaaatgaaccattcacagtgcaagaaggataccaaataccatgtacataattcttgctatgaaaagtttccccattattttggtttatcttcttttgaacaaatgacatcaaacttgtgaggtgtttgcatgtggccattaccgtcattggcctgtgaagcattggacatttatagataattgatataaaagaatcgccatgcccatggactaagaacgatgctggctttcaagcaaaaaagaaaaataatcattgtttattgtatactgcctttttgtaatcctgtacaattgcatcacgggtggggataaaaagaggaatattctggtttatttcctagactgttatttaaaaaaaaaaaaaacattgtgttaggacagcatataaatgtaataagtatcacactgtatataaacatatcaatgtttgtcctgtataagaattactaaattacaaatgcaatttcatttaaacttctaggttaagtttgagcctgaaattttaatgaagtgcaatactgagtgtgcctcattatcttgcagctgtaaacatattggaatgtacatgtcaataaaaccactgtacatttttatacagtgataaagtcta

SEQ ID NO: 357450 - DNA, 6654 bp, Homo sapiens
gtaaaaaccggctttctagatggtgttgatgagaaggcatgtctgtattagaatctccctacagagactctgccaaaggggccccattggcagagctgtcctctaaacacagcagatcgcttaaacctgatggacgtatgagccggactactgctgatcagaagaagccaaggggcacagaaagtttatctgctagtgaatccctcatcttaaaatctgatgctgcaaagttgaggtcagattcccacagtaggtcattatcccccaaccataacaccttgcagacattgaaatctgatgggaggatgccttctagctccagagctgaatccccaggaccaggttctcggttgtcatctcctaagccaaagactctcccagccaataggtctagcccatcgggtgctagttctccacgctcctcctcaccacatgataaaaatctacctcaaaaaagtactgctcctgttaagacaaagcttgatcctcctcgggaacgttctaaatcagactcttacacacttgatccagataccctccgcaagaagaaaatgcccctcacagaacctttgagaggacggtcaacgtcaccaaaaccaaaatcagtaccaaaggattctacagattcccctggatctgaaaatagagctccctctccccatgtggtacaggaaaacctccacagtgaggtggtcgaagtctgcacctcaagtactttaaaaacaaatagtctaacagacagcacctgcgatgacagcagtgaatttaagagtgtggatgaaggttcaaataaagttcattttagcattggaaaagcaccactgaaagatgaacaggaaatgagagcatctcccaaaataagtcgaaaatgtgctaatagacacaccaggcccaaaaaagaaaaatcgagttttcttttcaaaggagatggatccaagcctttagagccagccaagcaagccatgtctccttctgtggccgaatgtgccagagctgtgtttgcttccttcctctggcatgaaggcatagtacatgatgcaatggcttgttcttctttcctaaagtttcatcctgaactttccaaagaacatgctcctataaggagtagtttaaatagccaacaacctacagaggaaaaagaaaccaagttaaaaaatagacattcattagaaatatcatctgcactgaatatgtttaatattgcaccccatggaccagatatatctaagatgggtagcatcaacaaaaacaaggtattgtctatgcttaaggaaccacctctgcatgaaaaatgtgaggatgggaaaaccgagaccacttttgaaatgtccatgcataacacaatgaagtctaagtctcctcttcccttaactttacaacatttagtggctttttgggaagacatctctttggctactatcaaagctgcttcccagaatatgatttttccaagtcctggttcctgtgcagttcttaaaaagaaagagtgtgagaaagagaataagaagtccaaaaaggaaaaaaagaaaaaagaaaaggcagaagttaggcccaggggtaatttgtttggagagatggcccagctggcagtaggaggaccagagaaagataccatctgtgaactgtgtggggagtcacatccatacccggtgacctatcacatgagacaagctcacccaggttgtggccgatatgctggtggacaaggttacaatagcattgggcatttttgtggaggatgggctggtaactgtggtgatggtggcataggaggaagcacttggtatctggtatgtgatcgctgtagagaaaaatacctccgcgaaaaacaggctgctgcaagggagaaggtcaaacaatctaggagaaaaccaatgcaagtcaagacccctcgtgccttgcccaccatggaagctcaccaggtgattaaagccaatgcactcttcctgctgtccctgagcagtgcagcagaaccgagcattctgtgttaccatcctgcaaagccattccaatctcagttgcccagtgtaaaagaaggcatttctgaggatcttcctgtgaaaatgccttgtctctacctgcagacattagctaggcatcatcatgaaaattttgtgggctatcaagatgacaatctattccaggatgaaatgagatatctacgttcaacatctgtacctgccccgtatatatcagtaactcctgatgcaagtcctaatgtatttgaagagccagagagcaatatgaagtctatgccaccaagtttagaaaccagtcccataactgatactgatcttgcaaagagaactgtcttccaaagatcatactcagttgttgcttccgaatatgataaacaacactccattttacctgcacgagttaaagctattcctagaagaagagttaacagtggagacactgaagttggttcttcccttttgagacatccgtctcctgagctttctcggctaatctcagcccacagctctctttctaaaggagaacgaaatttccagtggccagttttagcttttgttatacaacatcatgatctagaaggtcttgaaatagcaatgaaacaggccctaaggaaatctgcttgtcgagtttttgctatggaggctttcaactggcttctgtgtaatgtcatccaaaccacttctctccatgatattctgtggcattttgtggcatcactgactcctgcaccagtggaaccagaggaagaagaggatgaagaaaataaaacaagcaaagaaaattcagaacaagagaaagatacaagagtatgtgaacatccactctcagacatagtgattgccggggaagctgctcatcctttaccacacacctttcaccgcttgctgcagaccatctcagaccttatgatgtctctccccagcggcagttcattacagcaaatggccctgaggtgctggagtctcaaattcaagcaatctgatcaccagttccttcatcagagcaacgtctttcatcacattaacaatattttgtcaaagtcagatgatggcgatagtgaagagagttttagcatcagtatacagtctggctttgaagctatgagtcaggaattatgcatagtaatgtgcttaaaggacttaaccagcattgttgacataaaaacttcaagccgacctgccatgattggcagtttgacagacggctccacagaaaccttttgggaatcaggagatgaagataaaaacaaaactaagaacatcaccatcaactgtgtaaaaggaatcaatgcccgctatgtgtctgttcacgtggacaattcccgagatcttgggaataaagttacctcaatgaccttcttaactggcaaagcagtagaagatttgtgcagaataaagcaggttgatctggattccaggcacattggctgggtaacaagtgaacttccaggaggggataatcacatcataaaaattgaattaaaaggcccagaaaatacactgagagttcgacaagtcaaagtcctgggctggaaagatggtgaaagcacaaaaatagctggccagatttcagccagtgtggcccagcagaggaactgtgaagctgagactctgcgagtattcagactgattacgtctcaagtatttggaaagctcatctctggagatgctgaacctacaccagaacaagaggaaaaagcactattgtcatcacctgaaggagaagaaaaagtatacaatgcaacatcagatgctgacctgaaagaacatatggttggaatcatattcagcaggagtaagctgactaacttacaaaaacaggtgtgtgctcatattgtccaagctattcgcatggaagctaccagagtccgtgaagaatgggaacatgctatatcaagcaaagaaaatgccaattctcagccaaatgatgaagatgcctcctctgatgcctactgctttgagctgctctctatggttttagcactgagtggctctaacgttggccggcaatatctggctcaacagctaaccctgcttcaggatctcttctcgctgcttcacacagcctctcctagagtccagagacaggtaacctctttactaagaagagttttgcctgaagtaacccctagtcgtctggccagcatcataggagtgaaatccctccccccagcagatatcagtgatatcattcactcaacagagaaaggagactggaataagctgggtatcttggacatgtttctaggatgcattgccaaagcactcactgtacagctaaaagccaaaggaaccaccatcactggaacagctggtaccactgtgggcaaaggagttacaacagttactcttccgatgattttcaattccagttatctccgacgaggtgaaagtcattggtggatgaagggctcaacccctacccagatctcagagatcatcattaaacttatcaaggatatggcagcaggtcatctgtcagaagcttggtcccgagtgacaaaaaatgctattgcagaaaccatcattgccttgaccaagatggaagaagaatttaggtctccagtgagatgtattgcaacaactagactctggcttgctctcgcatccctatgtgttcttgatcaggaccacgtagatcgtctctcctcggggagatggatgggaaaggatggacaacaaaaacaaatgcctatgtgtgataaccatgatgatggtgaaactgcagcaatcattttatgcaatgtctgtggaaatttatgtacagactgtgacagattccttcaccttcatcgaagaaccaaaactcatcaaagacaggtcttcaaagaagaagaagaagctataaaggttgaccttcatgaaggttgtggtagaaccaaattgttctggttgatggcactggcagattctaaaacaatgaaggcaatggtggaattccgagaacacacaggcaaacccaccacgagtagctcagaagcatgtcgcttctgtggttccaggagtggaacagagttatctgctgttggcagtgtttgttctgatgcagattgccaggaatacgctaagatagcctgtagtaagacgcatccttgtggccatccatgcgggggtgttaaaaacgaagagcactgtctgccctgtctacacggctgtgacaaaagtgccacaagcctgaagcaagacgccgatgacatgtgcatgatatgtttcaccgaagcgctctcggcagcaccagccattcagctggattgtagtcacatattccacttacagtgctgtcggcgagtattagaaaatcgatggcttggcccaaggataacatttggatttatatcttgtcccatttgcaagaacaaaattaatcacatagtactaaaagacctacttgatccaataaaagaactctatgaggatgtcagaagaaaagccttaatgagattggaatatgaaggtctgcataagagtgaagctatcacaactcctggtgtgaggttttataatgacccagctggctatgcaatgaatagatatgcatattatgtgtgctacaaatgcagaaaggcatattttggtggtgaagctcgctgcgatgctgaggctggacggggagatgattatgatcccagagagctcatttgtggtgcctgttctgatgtttccagggctcagatgtgtcccaaacatggcacagactttttggaatataaatgtcgctactgctgttcagtggctgtttttttctgttttggaacaacacatttttgtaatgcttgtcatgatgattttcaaagaatgactagcattcctaaggaagaactaccacactgtcctgcaggtcccaaaggcaagcagttagaaggaactgaatgtccactccatgttgttcatccacccactggggaagagtttgctctgggatgtggagtgtgcagaaatgcccacactttttagaacacgcagatcctttgtctacagagagaaaaattgccttcatcccccaagaggatgcggtgaagtttaaactctgctcaggataaggacgggaccatttttacatccatgaaaatgaaccattcacagtgcaagaaggataccaaataccatgtacataattcttgctatgaaaagtttccccattattttggtttatcttcttttgaacaaatgacatcaaacttgtgaggtgtttgcatgtggccattaccgtcattggcctgtgaagcattggacatttatagataattgatataaaagaatcgccatgcccatggactaagaacgatgctggctttcaagcaaaaaagaaaaataatcattgtttattgtatactgcctttttgtaatcctgtacaattgcatcacgggtggggataaaaagaggaatattctggtttatttcctagactgttatttaaaaaaaaaaaaaacattgtgttaggacagcatataaatgtaataagtatcacactgtatataaacatatcaatgtttgtcctgtataagaattactaaattacaaatgcaatttcatttaaacttctaggttaagtttgagcctgaaattttaatgaagtgcaatactgagtgtgcctcattatcttgcagctgtaaacatattggaatgtacatgtcaataaaaccactgtacatttttatacagtgataaagtcta

SEQ ID NO: 357451 - DNA, 14067 bp, Homo sapiens
tcttggagcgttctcagtttctcaacagatcttcacttgctaggcagccagaagccggcggcagtggcggcaccgcctcctcctcacattcccggggtggcggggttagatgagcggccccagtcgcggcgccgggggcgctgttcatgccggttcccgacggctccgtggctgctgcggggctggggctggggctacccgccgcggactccccgggtcactaccagctgctgctgtcaggccgggccctggccgaccgctaccggaggatttataccgctgcgctcaatgacagggaccaggggggcggcagcgctggacacccagcctccaggaataagaaaattttaaataagaagaaattgaaaagaaaacagaagagcaaatcaaaagtgaagacaagaagcaagtctgaaaacttagagaatacagtaatcataccagatatcaaactacatagcaatccttctgctttcaatatttactgtaatgtacgccattgcgttctggaatggcagaaaaaggaaatatcattggcagccgcatctaagaactctgtgcagagtggagaatcagatagtgatgaagaagaggaatccaaagagccccctatcaagcttccaaagattattgaggttggcctttgtgaagtttttgaattgatcaaagagacacgattttctcatccatccctgtgtctcaggagtctccaagccctgctcaacgtgctgcagggccagcagccagaagtgctccagtctgagccacctgaggtcctagagtctctcttccagcttcttttggaaatcaccgttcgaagtactgggatgaatgacagcacaggacagtccttaacagcactttcctgtgcttgcctctttagtctggtggcttcttggggagaaacaggaaggacacttcaggccatctctgctatcctcaccaacaatggaagccatgcttgccaaactattcagagacttaggaatgccattagagctcatagcaggagtataagaactacgttcatggaaagcctcccagaggatatgaggtgccaacaattctaaattcgctacagagaagtgtacaagcagttttggtgggaaaaattcaaattcaggactggtttagtaatggcattaagaaagcagctttaatgcacaagtggccattaaaagaaatatctgttgatgaagatgaccaatgtctacttcagaatgatggattttttctttatctattatgcaaggatggattatataaaataggctctggatacagtggaacagttaggggccatatatacaattctacatcccgtattagaaacagaaaagaaaaaaagtcttggttagggtatgctcagggttatttattatatagagatgtgaataaccacagcatgacagccataaggataagccctgaaacactggagcaagatggtactgtgatgttaccagattgccacactgaaggtcaaaatattttattcactgatggagaatatattaatcagatagctgcttcaagagatgatggctttgttgtcagaatatttgccacaagcactgaacctgttctacagcaagaattgcaacttaaactggctagaaaatgcttacatgcctgtggtatctcactattcgatctggaaaaggacttgcatattataagtacaggatttgatgaggagtcagcaattcttggtgcaggacgagagtttgcgctaatgaaaacagcaaatggaaagatatattacactggcaaataccagagtcttggaatcaaacaaggtggtccttcagcaggaaaatgggttgagctaccaattacaaaatctccaaagatagtacacttctcagttggacacgatggctctcacgcccttttagttgcagaagatgggagcatattctttacaggatctgctagtaaaggagaagatggagaatcaattaagagcagacggcaatccaaaccttataaacctaaaaagataattaagatggaaggaaagattgtggtatatacagcctgcaataatggaagtagttctgttatttctaaagatggagaactctacatgtttggaaaagatgccatttactctgatagttcaagtttggtaactgatttgaagggccattttgtaactcaggtagctatgggcaaagctcacacttgtgttttaatgaagaatggagaggtgtggacatttggtgtaaataataaaggacagtgtggacgagatactggtgccatgaaccaaggtgggaaagggtttggagttgaaaatatggcaacagcaatggatgaagacctggaagaagaactagatgaaaaagatgagaagtctatgatgtgccctccaggcatgcacaaatggaagctggagcagtgcatggtttgcactgtctgtggagactgtacaggttatggagccagctgtgtcagtagtggacggccagacagagtccccggagggatctgtggttgtggttccggagaatctggttgtgctgtgtgtggatgttgcaaggcctgtgcaagagagttagatggtcaagaggcaagacaaagaggaattcttgatgcagtgaaagaaatgatacctttagatcttcttttagctgtcccagtgcccggggttaacattgaagaacaccttcagttacgacaagaagaaaaacggcaacgtgtaatcagaaggcacagattagaggaaggaagaggcccccttgtatttgctggtcctatttttatgaaccatcgagaacaggctctagccagactcagatcccatccagcacacgtaaagcataaacgggacaagcacaaagatggaagtggagaaagaggcgaaaaggatgcaagcaaaatcacaacataccctccaggctctgtgcgatttgactgtgagctccgggcagtccaagtcagctgtggatttcaccattcagtggttttaatggaaaatggagatgtctatacatttggttatgggcagcatgggcagctaggacatggagatgtcaactccaggggatgtcccactcttgttcaagcattgccaggccctagcacacaagtcactgcaggcagcaaccatacggcagtacttttaatggatggacaggtcttcacatttggaagtttttctaaaggacaactgggcagaccaattttggatgtgccatattggaatgcaaagccagctcccatgcctaacattggatcaaaatatggaagaaaagctacttggataggtgcaagtggggaccaaacttttttacgaattgatgaagcacttattaattctcatgtacttgctacatcagaaatttttgccagtaaacacataataggcttggtacctgcttctatatcagaacctcctccatttaaatgccttctgataaataaagtggatgggagttgtaaaacttttaatgactcagaacaagaggatctgcaaggatttggtgtgtgtcttgatcctgtatatgatgtaatttggaggtttcgaccaaatactagagagctgtggtgttacaatgcggtggttgctgatgccaggcttccctctgcagcagacatgcagtccagatgtagtatcctaagtcctgaacttgccttaccaacaggatcaagggccctcactacccgatctcatgcagctttgcacattttaggttgtcttgataccttggcagctatgcaggacttaaaaatgggtgttgcaagtacagaggaagagactcaagcagtaatgaaggtttattctaaagaagattatagtgtggtaaacaggtttgaaagtcatggaggaggctggggttattctgcccattcagtagaagctatacgtttcagtgccgacactgatattttacttggtggtcttggtctgtttggaggtagaggagaatatactgctaaaattaagctgtttgaattgggtcctgatggaggagatcatgaaactgatggtgaccttcttgcagagactgatgtattggcttatgactgtgctgctagagaaaaatatgcaatgatgtttgatgagcctgttctcctgcaagctgggtggtggtatgtggcatgggcccgagtgtcaggacccagcagtgactgtggatctcatggacaggcatctattaccacagatgatggggttgttttccagttcaagagttcaaagaaatcaaataatggtacagatgttaatgcgggtcagatacctcagttattatacagacttccaaccagtgatggcagtgcttcaaaaggcaaacagcaaaccagtgaacctgtacacattttaaagaggtcttttgcaagaactgtctcagtggaatgttttgagtcattgttgagtattcttcactggagctggaccaccttagtcttaggagttgaagaacttagaggattaaaaggattccagttcacagctacactcctagatttagagagactgcgctttgtgggtacctgttgtctgaggttattgcgtgtctatacctgtgaaatttacccagtgtcagctacaggaaaagcagttgtagaagaaactagcaaattagcagagtgtattggaaaaaccagaactttgttaagaaaaattttatcagaaccacttgatcactgcatggtgaaattggataatgatcctcaaggatatctcagtcaacccttgagtcttctagaagctgtccttcaggaatgtcataatactttcactgcctgctttcattctttctacccaactcctgccttacagtgggcttgcctttgtgatctgctgaattgtttggatcaggatatccaagaagcaaacttcaagacatcaagtagccgactccttgcagctgttatgtcagctctgtgtcacacgtctgttaagctgacttccatcttcccgattgcgtatgatggagaagtattactacgatcaattgttaaacaagttagtacagagaacgactcaacactagttcatcgttttccccttttggtggcacatatggaaaaactcagccagagtgaagagaatatctcagggatgacaagcttccgtgaagttctggagaaaatgctggtcattgttgtgctaccagtcaggaacagcctgaggagagaaaatgaactcttctcctcccacctcgtctctaacacctgtggattactggccagcattgtcagtgaactgacagcgtcagccctgggatctgaggttgatggacttaattctcttcactctgtaaaagctagtgctaaccgatttacaaaaacaagtcagggcagaagttggaacactgggaacgggtcccctgatgcaatctgtttttcagtagacaaacctggaatagttgtggttggtttctctgtctatggaggaggtggaattcatgaatatgaattagaggtgttggttgatgatagtgaacatgcaggagattcaactcattcccacagatggacatctctggaattagtgaaaggaacgtacacaacggatgactcacccagtgatatagctgagatcagacttgacaaagtggttcctttaaaggaaaatgttaaatatgctgtgcgcttgaggaactatggaagccgtacagccaatggagatggaggaatgaccacagttcagtgccctgatggtgtgacattcacattcagcacgtgcagcttgagcagtaacggcacaaaccaaaccagaggacagatcccacagatactctactataggagtgaatttgatggagatttacaatcccaacttctgagtaaagccaatgaagaagataaaaactgtagcagagcattgtctgttgtaagcactgtcgttcgagcctctaaggacctcctgcacagagctcttgctgtggatgctgatgacattccagaactgctgagttcttccagtctgttttccatgctgctcccccttattatagcctacataggaccagtagctgctgctattcccaaggtggctgtagaagtctttggccttgtccaacaattgcttccgtcagttgccattttgaatcagaagtatgcaccgcctgccttcaaccctaatcagtcgacagatagcaccacaggaaaccagcctgaacagggcctctctgcttgtacaacctccagtcactatgctgtcatagagagtgagcacccgtataaacctgcctgtgtgatgcattacaaggtgacattcccagaatgtgtgaggtggatgacaatcgaatttgaccctcagtgtggtactgcacagtcagaagatgtccttcgtttgttgattcctgtcagaactgttcagaattcaggatatggaccaaaattgacatctgttcatgaaaatcttaattcatggatagaattaaagaaattttcaggatcctctgggtggcctactatggttttggtgttgccaggaaatgaggcccttttttcattggagactgcatcagattatgtgaaagatgacaaagcttctttctatggttttaagtgttttgcaattggatatgaatttagccctggacctgatgagggagtcatccaattggaaaaagaattagccaatcttggtggggtttgtgcagcagctctgatgaagaaggacctagcacttcctattggtaatgaattagaagaagaccttgaaattcttgaggaggctgcattgcaggtgtgcaaaacccattctggaattcttggaaagggtctagctctttctcattcaccaactatattagaagcacttgagggaaatttaccactccaaatccaaagcaatgaacagtcttttctggatgattttattgcctgtgtcccaggatcaagtggtggaaggcttgcaaggtggcttcagccagattcatatgcggatcctcagaaaacatctttgatcctgaataaggatgatattcgttgtggttggcctaccaccataactgttcaaacaaaagaccagtatggggatgtggtacatgttcccaatatgaaggtggaagtgaaagctgtccctgtttctcagaaaaaaatgtctttacaacaagatcaagcaaagaaacctcaaaggattcctggcagtcctgcagtaacagctgcatcttctaatactgacatgacttatggagggctggcatcaccaaagctagatgtttcatatgaaccaatgatagtgaaggaagctcgatatattgccataacaatgatgaaggtttatgaaaattattcatttgaagaactacgttttgcatcaccaactcctaagagacccagtgagaatatgctgatccgtgtcaataatgatgggacttattgtgcaaattggactccaggggctattggactctacactcttcatgttaccattgatggcattgaaatcgatgctggtctggaagtaaaagtaaaagacccaccaaaagggatgataccaccaggaactcagttggtcaaaccaaagtctgaacctcagcctaataaggttcgaaaatttgtggccaaggacagtgcggggcttcgcatccgtagccacccttcccttcagagtgagcagataggcatagtgaaagtcaatggaactatcacttttattgatgagatccataatgatgatggtgtgtggctgaggctgaatgatgagacaataaagaagtatgtccctaacatgaatggttacactgaagcctggtgcctctcttttaatcaacatcttggcaagagtcttctggtccctgttgacaatatctttaatgctagccaaggagtcagggatttggacgtattttcatggacttccaaagcttttttcccccaggaatctaaaactaatactgatgactttttcaaagacataaactcctgctgcccacaggaagcaacaatgcaagaacaagatatgccattcttgcgaggagggccaggcatgtacaaggtagtgaagacgggaccttcaggtcacaacatcagaagctgccctaaccttagaggtatcccaattggaatgttagttctgggaaacaaagtcaaagcagtgggagaggtaaccaattctgaagggacatgggtgcaactggatcagaacagcatggtagagttctgtgagagtgatgaaggagaggcatggtccttagctagagacagaggcggaaaccagtacctccgacatgaagatgaacaagctcttctggatcagaattctcaaactcctcctccaagccctttctcagtgcaagcttttaataaaggggcaagttgcagtgcccaaggatttgattatggactcggaaatagcaaaggtgatcgaggaaacatctcaacatcttctaaaccagcctctacatcaggaaaatcagagctgtcctctaaacacagcagatcgcttaaacctgatggacgtatgagccggactactgctgatcagaagaagccaaggggcacagaaagtttatctgctagtgaatccctcatcttaaaatctgatgctgcaaagttgaggtcagattcccacagtaggtcattatcccccaaccataacaccttgcagacattgaaatctgatgggaggatgccttctagctccagagctgaatccccaggaccaggttctcggttgtcatctcctaagccaaagactctcccagccaataggtctagcccatcgggtgctagttctccacgctcctcctcaccacatgataaaaatctacctcaaaaaagtactgctcctgttaagacaaagcttgatcctcctcgggaacgttctaaatcagactcttacacacttgatccagataccctccgcaagaagaaaatgcccctcacagaacctttgagaggacggtcaacgtcaccaaaaccaaaatcagtaccaaaggattctacagattcccctggatctgaaaatagagctccctctccccatgtggtacaggaaaacctccacagtgaggtggtcgaagtctgcacctcaagtactttaaaaacaaatagtctaacagacagcacctgcgatgacagcagtgaatttaagagtgtggatgaaggttcaaataaagttcattttagcattggaaaagcaccactgaaagatgaacaggaaatgagagcatctcccaaaataagtcgaaaatgtgctaatagacacaccaggcccaaaaaagaaaaatcgagttttcttttcaaaggagatggatccaagcctttagagccagccaagcaagccatgtctccttctgtggccgaatgtgccagagctgtgtttgcttccttcctctggcatgaaggcatagtacatgatgcaatggcttgttcttctttcctaaagtttcatcctgaactttccaaagaacatgctcctataaggagtagtttaaatagccaacaacctacagaggaaaaagaaaccaagttaaaaaatagacattcattagaaatatcatctgcactgaatatgtttaatattgcaccccatggaccagatatatctaagatgggtagcatcaacaaaaacaaggtattgtctatgcttaaggaaccacctctgcatgaaaaatgtgaggatgggaaaaccgagaccacttttgaaatgtccatgcataacacaatgaagtctaagtctcctcttcccttaactttacaacatttagtggctttttgggaagacatctctttggctactatcaaagctgcttcccagaatatgatttttccaagtcctggttcctgtgcagttcttaaaaagaaagagtgtgagaaagagaataagaagtccaaaaaggaaaaaaagaaaaaagaaaaggcagaagttaggcccaggggtaatttgtttggagagatggcccagctggcagtaggaggaccagagaaagataccatctgtgaactgtgtggggagtcacatccatacccggtgacctatcacatgagacaagctcacccaggttgtggccgatatgctggtggacaaggttacaatagcattgggcatttttgtggaggatgggctggtaactgtggtgatggtggcataggaggaagcacttggtatctggtatgtgatcgctgtagagaaaaatacctccgcgaaaaacaggctgctgcaagggagaaggtcaaacaatctaggagaaaaccaatgcaagtcaagacccctcgtgccttgcccaccatggaagctcaccaggtgattaaagccaatgcactcttcctgctgtccctgagcagtgcagcagaaccgagcattctgtgttaccatcctgcaaagccattccaatctcagttgcccagtgtaaaagaaggcatttctgaggatcttcctgtgaaaatgccttgtctctacctgcagacattagctaggcatcatcatgaaaattttgtgggctatcaagatgacaatctattccaggatgaaatgagatatctacgttcaacatctgtacctgccccgtatatatcagtaactcctgatgcaagtcctaatgtatttgaagagccagagagcaatatgaagtctatgccaccaagtttagaaaccagtcccataactgatactgatcttgcaaagagaactgtcttccaaagatcatactcagttgttgcttccgaatatgataaacaacactccattttacctgcacgagttaaagctattcctagaagaagagttaacagtggagacactgaagttggttcttcccttttgagacatccgtctcctgagctttctcggctaatctcagcccacagctctctttctaaaggagaacgaaatttccagtggccagttttagcttttgttatacaacatcatgatctagaaggtcttgaaatagcaatgaaacaggccctaaggaaatctgcttgtcgagtttttgctatggaggctttcaactggcttctgtgtaatgtcatccaaaccacttctctccatgatattctgtggcattttgtggcatcactgactcctgcaccagtggaaccagaggaagaagaggatgaagaaaataaaacaagcaaagaaaattcagaacaagagaaagatacaagagtatgtgaacatccactctcagacatagtgattgccggggaagctgctcatcctttaccacacacctttcaccgcttgctgcagaccatctcagaccttatgatgtctctccccagcggcagttcattacagcaaatggccctgaggtgctggagtctcaaattcaagcaatctgatcaccagttccttcatcagagcaacgtctttcatcacattaacaatattttgtcaaagtcagatgatggcgatagtgaagagagttttagcatcagtatacagtctggctttgaagctatgagtcaggaattatgcatagtaatgtgcttaaaggacttaaccagcattgttgacataaaaacttcaagccgacctgccatgattggcagtttgacagacggctccacagaaaccttttgggaatcaggagatgaagataaaaacaaaactaagaacatcaccatcaactgtgtaaaaggaatcaatgcccgctatgtgtctgttcacgtggacaattcccgagatcttgggaataaagttacctcaatgaccttcttaactggcaaagcagtagaagatttgtgcagaataaagcaggttgatctggattccaggcacattggctgggtaacaagtgaacttccaggaggggataatcacatcataaaaattgaattaaaaggcccagaaaatacactgagagttcgacaagtcaaagtcctgggctggaaagatggtgaaagcacaaaaatagctggccagatttcagccagtgtggcccagcagaggaactgtgaagctgagactctgcgagtattcagactgattacgtctcaagtatttggaaagctcatctctggagatgctgaacctacaccagaacaagaggaaaaagcactattgtcatcacctgaaggagaagaaaaagtatacaatgcaacatcagatgctgacctgaaagaacatatggttggaatcatattcagcaggagtaagctgactaacttacaaaaacaggtgtgtgctcatattgtccaagctattcgcatggaagctaccagagtccgtgaagaatgggaacatgctatatcaagcaaagaaaatgccaattctcagccaaatgatgaagatgcctcctctgatgcctactgctttgagctgctctctatggttttagcactgagtggctctaacgttggccggcaatatctggctcaacagctaaccctgcttcaggatctcttctcgctgcttcacacagcctctcctagagtccagagacaggtaacctctttactaagaagagttttgcctgaagtaacccctagtcgtctggccagcatcataggagtgaaatccctccccccagcagatatcagtgatatcattcactcaacagagaaaggagactggaataagctgggtatcttggacatgtttctaggatgcattgccaaagcactcactgtacagctaaaagccaaaggaaccaccatcactggaacagctggtaccactgtgggcaaaggagttacaacagttactcttccgatgattttcaattccagttatctccgacgaggtgaaagtcattggtggatgaagggctcaacccctacccagatctcagagatcatcattaaacttatcaaggatatggcagcaggtcatctgtcagaagcttggtcccgagtgacaaaaaatgctattgcagaaaccatcattgccttgaccaagatggaagaagaatttaggtctccagtgagatgtattgcaacaactagactctggcttgctctcgcatccctatgtgttcttgatcaggaccacgtagatcgtctctcctcggggagatggatgggaaaggatggacaacaaaaacaaatgcctatgtgtgataaccatgatgatggtgaaactgcagcaatcattttatgcaatgtctgtggaaatttatgtacagactgtgacagattccttcaccttcatcgaagaaccaaaactcatcaaagacaggtcttcaaagaagaagaagaagctataaaggttgaccttcatgaaggttgtggtagaaccaaattgttctggttgatggcactggcagattctaaaacaatgaaggcaatggtggaattccgagaacacacaggcaaacccaccacgagtagctcagaagcatgtcgcttctgtggttccaggagtggaacagagttatctgctgttggcagtgtttgttctgatgcagattgccaggaatacgctaagatagcctgtagtaagacgcatccttgtggccatccatgcgggggtgttaaaaacgaagagcactgtctgccctgtctacacggctgtgacaaaagtgccacaagcctgaagcaagacgccgatgacatgtgcatgatatgtttcaccgaagcgctctcggcagcaccagccattcagctggattgtagtcacatattccacttacagtgctgtcggcgagtattagaaaatcgatggcttggcccaaggataacatttggatttatatcttgtcccatttgcaagaacaaaattaatcacatagtactaaaagacctacttgatccaataaaagaactctatgaggatgtcagaagaaaagccttaatgagattggaatatgaaggtctgcataagagtgaagctatcacaactcctggtgtgaggttttataatgacccagctggctatgcaatgaatagatatgcatattatgtgtgctacaaatgcagaaaggcatattttggtggtgaagctcgctgcgatgctgaggctggacggggagatgattatgatcccagagagctcatttgtggtgcctgttctgatgtttccagggctcagatgtgtcccaaacatggcacagactttttggaatataaatgtcgctactgctgttcagtggctgtttttttctgttttggataacacgttcgcgagggtacacgagctcgattcgtatctgtctactc

SEQ ID NO: 357452 - DNA, 2745 bp, Homo sapiens
ggcaaacagactttctcagggtgttcattgaattaaaatatttaggagtaatatttaggaacacctaaattatatgatagttaaatgtttgttcattacaaatcaaggtagcaaataaaggtagttgcagtttgaacctgtttatattttaggttcctgtaatactcatctaaagcagttagcttcactgtgtaaattttatgctaagtgacaaacttctcaaacatagataaccttagtatttctgttatgtttttatcagatgtgagagtaattgcccttgatttccaggaaaagagtattgagaacttaattttttatttatttatttttaaatatcaaaatgatgattagaagttgaattttccataggatcacgaagaaattttagttcaaaagtttgtgcccataatctaaaattccatggtctcactaaaaacaaatatttcctttgataggagatgttatttaagaaaaaagagtttactatggtaatacatttctggtcacttattaaaatactctgttctgctcaatagggtcatctgtcagaagcttggtcccgagtgacaaaaaatgctattgcagaaaccatcattgccttgaccaagatggaagaagaatttaggtctccagtgagatgtattgcaacaactagactctggcttgctctcgcatccctatgtgttcttgatcaggaccacgtagatcgtctctcctcggggagatggatgggaaaggatggacaacaaaaacaaatgcctatgtgtgataaccatgatgatggtgaaactgcagcaatcattttatgcaatgtctgtggaaatttatgtacagactgtgacagattccttcaccttcatcgaagaaccaaaactcatcaaagacaggtcttcaaagaagaagaagaagctataaaggttgaccttcatgaaggttgtggtagaaccaaattgttctggttgatggcactggcagattctaaaacaatgaaggcaatggtggaattccgagaacacacaggcaaacccaccacgagtagctcagaagcatgtcgcttctgtggttccaggagtggaacagagttatctgctgttggcagtgtttgttctgatgcagattgccaggaatacgctaagatagcctgtagtaagacgcatccttgtggccatccatgcgggggtgttaaaaacgaagagcactgtctgccctgtctacacggctgtgacaaaagtgccacaagcctgaagcaagacgccgatgacatgtgcatgatatgtttcaccgaagcgctctcggcagcaccagccattcagctggattgtagtcacatattccacttacagtgctgtcggcgagtattagaaaatcgatggcttggcccaaggataacatttggatttatatcttgtcccatttgcaagaacaaaattaatcacatagtactaaaagacctacttgatccaataaaagaactctatgaggatgtcagaagaaaagccttaatgagattggaatatgaaggtctgcataagagtgaagctatcacaactcctggtgtgaggttttataatgacccagctggctatgcaatgaatagatatgcatattatgtgtgctacaaatgcagaaaggcatattttggtggtgaagctcgctgcgatgctgaggctggacggggagatgattatgatcccagagagctcatttgtggtgcctgttctgatgtttccagggctcagatgtgtcccaaacatggcacagactttttggaatataaatgtcgctactgctgttcagtggctgtttttttctgttttggaacaacacatttttgtaatgcttgtcatgatgattttcaaagaatgactagcattcctaaggaagaactaccacactgtcctgcaggtcccaaaggcaagcagttagaaggaactgaatgtccactccatgttgttcatccacccactggggaagagtttgctctgggatgtggagtgtgcagaaatgcccacactttttagaacacgcagatcctttgtctacagagagaaaaattgccttcatcccccaagaggatgcggtgaagtttaaactctgctcaggataaggacgggaccatttttacatccatgaaaatgaaccattcacagtgcaagaaggataccaaataccatgtacataattcttgctatgaaaagtttccccattattttggtttatcttcttttgaacaaatgacatcaaacttgtgaggtgtttgcatgtggccattaccgtcattggcctgtgaagcattggacatttatagataattgatataaaagaatcgccatgcccatggactaagaacgatgctggctttcaagcaaaaaagaaaaataatcattgtttattgtatactgcctttttgtaatcctgtacaattgcatcacgggtggggataaaaagaggaatattctggtttatttcctagactgttatttaaaaaaaaaaaaaacattgtgttaggacagcatataaatgtaataagtatcacactgtatataaacatatcaatgtttgtcctgtataagaattactaaattacaaatgcaatttcatttaaacttctaggttaagtttgagcctgaaattttaatgaagtgcaatactgagtgtgcctcattatcttgcagctgtaaacatattggaatgtacatgtcaataaaaccactgtacatttttatacagtgataaagtcta

SEQ ID NO: 357453 - DNA, 1789 bp, Homo sapiens
cactaactagctgtgtggtgtcgagcaagtcacttaacctctggaactcattgacttcatttataaagcaaacccaccacgagtagctcagaagcatgtcgcttctgtggttccaggagtggaacagagttatctgctgttggcagtgtttgttctgatgcagattgccaggaatacgctaagatagcctgtagtaagacgcatccttgtggccatccatgcgggggtgttaaaaacgaagagcactgtctgccctgtctacacggctgtgacaaaagtgccacaagcctgaagcaagacgccgatgacatgtgcatgatatgtttcaccgaagcgctctcggcagcaccagccattcagctggattgtagtcacatattccacttacagtgctgtcggcgagtattagaaaatcgatggcttggcccaaggataacatttggatttatatcttgtcccatttgcaagaacaaaattaatcacatagtactaaaagacctacttgatccaataaaagaactctatgaggatgtcagaagaaaagccttaatgagattggaatatgaaggtctgcataagagtgaagctatcacaactcctggtgtgaggttttataatgacccagctggctatgcaatgaatagatatgcatattatgtgtgctacaaatgcagaaaggcatattttggtggtgaagctcgctgcgatgctgaggctggacggggagatgattatgatcccagagagctcatttgtggtgcctgttctgatgtttccagggctcagatgtgtcccaaacatggcacagactttttggaatataaatgtcgctactgctgttcagtggctgtttttttctgttttggaacaacacatttttgtaatgcttgtcatgatgattttcaaagaatgactagcattcctaaggaagaactaccacactgtcctgcaggtcccaaaggcaagcagttagaaggaactgaatgtccactccatgttgttcatccacccactggggaagagtttgctctgggatgtggagtgtgcagaaatgcccacactttttagaacacgcagatcctttgtctacagagagaaaaattgccttcatcccccaagaggatgcggtgaagtttaaactctgctcaggataaggacgggaccatttttacatccatgaaaatgaaccattcacagtgcaagaaggataccaaataccatgtacataattcttgctatgaaaagtttccccattattttggtttatcttcttttgaacaaatgacatcaaacttgtgaggtgtttgcatgtggccattaccgtcattggcctgtgaagcattggacatttatagataattgatataaaagaatcgccatgcccatggactaagaacgatgctggctttcaagcaaaaaagaaaaataatcattgtttattgtatactgcctttttgtaatcctgtacaattgcatcacgggtggggataaaaagaggaatattctggtttatttcctagactgttatttaaaaaaaaaaaaaacattgtgttaggacagcatataaatgtaataagtatcacactgtatataaacatatcaatgtttgtcctgtataagaattactaaattacaaatgcaatttcatttaaacttctaggttaagtttgagcctgaaattttaatgaagtgcaatactgagtgtgcctcattatcttgcagctgtaaacatattggaatgtacatgtcaataaaaccactgtacatttttatacagtgataaagtcta

SEQ ID NO: 357454 - DNA, 10910 bp, Homo sapiens
tcttggagcgttctcagtttctcaacagatcttcacttgctaggcagccagaagccggcggcagtggcggcaccgcctcctcctcacattcccggggtggcggggttagatgagcggccccagtcgcggcgccgggggcgctgttcatgccggttcccgacggctccgtggctgctgcggggctggggctggggctacccgccgcggactccccgggtcactaccagctgctgctgtcaggccgggccctggccgaccgctaccggaggatttataccgctgcgctcaatgacagggaccaggggggcggcagcgctggacacccagcctccaggaataagaaaattttaaataagaagaaattgaaaagaaaacagaagagcaaatcaaaagtgaagacaagaagcaagtctgaaaacttagagaatacagtaatcataccagatatcaaactacatagcaatccttctgctttcaatatttactgtaatgtacgccattgcgttctggaatggcagaaaaaggaaatatcattggcagccgcatctaagaactctgtgcagagtggagaatcagatagtgatgaagaagaggaatccaaagagccccctatcaagcttccaaagattattgaggttggcctttgtgaagtttttgaattgatcaaagagacacgattttctcatccatccctgtgtctcaggagtctccaagccctgctcaacgtgctgcagggccagcagccagaagtgctccagtctgagccacctgaggtcctagagtctctcttccagcttcttttggaaatcaccgttcgaagtactgggatgaatgacagcacaggacagtccttaacagcactttcctgtgcttgcctctttagtctggtggcttcttggggagaaacaggaaggacacttcaggccatctctgctatcctcaccaacaatggaagccatgcttgccaaactattcagagacttaggaatgccattagagctcatagcaggagtataagaactacgttcatggaaagcctcccagaggatatgaggtgccaacaattctaaattcgctacagagaagtgtacaagcagttttggtgggaaaaattcaaattcaggactggtttagtaatggcattaagaaagcagctttaatgcacaagtggccattaaaagaaatatctgttgatgaagatgaccaatgtctacttcagaatgatggattttttctttatctattatgcaaggatggattatataaaataggctctggatacagtggaacagttaggggccatatatacaattctacatcccgtattagaaacagaaaagaaaaaaagtcttggttagggtatgctcagggttatttattatatagagatgtgaataaccacagcatgacagccataaggataagccctgaaacactggagcaagatggtactgtgatgttaccagattgccacactgaaggtcaaaatattttattcactgatggagaatatattaatcagatagctgcttcaagagatgatggctttgttgtcagaatatttgccacaagcactgaacctgttctacagcaagaattgcaacttaaactggctagaaaatgcttacatgcctgtggtatctcactattcgatctggaaaaggacttgcatattataagtacaggatttgatgaggagtcagcaattcttggtgcaggacgagagtttgcgctaatgaaaacagcaaatggaaagatatattacactggcaaataccagagtcttggaatcaaacaaggtggtccttcagcaggaaaatgggttgagctaccaattacaaaatctccaaagatagtacacttctcagttggacacgatggctctcacgcccttttagttgcagaagatgggagcatattctttacaggatctgctagtaaaggagaagatggagaatcaattaagagcagacggcaatccaaaccttataaacctaaaaagataattaagatggaaggaaagattgtggtatatacagcctgcaataatggaagtagttctgttatttctaaagatggagaactctacatgtttggaaaagatgccatttactctgatagttcaagtttggtaactgatttgaagggccattttgtaactcaggtagctatgggcaaagctcacacttgtgttttaatgaagaatggagaggtgtggacatttggtgtaaataataaaggacagtgtggacgagatactggtgccatgaaccaaggtgggaaagggtttggagttgaaaatatggcaacagcaatggatgaagacctggaagaagaactagatgaaaaagatgagaagtctatgatgtgccctccaggcatgcacaaatggaagctggagcagtgcatggtttgcactgtctgtggagactgtacaggttatggagccagctgtgtcagtagtggacggccagacagagtccccggagggatctgtggttgtggttccggagaatctggttgtgctgtgtgtggatgttgcaaggcctgtgcaagagagttagatggtcaagaggcaagacaaagaggaattcttgatgcagtgaaagaaatgatacctttagatcttcttttagctgtcccagtgcccggggttaacattgaagaacaccttcagttacgacaagaagaaaaacggcaacgtgtaatcagaaggcacagattagaggaaggaagaggcccccttgtatttgctggtcctatttttatgaaccatcgagaacaggctctagccagactcagatcccatccagcacacgtaaagcataaacgggacaagcacaaagatggaagtggagaaagaggcgaaaaggatgcaagcaaaatcacaacataccctccaggctctgtgcgatttgactgtgagctccgggcagtccaagtcagctgtggatttcaccattcagtggttttaatggaaaatggagatgtctatacatttggttatgggcagcatgggcagctaggacatggagatgtcaactccaggggatgtcccactcttgttcaagcattgccaggccctagcacacaagtcactgcaggcagcaaccatacggcagtacttttaatggatggacaggtcttcacatttggaagtttttctaaaggacaactgggcagaccaattttggatgtgccatattggaatgcaaagccagctcccatgcctaacattggatcaaaatatggaagaaaagctacttggataggtgcaagtggggaccaaacttttttacgaattgatgaagcacttattaattctcatgtacttgctacatcagaaatttttgccagtaaacacataataggcttggtacctgcttctatatcagaacctcctccatttaaatgccttctgataaataaagtggatgggagttgtaaaacttttaatgactcagaacaagaggatctgcaaggatttggtgtgtgtcttgatcctgtatatgatgtaatttggaggtttcgaccaaatactagagagctgtggtgttacaatgcggtggttgctgatgccaggcttccctctgcagcagacatgcagtccagatgtagtatcctaagtcctgaacttgccttaccaacaggatcaagggccctcactacccgatctcatgcagctttgcacattttaggttgtcttgataccttggcagctatgcaggacttaaaaatgggtgttgcaagtacagaggaagagactcaagcagtaatgaaggtttattctaaagaagattatagtgtggtaaacaggtttgaaagtcatggaggaggctggggttattctgcccattcagtagaagctatacgtttcagtgccgacactgatattttacttggtggtcttggtctgtttggaggtagaggagaatatactgctaaaattaagctgtttgaattgggtcctgatggaggagatcatgaaactgatggtgaccttcttgcagagactgatgtattggcttatgactgtgctgctagagaaaaatatgcaatgatgtttgatgagcctgttctcctgcaagctgggtggtggtatgtggcatgggcccgagtgtcaggacccagcagtgactgtggatctcatggacaggcatctattaccacagatgatggggttgttttccagttcaagagttcaaagaaatcaaataatggtacagatgttaatgcgggtcagatacctcagttattatacagacttccaaccagtgatggcagtgcttcaaaaggcaaacagcaaaccagtgaacctgtacacattttaaagaggtcttttgcaagaactgtctcagtggaatgttttgagtcattgttgagtattcttcactggagctggaccaccttagtcttaggagttgaagaacttagaggattaaaaggattccagttcacagctacactcctagatttagagagactgcgctttgtgggtacctgttgtctgaggttattgcgtgtctatacctgtgaaatttacccagtgtcagctacaggaaaagcagttgtagaagaaactagcaaattagcagagtgtattggaaaaaccagaactttgttaagaaaaattttatcagaaccacttgatcactgcatggtgaaattggataatgatcctcaaggatatctcagtcaacccttgagtcttctagaagctgtccttcaggaatgtcataatactttcactgcctgctttcattctttctacccaactcctgccttacagtgggcttgcctttgtgatctgctgaattgtttggatcaggatatccaagaagcaaacttcaagacatcaagtagccgactccttgcagctgttatgtcagctctgtgtcacacgtctgttaagctgacttccatcttcccgattgcgtatgatggagaagtattactacgatcaattgttaaacaagttagtacagagaacgactcaacactagttcatcgttttccccttttggtggcacatatggaaaaactcagccagagtgaagagaatatctcagggatgacaagcttccgtgaagttctggagaaaatgctggtcattgttgtgctaccagtcaggaacagcctgaggagagaaaatgaactcttctcctcccacctcgtctctaacacctgtggattactggccagcattgtcagtgaactgacagcgtcagccctgggatctgaggttgatggacttaattctcttcactctgtaaaagctagtgctaaccgatttacaaaaacaagtcagggcagaagttggaacactgggaacgggtcccctgatgcaatctgtttttcagtagacaaacctggaatagttgtggttggtttctctgtctatggaggaggtggaattcatgaatatgaattagaggtgttggttgatgatagtgaacatgcaggagattcaactcattcccacagatggacatctctggaattagtgaaaggaacgtacacaacggatgactcacccagtgatatagctgagatcagacttgacaaagtggttcctttaaaggaaaatgttaaatatgctgtgcgcttgaggaactatggaagccgtacagccaatggagatggaggaatgaccacagttcagtgccctgatggtgtgacattcacattcagcacgtgcagcttgagcagtaacggcacaaaccaaaccagaggacagatcccacagatactctactataggagtgaatttgatggagatttacaatcccaacttctgagtaaagccaatgaagaagataaaaactgtagcagagcattgtctgttgtaagcactgtcgttcgagcctctaaggacctcctgcacagagctcttgctgtggatgctgatgacattccagaactgctgagttcttccagtctgttttccatgctgctcccccttattatagcctacataggaccagtagctgctgctattcccaaggtggctgtagaagtctttggccttgtccaacaattgcttccgtcagttgccattttgaatcagaagtatgcaccgcctgccttcaaccctaatcagtcgacagatagcaccacaggaaaccagcctgaacagggcctctctgcttgtacaacctccagtcactatgctgtcatagagagtgagcacccgtataaacctgcctgtgtgatgcattacaaggtgacattcccagaatgtgtgaggtggatgacaatcgaatttgaccctcagtgtggtactgcacagtcagaagatgtccttcgtttgttgattcctgtcagaactgttcagaattcaggatatggaccaaaattgacatctgttcatgaaaatcttaattcatggatagaattaaagaaattttcaggatcctctgggtggcctactatggttttggtgttgccaggaaatgaggcccttttttcattggagactgcatcagattatgtgaaagatgacaaagcttctttctatggttttaagtgttttgcaattggatatgaatttagccctggacctgatgagggagtcatccaattggaaaaagaattagccaatcttggtggggtttgtgcagcagctctgatgaagaaggacctagcacttcctattggtaatgaattagaagaagaccttgaaattcttgaggaggctgcattgcaggtgtgcaaaacccattctggaattcttggaaagggtctagctctttctcattcaccaactatattagaagcacttgagggaaatttaccactccaaatccaaagcaatgaacagtcttttctggatgattttattgcctgtgtcccaggatcaagtggtggaaggcttgcaaggtggcttcagccagattcatatgcggatcctcagaaaacatctttgatcctgaataaggatgatattcgttgtggttggcctaccaccataactgttcaaacaaaagaccagtatggggatgtggtacatgttcccaatatgaaggtggaagtgaaagctgtccctgtttctcagaaaaaaatgtctttacaacaagatcaagcaaagaaacctcaaaggattcctggcagtcctgcagtaacagctgcatcttctaatactgacatgacttatggagggctggcatcaccaaagctagatgtttcatatgaaccaatgatagtgaaggaagctcgatatattgccataacaatgatgaaggtttatgaaaattattcatttgaagaactacgttttgcatcaccaactcctaagagacccagtgagaatatgctgatccgtgtcaataatgatgggacttattgtgcaaattggactccaggggctattggactctacactcttcatgttaccattgatggcattgaaatcgatgctggtctggaagtaaaagtaaaagacccaccaaaagggatgataccaccaggaactcagttggtcaaaccaaagtctgaacctcagcctaataaggttcgaaaatttgtggccaaggacagtgcggggcttcgcatccgtagccacccttcccttcagagtgagcagataggcatagtgaaagtcaatggaactatcacttttattgatgagatccataatgatgatggtgtgtggctgaggctgaatgatgagacaataaagaagtatgtccctaacatgaatggttacactgaagcctggtgcctctcttttaatcaacatcttggcaagagtcttctggtccctgttgacaatatctttaatgctagccaaggagtcagggatttggacgtattttcatggacttccaaagcttttttcccccaggaatctaaaactaatactgatgactttttcaaagacataaactcctgctgcccacaggaagcaacaatgcaagaacaagatatgccattcttgcgaggagggccaggcatgtacaaggtagtgaagacgggaccttcaggtcacaacatcagaagctgccctaaccttagaggtatcccaattggaatgttagttctgggaaacaaagtcaaagcagtgggagaggtaaccaattctgaagggacatgggtgcaactggatcagaacagcatggtagagttctgtgagagtgatgaaggagaggcatggtccttagctagagacagaggcggaaaccagtacctccgacatgaagatgaacaagctcttctggatcagaattctcaaactcctcctccaagccctttctcagtgcaagcttttaataaaggggcaagttgcagtgcccaaggatttgattatggactcggaaatagcaaaggtgatcgaggaaacatctcaacatcttctaaaccagcctctacatcaggaaaatcagagctgtcctctaaacacagcagatcgcttaaacctgatggacgtatgagccggactactgctgatcagaagaagccaaggggcacagaaagtttatctgctagtgaatccctcatcttaaaatctgatgctgcaaagttgaggtcagattcccacagtaggtcattatcccccaaccataacaccttgcagacattgaaatctgatgggaggatgccttctagctccagagctgaatccccaggaccaggttctcggttgtcatctcctaagccaaagactctcccagccaataggtctagcccatcgggtgctagttctccacgctcctcctcaccacatgataaaaatctacctcaaaaaagtactgctcctgttaagacaaagcttgatcctcctcgggaacgttctaaatcagactcttacacacttgatccagataccctccgcaagaagaaaatgcccctcacagaacctttgagaggacggtcaacgtcaccaaaaccaaaatcagtaccaaaggattctacagattcccctggatctgaaaatagagctccctctccccatgtggtacaggaaaacctccacagtgaggtggtcgaagtctgcacctcaagtactttaaaaacaaatagtctaacagacagcacctgcgatgacagcagtgaatttaagagtgtggatgaaggttcaaataaagttcattttagcattggaaaagcaccactgaaagatgaacaggaaatgagagcatctcccaaaataagtcgaaaatgtgctaatagacacaccaggcccaaaaaagaaaaatcgagttttcttttcaaaggagatggatccaagcctttagagccagccaagcaagccatgtctccttctgtggccgaatgtgccagagctgtgtttgcttccttcctctggcatgaaggcatagtacatgatgcaatggcttgttcttctttcctaaagtttcatcctgaactttccaaagaacatgctcctataaggagtagtttaaatagccaacaacctacagaggaaaaagaaaccaagttaaaaaatagacattcattagaaatatcatctgcactgaatatgtttaatattgcaccccatggaccagatatatctaagatgggtagcatcaacaaaaacaaggtattgtctatgcttaaggaaccacctctgcatgaaaaatgtgaggatgggaaaaccgagaccacttttgaaatgtccatgcataacacaatgaagtctaagtctcctcttcccttaactttacaacatttagtggctttttgggaagacatctctttggctactatcaaagctgcttcccagaatatgatttttccaagtcctggttcctgtgcagttcttaaaaagaaagagtgtgagaaagagaataagaagtccaaaaaggaaaaaaagaaaaaagaaaaggcagaagttaggcccaggggtaatttgtttggagagatggcccagctggcagtaggaggaccagagaaagataccatctgtgaactgtgtggggagtcacatccatacccggtgacctatcacatgagacaagctcacccaggttgtggccgatatgctggtggacaaggttacaatagcattgggcatttttgtggaggatgggctggtaactgtggtgatggtggcataggaggaagcacttggtatctggtatgtgatcgctgtagagaaaaatacctccgcgaaaaacaggctgctgcaagggagaaggtcaaacaatctaggagaaaaccaatgcaagtcaagacccctcgtgccttgcccaccatggaagctcaccaggtgattaaagccaatgcactcttcctgctgtccctgagcagtgcagcagaaccgagcattctgtgttaccatcctgcaaagccattccaatctcagttgcccagtgtaaaagaaggcatttctgaggatcttcctgtgaaaatgccttgtctctacctgcagacattagctaggcatcatcatgaaaattttgtgggctatcaagatgacaatctattccaggatgaaatgagatatctacgttcaacatctgtacctgccccgtatatatcagtaactcctgatgcaagtcctaatgtatttgaagagccagagagcaatatgaagtctatgccaccaagtttagaaaccagtcccataactgatactgatcttgcaaagagaactgtcttccaaagatcatactcagttgttgcttccgaatatgataaacaacactccattttacctgcacaataaaaatgtttaacggttaaaaaaacaaaaacaaaaaacaaagaaaaacaacacaacaacaaacaccaaaaacgccaacaaacacaagaggggcggaccccccccacaaaccgacccacccgcgacggcgccacacgactcacgacagcgcccccggtctcacgacgtcaacacgagcgggcccccccacagacggggacggccaatctcagcaacccccggccacggcccgcggaaacacacc

SEQ ID NO: 357455 - DNA, 9635 bp, Homo sapiens
  misc_feature (9624)..(9624): n is a, c, g, or t
tcttggagcgttctcagtttctcaacagatcttcacttgctaggcagccagaagccggcggcagtggcggcaccgcctcctcctcacattcccggggtggcggggttagatgagcggccccagtcgcggcgccgggggcgctgttcatgccggttcccgacggctccgtggctgctgcggggctggggctggggctacccgccgcggactccccgggtcactaccagctgctgctgtcaggccgggccctggccgaccgctaccggaggatttataccgctgcgctcaatgacagggaccaggggggcggcagcgctggacacccagcctccaggaataagaaaattttaaataagaagaaattgaaaagaaaacagaagagcaaatcaaaagtgaagacaagaagcaagtctgaaaacttagagaatacagtaatcataccagatatcaaactacatagcaatccttctgctttcaatatttactgtaatgtacgccattgcgttctggaatggcagaaaaaggaaatatcattggcagccgcatctaagaactctgtgcagagtggagaatcagatagtgatgaagaagaggaatccaaagagccccctatcaagcttccaaagattattgaggttggcctttgtgaagtttttgaattgatcaaagagacacgattttctcatccatccctgtgtctcaggagtctccaagccctgctcaacgtgctgcagggccagcagccagaagtgctccagtctgagccacctgaggtcctagagtctctcttccagcttcttttggaaatcaccgttcgaagtactgggatgaatgacagcacaggacagtccttaacagcactttcctgtgcttgcctctttagtctggtggcttcttggggagaaacaggaaggacacttcaggccatctctgctatcctcaccaacaatggaagccatgcttgccaaactattcagagacttaggaatgccattagagctcatagcaggagtataagaactacgttcatggaaagcctcccagaggatatgaggtgccaacaattctaaattcgctacagagaagtgtacaagcagttttggtgggaaaaattcaaattcaggactggtttagtaatggcattaagaaagcagctttaatgcacaagtggccattaaaagaaatatctgttgatgaagatgaccaatgtctacttcagaatgatggattttttctttatctattatgcaaggatggattatataaaataggctctggatacagtggaacagttaggggccatatatacaattctacatcccgtattagaaacagaaaagaaaaaaagtcttggttagggtatgctcagggttatttattatatagagatgtgaataaccacagcatgacagccataaggataagccctgaaacactggagcaagatggtactgtgatgttaccagattgccacactgaaggtcaaaatattttattcactgatggagaatatattaatcagatagctgcttcaagagatgatggctttgttgtcagaatatttgccacaagcactgaacctgttctacagcaagaattgcaacttaaactggctagaaaatgcttacatgcctgtggtatctcactattcgatctggaaaaggacttgcatattataagtacaggatttgatgaggagtcagcaattcttggtgcaggacgagagtttgcgctaatgaaaacagcaaatggaaagatatattacactggcaaataccagagtcttggaatcaaacaaggtggtccttcagcaggaaaatgggttgagctaccaattacaaaatctccaaagatagtacacttctcagttggacacgatggctctcacgcccttttagttgcagaagatgggagcatattctttacaggatctgctagtaaaggagaagatggagaatcaattaagagcagacggcaatccaaaccttataaacctaaaaagataattaagatggaaggaaagattgtggtatatacagcctgcaataatggaagtagttctgttatttctaaagatggagaactctacatgtttggaaaagatgccatttactctgatagttcaagtttggtaactgatttgaagggccattttgtaactcaggtagctatgggcaaagctcacacttgtgttttaatgaagaatggagaggtgtggacatttggtgtaaataataaaggacagtgtggacgagatactggtgccatgaaccaaggtgggaaagggtttggagttgaaaatatggcaacagcaatggatgaagacctggaagaagaactagatgaaaaagatgagaagtctatgatgtgccctccaggcatgcacaaatggaagctggagcagtgcatggtttgcactgtctgtggagactgtacaggttatggagccagctgtgtcagtagtggacggccagacagagtccccggagggatctgtggttgtggttccggagaatctggttgtgctgtgtgtggatgttgcaaggcctgtgcaagagagttagatggtcaagaggcaagacaaagaggaattcttgatgcagtgaaagaaatgatacctttagatcttcttttagctgtcccagtgcccggggttaacattgaagaacaccttcagttacgacaagaagaaaaacggcaacgtgtaatcagaaggcacagattagaggaaggaagaggcccccttgtatttgctggtcctatttttatgaaccatcgagaacaggctctagccagactcagatcccatccagcacacgtaaagcataaacgggacaagcacaaagatggaagtggagaaagaggcgaaaaggatgcaagcaaaatcacaacataccctccaggctctgtgcgatttgactgtgagctccgggcagtccaagtcagctgtggatttcaccattcagtggttttaatggaaaatggagatgtctatacatttggttatgggcagcatgggcagctaggacatggagatgtcaactccaggggatgtcccactcttgttcaagcattgccaggccctagcacacaagtcactgcaggcagcaaccatacggcagtacttttaatggatggacaggtcttcacatttggaagtttttctaaaggacaactgggcagaccaattttggatgtgccatattggaatgcaaagccagctcccatgcctaacattggatcaaaatatggaagaaaagctacttggataggtgcaagtggggaccaaacttttttacgaattgatgaagcacttattaattctcatgtacttgctacatcagaaatttttgccagtaaacacataataggcttggtacctgcttctatatcagaacctcctccatttaaatgccttctgataaataaagtggatgggagttgtaaaacttttaatgactcagaacaagaggatctgcaaggatttggtgtgtgtcttgatcctgtatatgatgtaatttggaggtttcgaccaaatactagagagctgtggtgttacaatgcggtggttgctgatgccaggcttccctctgcagcagacatgcagtccagatgtagtatcctaagtcctgaacttgccttaccaacaggatcaagggccctcactacccgatctcatgcagctttgcacattttaggttgtcttgataccttggcagctatgcaggacttaaaaatgggtgttgcaagtacagaggaagagactcaagcagtaatgaaggtttattctaaagaagattatagtgtggtaaacaggtttgaaagtcatggaggaggctggggttattctgcccattcagtagaagctatacgtttcagtgccgacactgatattttacttggtggtcttggtctgtttggaggtagaggagaatatactgctaaaattaagctgtttgaattgggtcctgatggaggagatcatgaaactgatggtgaccttcttgcagagactgatgtattggcttatgactgtgctgctagagaaaaatatgcaatgatgtttgatgagcctgttctcctgcaagctgggtggtggtatgtggcatgggcccgagtgtcaggacccagcagtgactgtggatctcatggacaggcatctattaccacagatgatggggttgttttccagttcaagagttcaaagaaatcaaataatggtacagatgttaatgcgggtcagatacctcagttattatacagacttccaaccagtgatggcagtgcttcaaaaggcaaacagcaaaccagtgaacctgtacacattttaaagaggtcttttgcaagaactgtctcagtggaatgttttgagtcattgttgagtattcttcactggagctggaccaccttagtcttaggagttgaagaacttagaggattaaaaggattccagttcacagctacactcctagatttagagagactgcgctttgtgggtacctgttgtctgaggttattgcgtgtctatacctgtgaaatttacccagtgtcagctacaggaaaagcagttgtagaagaaactagcaaattagcagagtgtattggaaaaaccagaactttgttaagaaaaattttatcagaaccacttgatcactgcatggtgaaattggataatgatcctcaaggatatctcagtcaacccttgagtcttctagaagctgtccttcaggaatgtcataatactttcactgcctgctttcattctttctacccaactcctgccttacagtgggcttgcctttgtgatctgctgaattgtttggatcaggatatccaagaagcaaacttcaagacatcaagtagccgactccttgcagctgttatgtcagctctgtgtcacacgtctgttaagctgacttccatcttcccgattgcgtatgatggagaagtattactacgatcaattgttaaacaagttagtacagagaacgactcaacactagttcatcgttttccccttttggtggcacatatggaaaaactcagccagagtgaagagaatatctcagggatgacaagcttccgtgaagttctggagaaaatgctggtcattgttgtgctaccagtcaggaacagcctgaggagagaaaatgaactcttctcctcccacctcgtctctaacacctgtggattactggccagcattgtcagtgaactgacagcgtcagccctgggatctgaggttgatggacttaattctcttcactctgtaaaagctagtgctaaccgatttacaaaaacaagtcagggcagaagttggaacactgggaacgggtcccctgatgcaatctgtttttcagtagacaaacctggaatagttgtggttggtttctctgtctatggaggaggtggaattcatgaatatgaattagaggtgttggttgatgatagtgaacatgcaggagattcaactcattcccacagatggacatctctggaattagtgaaaggaacgtacacaacggatgactcacccagtgatatagctgagatcagacttgacaaagtggttcctttaaaggaaaatgttaaatatgctgtgcgcttgaggaactatggaagccgtacagccaatggagatggaggaatgaccacagttcagtgccctgatggtgtgacattcacattcagcacgtgcagcttgagcagtaacggcacaaaccaaaccagaggacagatcccacagatactctactataggagtgaatttgatggagatttacaatcccaacttctgagtaaagccaatgaagaagataaaaactgtagcagagcattgtctgttgtaagcactgtcgttcgagcctctaaggacctcctgcacagagctcttgctgtggatgctgatgacattccagaactgctgagttcttccagtctgttttccatgctgctcccccttattatagcctacataggaccagtagctgctgctattcccaaggtggctgtagaagtctttggccttgtccaacaattgcttccgtcagttgccattttgaatcagaagtatgcaccgcctgccttcaaccctaatcagtcgacagatagcaccacaggaaaccagcctgaacagggcctctctgcttgtacaacctccagtcactatgctgtcatagagagtgagcacccgtataaacctgcctgtgtgatgcattacaaggtgacattcccagaatgtgtgaggtggatgacaatcgaatttgaccctcagtgtggtactgcacagtcagaagatgtccttcgtttgttgattcctgtcagaactgttcagaattcaggatatggaccaaaattgacatctgttcatgaaaatcttaattcatggatagaattaaagaaattttcaggatcctctgggtggcctactatggttttggtgttgccaggaaatgaggcccttttttcattggagactgcatcagattatgtgaaagatgacaaagcttctttctatggttttaagtgttttgcaattggatatgaatttagccctggacctgatgagggagtcatccaattggaaaaagaattagccaatcttggtggggtttgtgcagcagctctgatgaagaaggacctagcacttcctattggtaatgaattagaagaagaccttgaaattcttgaggaggctgcattgcaggtgtgcaaaacccattctggaattcttggaaagggtctagctctttctcattcaccaactatattagaagcacttgagggaaatttaccactccaaatccaaagcaatgaacagtcttttctggatgattttattgcctgtgtcccaggatcaagtggtggaaggcttgcaaggtggcttcagccagattcatatgcggatcctcagaaaacatctttgatcctgaataaggatgatattcgttgtggttggcctaccaccataactgttcaaacaaaagaccagtatggggatgtggtacatgttcccaatatgaaggtggaagtgaaagctgtccctgtttctcagaaaaaaatgtctttacaacaagatcaagcaaagaaacctcaaaggattcctggcagtcctgcagtaacagctgcatcttctaatactgacatgacttatggagggctggcatcaccaaagctagatgtttcatatgaaccaatgatagtgaaggaagctcgatatattgccataacaatgatgaaggtttatgaaaattattcatttgaagaactacgttttgcatcaccaactcctaagagacccagtgagaatatgctgatccgtgtcaataatgatgggacttattgtgcaaattggactccaggggctattggactctacactcttcatgttaccattgatggcattgaaatcgatgctggtctggaagtaaaagtaaaagacccaccaaaagggatgataccaccaggaactcagttggtcaaaccaaagtctgaacctcagcctaataaggttcgaaaatttgtggccaaggacagtgcggggcttcgcatccgtagccacccttcccttcagagtgagcagataggcatagtgaaagtcaatggaactatcacttttattgatgagatccataatgatgatggtgtgtggctgaggctgaatgatgagacaataaagaagtatgtccctaacatgaatggttacactgaagcctggtgcctctcttttaatcaacatcttggcaagagtcttctggtccctgttgacaatatctttaatgctagccaaggagtcagggatttggacgtattttcatggacttccaaagcttttttcccccaggaatctaaaactaatactgatgactttttcaaagacataaactcctgctgcccacaggaagcaacaatgcaagaacaagatatgccattcttgcgaggagggccaggcatgtacaaggtagtgaagacgggaccttcaggtcacaacatcagaagctgccctaaccttagaggtatcccaattggaatgttagttctgggaaacaaagtcaaagcagtgggagaggtaaccaattctgaagggacatgggtgcaactggatcagaacagcatggtagagttctgtgagagtgatgaaggagaggcatggtccttagctagagacagaggcggaaaccagtacctccgacatgaagatgaacaagctcttctggatcagaattctcaaactcctcctccaagccctttctcagtgcaagcttttaataaaggggcaagttgcagtgcccaaggatttgattatggactcggaaatagcaaagttttgactgttttacccactgcaggtgaccaactgagtgccatattgaattccattcagtcacgacccaatctcccagctccttccatctttgatcaagctgcaaaacctccctcttccctagtacacagcccatttgtgttcggacagcccctttccttccagcagcctcagcttcagagtgatcgaggaaacatctcaacatcttctaaaccagcctctacatcaggaaaatcagagctgtcctctaaacacagcagatcgcttaaacctgatggacgtatgagccggactactgctgatcagaagaagccaaggggcacagaaagtttatctgctagtgaatccctcatcttaaaatctgatgctgcaaagttgaggtcagattcccacagtaggtcattatcccccaaccataacaccttgcagacattgaaatctgatgggaggatgccttctagctccagagctgaatccccaggaccaggttctcggttgtcatctcctaagccaaagactctcccagccaataggtctagcccatcgggtgctagttctccacgctcctcctcaccacatgataaaaatctacctcaaaaaagtactgctcctgttaagacaaagcttgatcctcctcgggaacgttctaaatcagactcttacacacttgatccagataccctccgcaagaagaaaatgcccctcacagaacctttgagaggacggtcaacgtcaccaaaaccaaaatcagtaccaaaggattctacagattcccctggatctgaaaatagagctccctctccccatgtggtacaggaaaacctccacagtgaggtggtcgaagtctgcacctcaagtactttaaaaacaaatagtctaacagacagcacctgcgatgacagcagtgaatttaagagtgtggttaggatgtatcttggtgaactcctctttgggttgaattttattggagttctctgggcttctggtacctggatgttggcatccttccccagatttgggaagttttcagttattatttcttaaaatatgcttcctggccttctttctcttctccttctggtatttttgttatgcaaaagtcagttttcttgaaagtaccccccaattcctatagactttcttcattctttctcatttatttatttataattctcttactataaaatttgaaatggtctctctttgaggtcacttattctttcttctgcttgattgagtctgctgttgaagccttctattgaattattctattaagcaactgtctttttcatttctatgtnttctatttggt

SEQ ID NO: 357456 - DNA, 1188 bp, Homo sapiens
tcttggagcgttctcagtttctcaacagatcttcacttgctaggcagccagaagccggcggcagtggcggcaccgcctcctcctcacattcccggggtggcggggttagatgagcggccccagtcgcggcgccgggggcgctgttcatgccggttcccgacggctccgtggctgctgcggggctggggctggggctacccgccgcggactccccgggtcactaccagctgctgctgtcaggccgggccctggccgaccgctaccggaggatttataccgctgcgctcaatgacagggaccaggggggcggcagcgctggacacccagcctccaggaataagaaaattttaaataagaagaaattgaaaagaaaacagaagagcaaatcaaaagtgaagacaagaagcaagtctgaaaacttagagaatacagtaatcataccagatatcaaactacatagcaatccttctgctttcaatatttactgtaatgtacgccattgcgttctggaatggcagaaaaaggaaatatcattggcagccgcatctaagaactctgtgcagagtggagaatcagatagtgatgaagaagaggaatccaaagagccccctatcaagcttccaaaggtaagccactgagttctattaatatttagatgtgtaacctgcaggtgttctggctataatgcatatatacgcattgctaaaatactttgctttatgtaaaattgcacactaaaaataacacggcttatggggcaaaaatagatttggagccagaaaaggaaaactctgcaactttataacctaaggtgcctaacaaagtcaataattgataattccactggaaagcgcaggaagggagatcagtgggttggagtctgttataggggcaattaaaaaatgtacaaaagcagtagggtggaaatgctagtatagaggcattgagccatggcagatggaagtagagctctgagccagtgagccgagagtaaggtgggcacaagagaaagccaagagccctggaaagctgggaggtgctcctcacctgggatgcaggtatgcgtttttatttttcttgaaatagaactacaaagcctctcagctgtgtagtagcagggctgagagccttttcctttctgcctaagcttataattgtactcttgatattgtggtttcccttgattag

SEQ ID NO: 357457 - DNA, 1184 bp, Homo sapiens
tcttggagcgttctcagtttctcaacagatcttcacttgctaggcagccagaagccggcggcagtggcggcaccgcctcctcctcacattcccggggtggcggggttagatgagcggccccagtcgcggcgccgggggcgctgttcatgccggttcccgacggctccgtggctgctgcggggctggggctggggctacccgccgcggactccccgggtcactaccagctgctgctgtcaggccgggccctggccgaccgctaccggaggatttataccgctgcgctcaatgacagggaccaggggggcggcagcgctggacacccagcctccaggaataagaaaattttaaataagaagaaattgaaaagaaaacagaagagcaaatcaaaagtgaagacaagaagcaagtctgaaaacttagagaatacagtaatcataccagatatcaaactacatagcaatccttctgctttcaatatttactgtaatgtacgccattgcgttctggaatggcagaaaaaggaaatatcattggcagccgcatctaagaactctgtgcagagtggagaatcagatagtgatgaagaagaggaatccaaagagccccctatcaagcttccaaagattattgaggttggcctttgtgaagtttttgaattgatcaaagagacacgattttctcatccatccctgtgtctcaggagtctccaagccctgctcaacgtgctgcagggccagcagccagaagtgctccagtctgagccacctgaggtcctaggtaagagccaaggctcattcagtgaagcatttaaaagtgaatataattaataatagagtattgtacacttcaaaattgttaagagaatatttctaaagttctcactacagaaaatgttaagtacttgaggtgatagatgttaattagtccacattttattcatgaatcataacatcactttataccccataaatttatataattataaattgtcaatttgcagtttttaaaaaagtgaagagcttctcttatgaagcacacacaatagcctgtaatgcagtctttatttaattgtggtacggaaacagcaggggtataagttctagagtatttttttctgtgttccactgaagttatggtttaagagttgaagttcgtgcacacacatttctcaattagtatga

SEQ ID NO: 357458 - DNA, 244 bp, Homo sapiens
tgattcagtcacttaaaaatctaaaatgctgcattctgaaataacattttcatctttttcatttgttactactactgataatttattggctttttaagtgctaatttttcttgtagttatctccgacgaggtgaaagtcattggtggatgaagggctcaacccctacccagatctcagagatcatcattaaacttatcaaggatatggcagcagtaagttcccattcttctgttttggcagtga

SEQ ID NO: 357459 - DNA, 746 bp, Homo sapiens
tggttttaatggaaaatggagatgtctatacatttggttatgggcagcatgggcagctaggacatggagatgtcaactccaggtacttgctaacttttcatttgaagatccagagttattttttcttctgttttcttttccttcttttttctttcttttctctttttaagtatatatttctagaattaaaataatattataccactgctttgcaaagtgtggcccatgaattattggtggtttctgatcttatggttgagtgcttttgtagagataaaggattttgtagtttcaggagaaaagctgatatatattttaaataggagagtgattatgattgtcacaaaatatcactatattcttagcaattatctttttaaaggctgtgcatggcaatagaaaaatagtgaattgtatttttaaaaaatgtcagcaatggattcaaacatattcctgatgtctgttttgaaattttggtctaataacatgcagtcattgaagcttttgaataatttttggacagaacctattggtctctctgattaactcttttgacttattgcaaatagtagtagagagactggtggtaatttcctaatatccctacttcatttgttttagttttagttttagttcgtgacatgatcgtgcagctaaagattccctttctcagcttccattgcagcaggatgtggccatgtgaacttaagtgataggtgccactttggaatcttgctgttaaaggg

SEQ ID NO: 357460 - DNA, 340 bp, Homo sapiens
ttgttgttgtttttggccaatcatctagctgtcccagtgcccggggttaacattgaagaacaccttcagttacgacaagaagaaaaacggcaacgtgtaatcagaaggcacagattagaggaaggaagaggtaagatgtagctacagagaaaaagtacatgaaaatccactttcctaccctatcctgaaaccactgaaaagttcacacaataaactaatttggtaagaaatcatcaaaattaaaattagcaatattctgataactcatataatgggaaaatattcagggtattcatgcttcttctaataacatacgtttaggtatttataattgtgctaa

SEQ ID NO: 357461 - DNA, 14942 bp, Homo sapiens
tcttggagcgttctcagtttctcaacagatcttcacttgctaggcagccagaagccggcggcagtggcggcaccgcctcctcctcacattcccggggtggcggggttagatgagcggccccagtcgcggcgccgggggcgctgttcatgccggttcccgacggctccgtggctgctgcggggctggggctggggctacccgccgcggactccccgggtcactaccagctgctgctgtcaggccgggccctggccgaccgctaccggaggatttataccgctgcgctcaatgacagggaccaggggggcggcagcgctggacacccagcctccaggaataagaaaattttaaataagaagaaattgaaaagaaaacagaagagcaaatcaaaagtgaagacaagaagcaagtctgaaaacttagagaatacagtaatcataccagatatcaaactacatagcaatccttctgctttcaatatttactgtaatgtacgccattgcgttctggaatggcagaaaaaggaaatatcattggcagccgcatctaagaactctgtgcagagtggagaatcagatagtgatgaagaagaggaatccaaagagccccctatcaagcttccaaagattattgaggttggcctttgtgaagtttttgaattgatcaaagagacacgattttctcatccatccctgtgtctcaggagtctccaagccctgctcaacgtgctgcagggccagcagccagaagtgctccagtctgagccacctgaggtcctagagtctctcttccagcttcttttggaaatcaccgttcgaagtactgggatgaatgacagcacaggacagtccttaacagcactttcctgtgcttgcctctttagtctggtggcttcttggggagaaacaggaaggacacttcaggccatctctgctatcctcaccaacaatggaagccatgcttgccaaactattcagagacttaggaatgccattagagctcatagcaggagtataagaactacgttcatggaaagcctcccagaggatatgaggtgccaacaattctaaattcgctacagagaagtgtacaagcagttttggtgggaaaaattcaaattcaggactggtttagtaatggcattaagaaagcagctttaatgcacaagtggccattaaaagaaatatctgttgatgaagatgaccaatgtctacttcagaatgatggattttttctttatctattatgcaaggatggattatataaaataggctctggatacagtggaacagttaggggccatatatacaattctacatcccgtattagaaacagaaaagaaaaaaagtcttggttagggtatgctcagggttatttattatatagagatgtgaataaccacagcatgacagccataaggataagccctgaaacactggagcaagatggtactgtgatgttaccagattgccacactgaaggtcaaaatattttattcactgatggagaatatattaatcagatagctgcttcaagagatgatggctttgttgtcagaatatttgccacaagcactgaacctgttctacagcaagaattgcaacttaaactggctagaaaatgcttacatgcctgtggtatctcactattcgatctggaaaaggacttgcatattataagtacaggatttgatgaggagtcagcaattcttggtgcaggacgagagtttgcgctaatgaaaacagcaaatggaaagatatattacactggcaaataccagagtcttggaatcaaacaaggtggtccttcagcaggaaaatgggttgagctaccaattacaaaatctccaaagatagtacacttctcagttggacacgatggctctcacgcccttttagttgcagaagatgggagcatattctttacaggatctgctagtaaaggagaagatggagaatcaattaagagcagacggcaatccaaaccttataaacctaaaaagataattaagatggaaggaaagattgtggtatatacagcctgcaataatggaagtagttctgttatttctaaagatggagaactctacatgtttggaaaagatgccatttactctgatagttcaagtttggtaactgatttgaagggccattttgtaactcaggtagctatgggcaaagctcacacttgtgttttaatgaagaatggagaggtgtggacatttggtgtaaataataaaggacagtgtggacgagatactggtgccatgaaccaaggtgggaaagggtttggagttgaaaatatggcaacagcaatggatgaagacctggaagaagaactagatgaaaaagatgagaagtctatgatgtgccctccaggcatgcacaaatggaagctggagcagtgcatggtttgcactgtctgtggagactgtacaggttatggagccagctgtgtcagtagtggacggccagacagagtccccggagggatctgtggttgtggttccggagaatctggttgtgctgtgtgtggatgttgcaaggcctgtgcaagagagttagatggtcaagaggcaagacaaagaggaattcttgatgcagtgaaagaaatgatacctttagatcttcttttagctgtcccagtgcccggggttaacattgaagaacaccttcagttacgacaagaagaaaaacggcaacgtgtaatcagaaggcacagattagaggaaggaagaggcccccttgtatttgctggtcctatttttatgaaccatcgagaacaggctctagccagactcagatcccatccagcacacgtaaagcataaacgggacaagcacaaagatggaagtggagaaagaggcgaaaaggatgcaagcaaaatcacaacataccctccaggctctgtgcgatttgactgtgagctccgggcagtccaagtcagctgtggatttcaccattcagtggttttaatggaaaatggagatgtctatacatttggttatgggcagcatgggcagctaggacatggagatgtcaactccaggggatgtcccactcttgttcaagcattgccaggccctagcacacaagtcactgcaggcagcaaccatacggcagtacttttaatggatggacaggtcttcacatttggaagtttttctaaaggacaactgggcagaccaattttggatgtgccatattggaatgcaaagccagctcccatgcctaacattggatcaaaatatggaagaaaagctacttggataggtgcaagtggggaccaaacttttttacgaattgatgaagcacttattaattctcatgtacttgctacatcagaaatttttgccagtaaacacataataggcttggtacctgcttctatatcagaacctcctccatttaaatgccttctgataaataaagtggatgggagttgtaaaacttttaatgactcagaacaagaggatctgcaaggatttggtgtgtgtcttgatcctgtatatgatgtaatttggaggtttcgaccaaatactagagagctgtggtgttacaatgcggtggttgctgatgccaggcttccctctgcagcagacatgcagtccagatgtagtatcctaagtcctgaacttgccttaccaacaggatcaagggccctcactacccgatctcatgcagctttgcacattttaggttgtcttgataccttggcagctatgcaggacttaaaaatgggtgttgcaagtacagaggaagagactcaagcagtaatgaaggtttattctaaagaagattatagtgtggtaaacaggtttgaaagtcatggaggaggctggggttattctgcccattcagtagaagctatacgtttcagtgccgacactgatattttacttggtggtcttggtctgtttggaggtagaggagaatatactgctaaaattaagctgtttgaattgggtcctgatggaggagatcatgaaactgatggtgaccttcttgcagagactgatgtattggcttatgactgtgctgctagagaaaaatatgcaatgatgtttgatgagcctgttctcctgcaagctgggtggtggtatgtggcatgggcccgagtgtcaggacccagcagtgactgtggatctcatggacaggcatctattaccacagatgatggggttgttttccagttcaagagttcaaagaaatcaaataatggtacagatgttaatgcgggtcagatacctcagttattatacagacttccaaccagtgatggcagtgcttcaaaaggcaaacagcaaaccagtgaacctgtacacattttaaagaggtcttttgcaagaactgtctcagtggaatgttttgagtcattgttgagtattcttcactggagctggaccaccttagtcttaggagttgaagaacttagaggattaaaaggattccagttcacagctacactcctagatttagagagactgcgctttgtgggtacctgttgtctgaggttattgcgtgtctatacctgtgaaatttacccagtgtcagctacaggaaaagcagttgtagaagaaactagcaaattagcagagtgtattggaaaaaccagaactttgttaagaaaaattttatcagaaccacttgatcactgcatggtgaaattggataatgatcctcaaggatatctcagtcaacccttgagtcttctagaagctgtccttcaggaatgtcataatactttcactgcctgctttcattctttctacccaactcctgccttacagtgggcttgcctttgtgatctgctgaattgtttggatcaggatatccaagaagcaaacttcaagacatcaagtagccgactccttgcagctgttatgtcagctctgtgtcacacgtctgttaagctgacttccatcttcccgattgcgtatgatggagaagtattactacgatcaattgttaaacaagttagtacagagaacgactcaacactagttcatcgttttccccttttggtggcacatatggaaaaactcagccagagtgaagagaatatctcagggatgacaagcttccgtgaagttctggagaaaatgctggtcattgttgtgctaccagtcaggaacagcctgaggagagaaaatgaactcttctcctcccacctcgtctctaacacctgtggattactggccagcattgtcagtgaactgacagcgtcagccctgggatctgaggttgatggacttaattctcttcactctgtaaaagctagtgctaaccgatttacaaaaacaagtcagggcagaagttggaacactgggaacgggtcccctgatgcaatctgtttttcagtagacaaacctggaatagttgtggttggtttctctgtctatggaggaggtggaattcatgaatatgaattagaggtgttggttgatgatagtgaacatgcaggagattcaactcattcccacagatggacatctctggaattagtgaaaggaacgtacacaacggatgactcacccagtgatatagctgagatcagacttgacaaagtggttcctttaaaggaaaatgttaaatatgctgtgcgcttgaggaactatggaagccgtacagccaatggagatggaggaatgaccacagttcagtgccctgatggtgtgacattcacattcagcacgtgcagcttgagcagtaacggcacaaaccaaaccagaggacagatcccacagatactctactataggagtgaatttgatggagatttacaatcccaacttctgagtaaagccaatgaagaagataaaaactgtagcagagcattgtctgttgtaagcactgtcgttcgagcctctaaggacctcctgcacagagctcttgctgtggatgctgatgacattccagaactgctgagttcttccagtctgttttccatgctgctcccccttattatagcctacataggaccagtagctgctgctattcccaaggtggctgtagaagtctttggccttgtccaacaattgcttccgtcagttgccattttgaatcagaagtatgcaccgcctgccttcaaccctaatcagtcgacagatagcaccacaggaaaccagcctgaacagggcctctctgcttgtacaacctccagtcactatgctgtcatagagagtgagcacccgtataaacctgcctgtgtgatgcattacaaggtgacattcccagaatgtgtgaggtggatgacaatcgaatttgaccctcagtgtggtactgcacagtcagaagatgtccttcgtttgttgattcctgtcagaactgttcagaattcaggatatggaccaaaattgacatctgttcatgaaaatcttaattcatggatagaattaaagaaattttcaggatcctctgggtggcctactatggttttggtgttgccaggaaatgaggcccttttttcattggagactgcatcagattatgtgaaagatgacaaagcttctttctatggttttaagtgttttgcaattggatatgaatttagccctggacctgatgagggagtcatccaattggaaaaagaattagccaatcttggtggggtttgtgcagcagctctgatgaagaaggacctagcacttcctattggtaatgaattagaagaagaccttgaaattcttgaggaggctgcattgcaggtgtgcaaaacccattctggaattcttggaaagggtctagctctttctcattcaccaactatattagaagcacttgagggaaatttaccactccaaatccaaagcaatgaacagtcttttctggatgattttattgcctgtgtcccaggatcaagtggtggaaggcttgcaaggtggcttcagccagattcatatgcggatcctcagaaaacatctttgatcctgaataaggatgatattcgttgtggttggcctaccaccataactgttcaaacaaaagaccagtatggggatgtggtacatgttcccaatatgaaggtggaagtgaaagctgtccctgtttctcagaaaaaaatgtctttacaacaagatcaagcaaagaaacctcaaaggattcctggcagtcctgcagtaacagctgcatcttctaatactgacatgacttatggagggctggcatcaccaaagctagatgtttcatatgaaccaatgatagtgaaggaagctcgatatattgccataacaatgatgaaggtttatgaaaattattcatttgaagaactacgttttgcatcaccaactcctaagagacccagtgagaatatgctgatccgtgtcaataatgatgggacttattgtgcaaattggactccaggggctattggactctacactcttcatgttaccattgatggcattgaaatcgatgctggtctggaagtaaaagtaaaagacccaccaaaagggatgataccaccaggaactcagttggtcaaaccaaagtctgaacctcagcctaataaggttcgaaaatttgtggccaaggacagtgcggggcttcgcatccgtagccacccttcccttcagagtgagcagataggcatagtgaaagtcaatggaactatcacttttattgatgagatccataatgatgatggtgtgtggctgaggctgaatgatgagacaataaagaagtatgtccctaacatgaatggttacactgaagcctggtgcctctcttttaatcaacatcttggcaagagtcttctggtccctgttgacaatatctttaatgctagccaaggagtcagggatttggacgtattttcatggacttccaaagcttttttcccccaggaatctaaaactaatactgatgactttttcaaagacataaactcctgctgcccacaggaagcaacaatgcaagaacaagatatgccattcttgcgaggagggccaggcatgtacaaggtagtgaagacgggaccttcaggtcacaacatcagaagctgccctaaccttagaggtatcccaattggaatgttagttctgggaaacaaagtcaaagcagtgggagaggtaaccaattctgaagggacatgggtgcaactggatcagaacagcatggtagagttctgtgagagtgatgaaggagaggcatggtccttagctagagacagaggcggaaaccagtacctccgacatgaagatgaacaagctcttctggatcagaattctcaaactcctcctccaagccctttctcagtgcaagcttttaataaaggggcaagttgcagtgcccaaggatttgattatggactcggaaatagcaaaggtgatcgaggaaacatctcaacatcttctaaaccagcctctacatcaggaaaatcagagctgtcctctaaacacagcagatcgcttaaacctgatggacgtatgagccggactactgctgatcagaagaagccaaggggcacagaaagtttatctgctagtgaatccctcatcttaaaatctgatgctgcaaagttgaggtcagattcccacagtaggtcattatcccccaaccataacaccttgcagacattgaaatctgatgggaggatgccttctagctccagagctgaatccccaggaccaggttctcggttgtcatctcctaagccaaagactctcccagccaataggtctagcccatcgggtgctagttctccacgctcctcctcaccacatgataaaaatctacctcaaaaaagtactgctcctgttaagacaaagcttgatcctcctcgggaacgttctaaatcagactcttacacacttgatccagataccctccgcaagaagaaaatgcccctcacagaacctttgagaggacggtcaacgtcaccaaaaccaaaatcagtaccaaaggattctacagattcccctggatctgaaaatagagctccctctccccatgtggtacaggaaaacctccacagtgaggtggtcgaagtctgcacctcaagtactttaaaaacaaatagtctaacagacagcacctgcgatgacagcagtgaatttaagagtgtggatgaaggttcaaataaagttcattttagcattggaaaagcaccactgaaagatgaacaggaaatgagagcatctcccaaaataagtcgaaaatgtgctaatagacacaccaggcccaaaaaagaaaaatcgagttttcttttcaaaggagatggatccaagcctttagagccagccaagcaagccatgtctccttctgtggccgaatgtgccagagctgtgtttgcttccttcctctggcatgaaggcatagtacatgatgcaatggcttgttcttctttcctaaagtttcatcctgaactttccaaagaacatgctcctataaggagtagtttaaatagccaacaacctacagaggaaaaagaaaccaagttaaaaaatagacattcattagaaatatcatctgcactgaatatgtttaatattgcaccccatggaccagatatatctaagatgggtagcatcaacaaaaacaaggtattgtctatgcttaaggaaccacctctgcatgaaaaatgtgaggatgggaaaaccgagaccacttttgaaatgtccatgcataacacaatgaagtctaagtctcctcttcccttaactttacaacatttagtggctttttgggaagacatctctttggctactatcaaagctgcttcccagaatatgatttttccaagtcctggttcctgtgcagttcttaaaaagaaagagtgtgagaaagagaataagaagtccaaaaaggaaaaaaagaaaaaagaaaaggcagaagttaggcccaggggtaatttgtttggagagatggcccagctggcagtaggaggaccagagaaagataccatctgtgaactgtgtggggagtcacatccatacccggtgacctatcacatgagacaagctcacccaggttgtggccgatatgctggtggacaaggttacaatagcattgggcatttttgtggaggatgggctggtaactgtggtgatggtggcataggaggaagcacttggtatctggtatgtgatcgctgtagagaaaaatacctccgcgaaaaacaggctgctgcaagggagaaggtcaaacaatctaggagaaaaccaatgcaagtcaagacccctcgtgccttgcccaccatggaagctcaccaggtgattaaagccaatgcactcttcctgctgtccctgagcagtgcagcagaaccgagcattctgtgttaccatcctgcaaagccattccaatctcagttgcccagtgtaaaagaaggcatttctgaggatcttcctgtgaaaatgccttgtctctacctgcagacattagctaggcatcatcatgaaaattttgtgggctatcaagatgacaatctattccaggatgaaatgagatatctacgttcaacatctgtacctgccccgtatatatcagtaactcctgatgcaagtcctaatgtatttgaagagccagagagcaatatgaagtctatgccaccaagtttagaaaccagtcccataactgatactgatcttgcaaagagaactgtcttccaaagatcatactcagttgttgcttccgaatatgataaacaacactccattttacctgcacgagttaaagctattcctagaagaagagttaacagtggagacactgaagttggttcttcccttttgagacatccgtctcctgagctttctcggctaatctcagcccacagctctctttctaaaggagaacgaaatttccagtggccagttttagcttttgttatacaacatcatgatctagaaggtcttgaaatagcaatgaaacaggccctaaggaaatctgcttgtcgagtttttgctatggaggctttcaactggcttctgtgtaatgtcatccaaaccacttctctccatgatattctgtggcattttgtggcatcactgactcctgcaccagtggaaccagaggaagaagaggatgaagaaaataaaacaagcaaagaaaattcagaacaagagaaagatacaagagtatgtgaacatccactctcagacatagtgattgccggggaagctgctcatcctttaccacacacctttcaccgcttgctgcagaccatctcagaccttatgatgtctctccccagcggcagttcattacagcaaatggccctgaggtgctggagtctcaaattcaagcaatctgatcaccagttccttcatcagagcaacgtctttcatcacattaacaatattttgtcaaagtcagatgatggcgatagtgaagagagttttagcatcagtatacagtctggctttgaagctatgagtcaggaattatgcatagtaatgtgcttaaaggacttaaccagcattgttgacataaaaacttcaagccgacctgccatgattggcagtttgacagacggctccacagaaaccttttgggaatcaggagatgaagataaaaacaaaactaagaacatcaccatcaactgtgtaaaaggaatcaatgcccgctatgtgtctgttcacgtggacaattcccgagatcttgggaataaagttacctcaatgaccttcttaactggcaaagcagtagaagatttgtgcagaataaagcaggttgatctggattccaggcacattggctgggtaacaagtgaacttccaggaggggataatcacatcataaaaattgaattaaaaggcccagaaaatacactgagagttcgacaagtcaaagtcctgggctggaaagatggtgaaagcacaaaaatagctggccagatttcagccagtgtggcccagcagaggaactgtgaagctgagactctgcgagtattcagactgattacgtctcaagtatttggaaagctcatctctggagatgctgaacctacaccagaacaagaggaaaaagcactattgtcatcacctgaaggagaagaaaaagtatacaatgcaacatcagatgctgacctgaaagaacatatggttggaatcatattcagcaggagtaagctgactaacttacaaaaacaggtgtgtgctcatattgtccaagctattcgcatggaagctaccagagtccgtgaagaatgggaacatgctatatcaagcaaagaaaatgccaattctcagccaaatgatgaagatgcctcctctgatgcctactgctttgagctgctctctatggttttagcactgagtggctctaacgttggccggcaatatctggctcaacagctaaccctgcttcaggatctcttctcgctgcttcacacagcctctcctagagtccagagacaggtaacctctttactaagaagagttttgcctgaagtaacccctagtcgtctggccagcatcataggagtgaaatccctccccccagcagatatcagtgatatcattcactcaacagagaaaggagactggaataagctgggtatcttggacatgtttctaggatgcattgccaaagcactcactgtacagctaaaagccaaaggaaccaccatcactggaacagctggtaccactgtgggcaaaggagttacaacagttactcttccgatgattttcaattccagttatctccgacgaggtgaaagtcattggtggatgaagggctcaacccctacccagatctcagagatcatcattaaacttatcaaggatatggcagcaggtcatctgtcagaagcttggtcccgagtgacaaaaaatgctattgcagaaaccatcattgccttgaccaagatggaagaagaatttaggtctccagtgagatgtattgcaacaactagactctggcttgctctcgcatccctatgtgttcttgatcaggaccacgtagatcgtctctcctcggggagatggatgggaaaggatggacaacaaaaacaaatgcctatgtgtgataaccatgatgatggtgaaactgcagcaatcattttatgcaatgtctgtggaaatttatgtacagactgtgacagattccttcaccttcatcgaagaaccaaaactcatcaaagacaggtcttcaaagaagaagaagaagctataaaggttgaccttcatgaaggttgtggtagaaccaaattgttctggttgatggcactggcagattctaaaacaatgaaggcaatggtggaattccgagaacacacaggcaaacccaccacgagtagctcagaagcatgtcgcttctgtggttccaggagtggaacagagttatctgctgttggcagtgtttgttctgatgcagattgccaggaatacgctaagatagcctgtagtaagacgcatccttgtggccatccatgcgggggtgttaaaaacgaagagcactgtctgccctgtctacacggctgtgacaaaagtgccacaagcctgaagcaagacgccgatgacatgtgcatgatatgtttcaccgaagcgctctcggcagcaccagccattcagctggattgtagtcacatattccacttacagtgctgtcggcgagtattagaaaatcgatggcttggcccaaggataacatttggatttatatcttgtcccatttgcaagaacaaaattaatcacatagtactaaaagacctacttgatccaataaaagaactctatgaggatgtcagaagaaaagccttaatgagattggaatatgaaggtctgcataagagtgaagctatcacaactcctggtgtgaggttttataatgacccagctggctatgcaatgaatagatatgcatattatgtgtgctacaaatgcagaaaggcatattttggtggtgaagctcgctgcgatgctgaggctggacggggagatgattatgatcccagagagctcatttgtggtgcctgttctgatgtttccagggctcagatgtgtcccaaacatggcacagactttttggaatataaatgtcgctactgctgttcagtggctgtttttttctgttttggaacaacacatttttgtaatgcttgtcatgatgattttcaaagaatgactagcattcctaaggaagaactaccacactgtcctgcaggtcccaaaggcaagcagttagaaggaactgaatgtccactccatgttgttcatccacccactggggaagagtttgctctgggatgtggagtgtgcagaaatgcccacactttttagaacacgcagatcctttgtctacagagagaaaaattgccttcatcccccaagaggatgcggtgaagtttaaactctgctcaggataaggacgggaccatttttacatccatgaaaatgaaccattcacagtgcaagaaggataccaaataccatgtacataattcttgctatgaaaagtttccccattattttggtttatcttcttttgaacaaatgacatcaaacttgtgaggtgtttgcatgtggccattaccgtcattggcctgtgaagcattggacatttatagataattgatataaaagaatcgccatgcccatggactaagaacgatgctggctttcaagcaaaaaagaaaaataatcattgtttattgtatactgcctttttgtaatcctgtacaattgcatcacgggtggggataaaaagaggaatattctggtttatttcctagactgttatttaaaaaaaaaaaaaacattgtgttaggacagcatataaatgtaataagtatcacactgtatataaacatatcaatgtttgtcctgtataagaattactaaattacaaatgcaatttcatttaaacttctaggttaagtttgagcctgaaattttaatgaagtgcaatactgagtgtgcctcattatcttgcagctgtaaacatattggaatgtacatgtcaataaaaccactgtacatttttatacagtgataaagtcta

SEQ ID NO: 357462 - DNA, 14769 bp, Homo sapiens
tcttggagcgttctcagtttctcaacagatcttcacttgctaggcagccagaagccggcggcagtggcggcaccgcctcctcctcacattcccggggtggcggggttagatgagcggccccagtcgcggcgccgggggcgctgttcatgccggttcccgacggctccgtggctgctgcggggctggggctggggctacccgccgcggactccccgggtcactaccagctgctgctgtcaggccgggccctggccgaccgctaccggaggatttataccgctgcgctcaatgacagggaccaggggggcggcagcgctggacacccagcctccaggaataagaaaattttaaataagaagaaattgaaaagaaaacagaagagcaaatcaaaagtgaagacaagaagcaagtctgaaaacttagagaatacagtaatcataccagatatcaaactacatagcaatccttctgctttcaatatttactgtaatgtacgccattgcgttctggaatggcagaaaaaggaaatatcattggcagccgcatctaagaactctgtgcagagtggagaatcagatagtgatgaagaagaggaatccaaagagccccctatcaagcttccaaagattattgaggttggcctttgtgaagtttttgaattgatcaaagagacacgattttctcatccatccctgtgtctcaggagtctccaagccctgctcaacgtgctgcagggccagcagccagaagtgctccagtctgagccacctgaggtcctagagtctctcttccagcttcttttggaaatcaccgttcgaagtactgggatgaatgacagcacaggacagtccttaacagcactttcctgtgcttgcctctttagtctggtggcttcttggggagaaacaggaaggacacttcaggccatctctgctatcctcaccaacaatggaagccatgcttgccaaactattcagagacttaggaatgccattagagctcatagcaggagtataagaactacgttcatggaaagcctcccagaggatatgaggtgccaacaattctaaattcgctacagagaagtgtacaagcagttttggtgggaaaaattcaaattcaggactggtttagtaatggcattaagaaagcagctttaatgcacaagtggccattaaaagaaatatctgttgatgaagatgaccaatgtctacttcagaatgatggattttttctttatctattatgcaaggatggattatataaaataggctctggatacagtggaacagttaggggccatatatacaattctacatcccgtattagaaacagaaaagaaaaaaagtcttggttagggtatgctcagggttatttattatatagagatgtgaataaccacagcatgacagccataaggataagccctgaaacactggagcaagatggtactgtgatgttaccagattgccacactgaaggtcaaaatattttattcactgatggagaatatattaatcagatagctgcttcaagagatgatggctttgttgtcagaatatttgccacaagcactgaacctgttctacagcaagaattgcaacttaaactggctagaaaatgcttacatgcctgtggtatctcactattcgatctggaaaaggacttgcatattataagtacaggatttgatgaggagtcagcaattcttggtgcaggacgagagtttgcgctaatgaaaacagcaaatggaaagatatattacactggcaaataccagagtcttggaatcaaacaaggtggtccttcagcaggaaaatgggttgagctaccaattacaaaatctccaaagatagtacacttctcagttggacacgatggctctcacgcccttttagttgcagaagatgggagcatattctttacaggatctgctagtaaaggagaagatggagaatcaattaagagcagacggcaatccaaaccttataaacctaaaaagataattaagatggaaggaaagattgtggtatatacagcctgcaataatggaagtagttctgttatttctaaagatggagaactctacatgtttggaaaagatgccatttactctgatagttcaagtttggtaactgatttgaagggccattttgtaactcaggtagctatgggcaaagctcacacttgtgttttaatgaagaatggagaggtgtggacatttggtgtaaataataaaggacagtgtggacgagatactggtgccatgaaccaaggtgggaaagggtttggagttgaaaatatggcaacagcaatggatgaagacctggaagaagaactagatgaaaaagatgagaagtctatgatgtgccctccaggcatgcacaaatggaagctggagcagtgcatggtttgcactgtctgtggagactgtacaggttatggagccagctgtgtcagtagtggacggccagacagagtccccggagggatctgtggttgtggttccggagaatctggttgtgctgtgtgtggatgttgcaaggcctgtgcaagagagttagatggtcaagaggcaagacaaagaggaattcttgatgcagtgaaagaaatgatacctttagatcttcttttagctgtcccagtgcccggggttaacattgaagaacaccttcagttacgacaagaagaaaaacggcaacgtgtaatcagaaggcacagattagaggaaggaagaggcccccttgtatttgctggtcctatttttatgaaccatcgagaacaggctctagccagactcagatcccatccagcacacgtaaagcataaacgggacaagcacaaagatggaagtggagaaagaggcgaaaaggatgcaagcaaaatcacaacataccctccaggctctgtgcgatttgactgtgagctccgggcagtccaagtcagctgtggatttcaccattcagtggttttaatggaaaatggagatgtctatacatttggttatgggcagcatgggcagctaggacatggagatgtcaactccaggggatgtcccactcttgttcaagcattgccaggccctagcacacaagtcactgcaggcagcaaccatacggcagtacttttaatggatggacaggtcttcacatttggaagtttttctaaaggacaactgggcagaccaattttggatgtgccatattggaatgcaaagccagctcccatgcctaacattggatcaaaatatggaagaaaagctacttggataggtgcaagtggggaccaaacttttttacgaattgatgaagcacttattaattctcatgtacttgctacatcagaaatttttgccagtaaacacataataggcttggtacctgcttctatatcagaacctcctccatttaaatgccttctgataaataaagtggatgggagttgtaaaacttttaatgactcagaacaagaggatctgcaaggatttggtgtgtgtcttgatcctgtatatgatgtaatttggaggtttcgaccaaatactagagagctgtggtgttacaatgcggtggttgctgatgccaggcttccctctgcagcagacatgcagtccagatgtagtatcctaagtcctgaacttgccttaccaacaggatcaagggccctcactacccgatctcatgcagctttgcacattttaggttgtcttgataccttggcagctatgcaggacttaaaaatgggtgttgcaagtacagaggaagagactcaagcagtaatgaaggtttattctaaagaagattatagtgtggtaaacaggtttgaaagtcatggaggaggctggggttattctgcccattcagtagaagctatacgtttcagtgccgacactgatattttacttggtggtcttggtctgtttggaggtagaggagaatatactgctaaaattaagctgtttgaattgggtcctgatggaggagatcatgaaactgatggtgaccttcttgcagagactgatgtattggcttatgactgtgctgctagagaaaaatatgcaatgatgtttgatgagcctgttctcctgcaagctgggtggtggtatgtggcatgggcccgagtgtcaggacccagcagtgactgtggatctcatggacaggcatctattaccacagatgatggggttgttttccagttcaagagttcaaagaaatcaaataatggtacagatgttaatgcgggtcagatacctcagttattatacagacttccaaccagtgatggcagtgcttcaaaaggcaaacagcaaaccagtgaacctgtacacattttaaagaggtcttttgcaagaactgtctcagtggaatgttttgagtcattgttgagtattcttcactggagctggaccaccttagtcttaggagttgaagaacttagaggattaaaaggattccagttcacagctacactcctagatttagagagactgcgctttgtgggtacctgttgtctgaggttattgcgtgtctatacctgtgaaatttacccagtgtcagctacaggaaaagcagttgtagaagaaactagcaaattagcagagtgtattggaaaaaccagaactttgttaagaaaaattttatcagaaccacttgatcactgcatggtgaaattggataatgatcctcaaggatatctcagtcaacccttgagtcttctagaagctgtccttcaggaatgtcataatactttcactgcctgctttcattctttctacccaactcctgccttacagtgggcttgcctttgtgatctgctgaattgtttggatcaggatatccaagaagcaaacttcaagacatcaagtagccgactccttgcagctgttatgtcagctctgtgtcacacgtctgttaagctgacttccatcttcccgattgcgtatgatggagaagtattactacgatcaattgttaaacaagttagtacagagaacgactcaacactagttcatcgttttccccttttggtggcacatatggaaaaactcagccagagtgaagagaatatctcagggatgacaagcttccgtgaagttctggagaaaatgctggtcattgttgtgctaccagtcaggaacagcctgaggagagaaaatgaactcttctcctcccacctcgtctctaacacctgtggattactggccagcattgtcagtgaactgacagcgtcagccctgggatctgaggttgatggacttaattctcttcactctgtaaaagctagtgctaaccgatttacaaaaacaagtcagggcagaagttggaacactgggaacgggtcccctgatgcaatctgtttttcagtagacaaacctggaatagttgtggttggtttctctgtctatggaggaggtggaattcatgaatatgaattagaggtgttggttgatgatagtgaacatgcaggagattcaactcattcccacagatggacatctctggaattagtgaaaggaacgtacacaacggatgactcacccagtgatatagctgagatcagacttgacaaagtggttcctttaaaggaaaatgttaaatatgctgtgcgcttgaggaactatggaagccgtacagccaatggagatggaggaatgaccacagttcagtgccctgatggtgtgacattcacattcagcacgtgcagcttgagcagtaacggcacaaaccaaaccagaggacagatcccacagatactctactataggagtgaatttgatggagatttacaatcccaacttctgagtaaagccaatgaagaagataaaaactgtagcagagcattgtctgttgtaagcactgtcgttcgagcctctaaggacctcctgcacagagctcttgctgtggatgctgatgacattccagaactgctgagttcttccagtctgttttccatgctgctcccccttattatagcctacataggaccagtagctgctgctattcccaaggtggctgtagaagtctttggccttgtccaacaattgcttccgtcagttgccattttgaatcagaagtatgcaccgcctgccttcaaccctaatcagtcgacagatagcaccacaggaaaccagcctgaacagggcctctctgcttgtacaacctccagtcactatgctgtcatagagagtgagcacccgtataaacctgcctgtgtgatgcattacaaggtgacattcccagaatgtgtgaggtggatgacaatcgaatttgaccctcagtgtggtactgcacagtcagaagatgtccttcgtttgttgattcctgtcagaactgttcagaattcaggatatggaccaaaattgacatctgttcatgaaaatcttaattcatggatagaattaaagaaattttcaggatcctctgggtggcctactatggttttggtgttgccaggaaatgaggcccttttttcattggagactgcatcagattatgtgaaagatgacaaagcttctttctatggttttaagtgttttgcaattggatatgaatttagccctggacctgatgagggagtcatccaattggaaaaagaattagccaatcttggtggggtttgtgcagcagctctgatgaagaaggacctagcacttcctattggtaatgaattagaagaagaccttgaaattcttgaggaggctgcattgcaggtgtgcaaaacccattctggaattcttggaaagggtctagctctttctcattcaccaactatattagaagcacttgagggaaatttaccactccaaatccaaagcaatgaacagtcttttctggatgattttattgcctgtgtcccaggatcaagtggtggaaggcttgcaaggtggcttcagccagattcatatgcggatcctcagaaaacatctttgatcctgaataaggatgatattcgttgtggttggcctaccaccataactgttcaaacaaaagaccagtatggggatgtggtacatgttcccaatatgaaggtggaagtgaaagctgtccctgtttctcagaaaaaaatgtctttacaacaagatcaagcaaagaaacctcaaaggattcctggcagtcctgcagtaacagctgcatcttctaatactgacatgacttatggagggctggcatcaccaaagctagatgtttcatatgaaccaatgatagtgaaggaagctcgatatattgccataacaatgatgaaggtttatgaaaattattcatttgaagaactacgttttgcatcaccaactcctaagagacccagtgagaatatgctgatccgtgtcaataatgatgggacttattgtgcaaattggactccaggggctattggactctacactcttcatgttaccattgatggcattgaaatcgatgctggtctggaagtaaaagtaaaagacccaccaaaagggatgataccaccaggaactcagttggtcaaaccaaagtctgaacctcagcctaataaggttcgaaaatttgtggccaaggacagtgcggggcttcgcatccgtagccacccttcccttcagagtgagcagataggcatagtgaaagtcaatggaactatcacttttattgatgagatccataatgatgatggtgtgtggctgaggctgaatgatgagacaataaagaagtatgtccctaacatgaatggttacactgaagcctggtgcctctcttttaatcaacatcttggcaagagtcttctggtccctgttgacaatatctttaatgctagccaaggagtcagggatttggacgtattttcatggacttccaaagcttttttcccccaggaatctaaaactaatactgatgactttttcaaagacataaactcctgctgcccacaggaagcaacaatgcaagaacaagatatgccattcttgcgaggagggccaggcatgtacaaggtagtgaagacgggaccttcaggtcacaacatcagaagctgccctaaccttagaggtatcccaattggaatgttagttctgggaaacaaagtcaaagcagtgggagaggtaaccaattctgaagggacatgggtgcaactggatcagaacagcatggtagagttctgtgagagtgatgaaggagaggcatggtccttagctagagacagaggcggaaaccagtacctccgacatgaagatgaacaagctcttctggatcagaattctcaaactcctcctccaagccctttctcagtgcaagcttttaataaaggggcaagttgcagtgcccaaggatttgattatggactcggaaatagcaaaggtgatcgaggaaacatctcaacatcttctaaaccagcctctacatcaggaaaatcagagctgtcctctaaacacagcagatcgcttaaacctgatggacgtatgagccggactactgctgatcagaagaagccaaggggcacagaaagtttatctgctagtgaatccctcatcttaaaatctgatgctgcaaagttgaggtcagattcccacagtaggtcattatcccccaaccataacaccttgcagacattgaaatctgatgggaggatgccttctagctccagagctgaatccccaggaccaggttctcggttgtcatctcctaagccaaagactctcccagccaataggtctagcccatcgggtgctagttctccacgctcctcctcaccacatgataaaaatctacctcaaaaaagtactgctcctgttaagacaaagcttgatcctcctcgggaacgttctaaatcagactcttacacacttgatccagataccctccgcaagaagaaaatgcccctcacagaacctttgagaggacggtcaacgtcaccaaaaccaaaatcagtaccaaaggattctacagattcccctggatctgaaaatagagctccctctccccatgtggtacaggaaaacctccacagtgaggtggtcgaagtctgcacctcaagtactttaaaaacaaatagtctaacagacagcacctgcgatgacagcagtgaatttaagagtgtggatgaaggttcaaataaagttcattttagcattggaaaagcaccactgaaagatgaacaggaaatgagagcatctcccaaaataagtcgaaaatgtgctaatagacacaccaggcccaaaaaagaaaaatcgagttttcttttcaaaggagatggatccaagcctttagagccagccaagcaagccatgtctccttctgtggccgaatgtgccagagctgtgtttgcttccttcctctggcatgaaggcatagtacatgatgcaatggcttgttcttctttcctaaagtttcatcctgaactttccaaagaacatgctcctataaggagtagtttaaatagccaacaacctacagaggaaaaagaaaccaagttaaaaaatagacattcattagaaatatcatctgcactgaatatgtttaatattgcaccccatggaccagatatatctaagatgggtagcatcaacaaaaacaaggtattgtctatgcttaaggaaccacctctgcatgaaaaatgtgaggatgggaaaaccgagaccacttttgaaatgtccatgcataacacaatgaagtctaagtctcctcttcccttaactttacaacatttagtggctttttgggaagacatctctttggctactatcaaagctgcttcccagaatatgatttttccaagtcctggttcctgtgcagttcttaaaaagaaagagtgtgagaaagagaataagaagtccaaaaaggaaaaaaagaaaaaagaaaaggcagaagttaggcccaggggtaatttgtttggagagatggcccagctggcagtaggaggaccagagaaagataccatctgtgaactgtgtggggagtcacatccatacccggtgacctatcacatgagacaagctcacccaggttgtggccgatatgctggtggacaaggttacaatagcattgggcatttttgtggaggatgggctggtaactgtggtgatggtggcataggaggaagcacttggtatctggtatgtgatcgctgtagagaaaaatacctccgcgaaaaacaggctgctgcaagggagaaggtcaaacaatctaggagaaaaccaatgcaagtcaagacccctcgtgccttgcccaccatggaagctcaccaggcatcatcatgaaaattttgtgggctatcaagatgacaatctattccaggatgaaatgagatatctacgttcaacatctgtacctgccccgtatatatcagtaactcctgatgcaagtcctaatgtatttgaagagccagagagcaatatgaagtctatgccaccaagtttagaaaccagtcccataactgatactgatcttgcaaagagaactgtcttccaaagatcatactcagttgttgcttccgaatatgataaacaacactccattttacctgcacgagttaaagctattcctagaagaagagttaacagtggagacactgaagttggttcttcccttttgagacatccgtctcctgagctttctcggctaatctcagcccacagctctctttctaaaggagaacgaaatttccagtggccagttttagcttttgttatacaacatcatgatctagaaggtcttgaaatagcaatgaaacaggccctaaggaaatctgcttgtcgagtttttgctatggaggctttcaactggcttctgtgtaatgtcatccaaaccacttctctccatgatattctgtggcattttgtggcatcactgactcctgcaccagtggaaccagaggaagaagaggatgaagaaaataaaacaagcaaagaaaattcagaacaagagaaagatacaagagtatgtgaacatccactctcagacatagtgattgccggggaagctgctcatcctttaccacacacctttcaccgcttgctgcagaccatctcagaccttatgatgtctctccccagcggcagttcattacagcaaatggccctgaggtgctggagtctcaaattcaagcaatctgatcaccagttccttcatcagagcaacgtctttcatcacattaacaatattttgtcaaagtcagatgatggcgatagtgaagagagttttagcatcagtatacagtctggctttgaagctatgagtcaggaattatgcatagtaatgtgcttaaaggacttaaccagcattgttgacataaaaacttcaagccgacctgccatgattggcagtttgacagacggctccacagaaaccttttgggaatcaggagatgaagataaaaacaaaactaagaacatcaccatcaactgtgtaaaaggaatcaatgcccgctatgtgtctgttcacgtggacaattcccgagatcttgggaataaagttacctcaatgaccttcttaactggcaaagcagtagaagatttgtgcagaataaagcaggttgatctggattccaggcacattggctgggtaacaagtgaacttccaggaggggataatcacatcataaaaattgaattaaaaggcccagaaaatacactgagagttcgacaagtcaaagtcctgggctggaaagatggtgaaagcacaaaaatagctggccagatttcagccagtgtggcccagcagaggaactgtgaagctgagactctgcgagtattcagactgattacgtctcaagtatttggaaagctcatctctggagatgctgaacctacaccagaacaagaggaaaaagcactattgtcatcacctgaaggagaagaaaaagtatacaatgcaacatcagatgctgacctgaaagaacatatggttggaatcatattcagcaggagtaagctgactaacttacaaaaacaggtgtgtgctcatattgtccaagctattcgcatggaagctaccagagtccgtgaagaatgggaacatgctatatcaagcaaagaaaatgccaattctcagccaaatgatgaagatgcctcctctgatgcctactgctttgagctgctctctatggttttagcactgagtggctctaacgttggccggcaatatctggctcaacagctaaccctgcttcaggatctcttctcgctgcttcacacagcctctcctagagtccagagacaggtaacctctttactaagaagagttttgcctgaagtaacccctagtcgtctggccagcatcataggagtgaaatccctccccccagcagatatcagtgatatcattcactcaacagagaaaggagactggaataagctgggtatcttggacatgtttctaggatgcattgccaaagcactcactgtacagctaaaagccaaaggaaccaccatcactggaacagctggtaccactgtgggcaaaggagttacaacagttactcttccgatgattttcaattccagttatctccgacgaggtgaaagtcattggtggatgaagggctcaacccctacccagatctcagagatcatcattaaacttatcaaggatatggcagcaggtcatctgtcagaagcttggtcccgagtgacaaaaaatgctattgcagaaaccatcattgccttgaccaagatggaagaagaatttaggtctccagtgagatgtattgcaacaactagactctggcttgctctcgcatccctatgtgttcttgatcaggaccacgtagatcgtctctcctcggggagatggatgggaaaggatggacaacaaaaacaaatgcctatgtgtgataaccatgatgatggtgaaactgcagcaatcattttatgcaatgtctgtggaaatttatgtacagactgtgacagattccttcaccttcatcgaagaaccaaaactcatcaaagacaggtcttcaaagaagaagaagaagctataaaggttgaccttcatgaaggttgtggtagaaccaaattgttctggttgatggcactggcagattctaaaacaatgaaggcaatggtggaattccgagaacacacaggcaaacccaccacgagtagctcagaagcatgtcgcttctgtggttccaggagtggaacagagttatctgctgttggcagtgtttgttctgatgcagattgccaggaatacgctaagatagcctgtagtaagacgcatccttgtggccatccatgcgggggtgttaaaaacgaagagcactgtctgccctgtctacacggctgtgacaaaagtgccacaagcctgaagcaagacgccgatgacatgtgcatgatatgtttcaccgaagcgctctcggcagcaccagccattcagctggattgtagtcacatattccacttacagtgctgtcggcgagtattagaaaatcgatggcttggcccaaggataacatttggatttatatcttgtcccatttgcaagaacaaaattaatcacatagtactaaaagacctacttgatccaataaaagaactctatgaggatgtcagaagaaaagccttaatgagattggaatatgaaggtctgcataagagtgaagctatcacaactcctggtgtgaggttttataatgacccagctggctatgcaatgaatagatatgcatattatgtgtgctacaaatgcagaaaggcatattttggtggtgaagctcgctgcgatgctgaggctggacggggagatgattatgatcccagagagctcatttgtggtgcctgttctgatgtttccagggctcagatgtgtcccaaacatggcacagactttttggaatataaatgtcgctactgctgttcagtggctgtttttttctgttttggaacaacacatttttgtaatgcttgtcatgatgattttcaaagaatgactagcattcctaaggaagaactaccacactgtcctgcaggtcccaaaggcaagcagttagaaggaactgaatgtccactccatgttgttcatccacccactggggaagagtttgctctgggatgtggagtgtgcagaaatgcccacactttttagaacacgcagatcctttgtctacagagagaaaaattgccttcatcccccaagaggatgcggtgaagtttaaactctgctcaggataaggacgggaccatttttacatccatgaaaatgaaccattcacagtgcaagaaggataccaaataccatgtacataattcttgctatgaaaagtttccccattattttggtttatcttcttttgaacaaatgacatcaaacttgtgaggtgtttgcatgtggccattaccgtcattggcctgtgaagcattggacatttatagataattgatataaaagaatcgccatgcccatggactaagaacgatgctggctttcaagcaaaaaagaaaaataatcattgtttattgtatactgcctttttgtaatcctgtacaattgcatcacgggtggggataaaaagaggaatattctggtttatttcctagactgttatttaaaaaaaaaaaaaacattgtgttaggacagcatataaatgtaataagtatcacactgtatataaacatatcaatgtttgtcctgtataagaattactaaattacaaatgcaatttcatttaaacttctaggttaagtttgagcctgaaattttaatgaagtgcaatactgagtgtgcctcattatcttgcagctgtaaacatattggaatgtacatgtcaataaaaccactgtacatttttatacagtgataaagtcta

SEQ ID NO: 357463 - DNA, 8962 bp, Homo sapiens
actagtccacggcttggtggtttcccggcagaccttctccaagcctgcagattcgagaaaccagcctggacaccaagtctgtgtcagaagtatgcaccgcctgccttcaaccctaatcagtcgacagatagcaccacaggaaaccagcctgaacagggcctctctgcttgtacaacctccagtcactatgctgtcatagagagtgagcacccgtataaacctgcctgtgtgatgcattacaaggtgacattcccagaatgtgtgaggtggatgacaatcgaatttgaccctcagtgtggtactgcacagtcagaagatgtccttcgtttgttgattcctgtcagaactgttcagaattcaggatatggaccaaaattgacatctgttcatgaaaatcttaattcatggatagaattaaagaaattttcaggatcctctgggtggcctactatggttttggtgttgccaggaaatgaggcccttttttcattggagactgcatcagattatgtgaaagatgacaaagcttctttctatggttttaagtgttttgcaattggatatgaatttagccctggacctgatgagggagtcatccaattggaaaaagaattagccaatcttggtggggtttgtgcagcagctctgatgaagaaggacctagcacttcctattggtaatgaattagaagaagaccttgaaattcttgaggaggctgcattgcaggtgtgcaaaacccattctggaattcttggaaagggtctagctctttctcattcaccaactatattagaagcacttgagggaaatttaccactccaaatccaaagcaatgaacagtcttttctggatgattttattgcctgtgtcccaggatcaagtggtggaaggcttgcaaggtggcttcagccagattcatatgcggatcctcagaaaacatctttgatcctgaataaggatgatattcgttgtggttggcctaccaccataactgttcaaacaaaagaccagtatggggatgtggtacatgttcccaatatgaaggtggaagtgaaagctgtccctgtttctcagaaaaaaatgtctttacaacaagatcaagcaaagaaacctcaaaggattcctggcagtcctgcagtaacagctgcatcttctaatactgacatgacttatggagggctggcatcaccaaagctagatgtttcatatgaaccaatgatagtgaaggaagctcgatatattgccataacaatgatgaaggtttatgaaaattattcatttgaagaactacgttttgcatcaccaactcctaagagacccagtgagaatatgctgatccgtgtcaataatgatgggacttattgtgcaaattggactccaggggctattggactctacactcttcatgttaccattgatggcattgaaatcgatgctggtctggaagtaaaagtaaaagacccaccaaaagggatgataccaccaggaactcagttggtcaaaccaaagtctgaacctcagcctaataaggttcgaaaatttgtggccaaggacagtgcggggcttcgcatccgtagccacccttcccttcagagtgagcagataggcatagtgaaagtcaatggaactatcacttttattgatgagatccataatgatgatggtgtgtggctgaggctgaatgatgagacaataaagaagtatgtccctaacatgaatggttacactgaagcctggtgcctctcttttaatcaacatcttggcaagagtcttctggtccctgttgacaatatctttaatgctagccaaggagtcagggatttggacgtattttcatggacttccaaagcttttttcccccaggaatctaaaactaatactgatgactttttcaaagacataaactcctgctgcccacaggaagcaacaatgcaagaacaagatatgccattcttgcgaggagggccaggcatgtacaaggtagtgaagacgggaccttcaggtcacaacatcagaagctgccctaaccttagaggtatcccaattggaatgttagttctgggaaacaaagtcaaagcagtgggagaggtaaccaattctgaagggacatgggtgcaactggatcagaacagcatggtagagttctgtgagagtgatgaaggagaggcatggtccttagctagagacagaggcggaaaccagtacctccgacatgaagatgaacaagctcttctggatcagaattctcaaactcctcctccaagccctttctcagtgcaagcttttaataaaggggcaagttgcagtgcccaaggatttgattatggactcggaaatagcaaaggtgatcgaggaaacatctcaacatcttctaaaccagcctctacatcaggaaaatcagagctgtcctctaaacacagcagatcgcttaaacctgatggacgtatgagccggactactgctgatcagaagaagccaaggggcacagaaagtttatctgctagtgaatccctcatcttaaaatctgatgctgcaaagttgaggtcagattcccacagtaggtcattatcccccaaccataacaccttgcagacattgaaatctgatgggaggatgccttctagctccagagctgaatccccaggaccaggttctcggttgtcatctcctaagccaaagactctcccagccaataggtctagcccatcgggtgctagttctccacgctcctcctcaccacatgataaaaatctacctcaaaaaagtactgctcctgttaagacaaagcttgatcctcctcgggaacgttctaaatcagactcttacacacttgatccagataccctccgcaagaagaaaatgcccctcacagaacctttgagaggacggtcaacgtcaccaaaaccaaaatcagtaccaaaggattctacagattcccctggatctgaaaatagagctccctctccccatgtggtacaggaaaacctccacagtgaggtggtcgaagtctgcacctcaagtactttaaaaacaaatagtctaacagacagcacctgcgatgacagcagtgaatttaagagtgtggatgaaggttcaaataaagttcattttagcattggaaaagcaccactgaaagatgaacaggaaatgagagcatctcccaaaataagtcgaaaatgtgctaatagacacaccaggcccaaaaaagaaaaatcgagttttcttttcaaaggagatggatccaagcctttagagccagccaagcaagccatgtctccttctgtggccgaatgtgccagagctgtgtttgcttccttcctctggcatgaaggcatagtacatgatgcaatggcttgttcttctttcctaaagtttcatcctgaactttccaaagaacatgctcctataaggagtagtttaaatagccaacaacctacagaggaaaaagaaaccaagttaaaaaatagacattcattagaaatatcatctgcactgaatatgtttaatattgcaccccatggaccagatatatctaagatgggtagcatcaacaaaaacaaggtattgtctatgcttaaggaaccacctctgcatgaaaaatgtgaggatgggaaaaccgagaccacttttgaaatgtccatgcataacacaatgaagtctaagtctcctcttcccttaactttacaacatttagtggctttttgggaagacatctctttggctactatcaaagctgcttcccagaatatgatttttccaagtcctggttcctgtgcagttcttaaaaagaaagagtgtgagaaagagaataagaagtccaaaaaggaaaaaaagaaaaaagaaaaggcagaagttaggcccaggggtaatttgtttggagagatggcccagctggcagtaggaggaccagagaaagataccatctgtgaactgtgtggggagtcacatccatacccggtgacctatcacatgagacaagctcacccaggttgtggccgatatgctggtggacaaggttacaatagcattgggcatttttgtggaggatgggctggtaactgtggtgatggtggcataggaggaagcacttggtatctggtatgtgatcgctgtagagaaaaatacctccgcgaaaaacaggctgctgcaagggagaaggtcaaacaatctaggagaaaaccaatgcaagtcaagacccctcgtgccttgcccaccatggaagctcaccaggtgattaaagccaatgcactcttcctgctgtccctgagcagtgcagcagaaccgagcattctgtgttaccatcctgcaaagccattccaatctcagttgcccagtgtaaaagaaggcatttctgaggatcttcctgtgaaaatgccttgtctctacctgcagacattagctaggcatcatcatgaaaattttgtgggctatcaagatgacaatctattccaggatgaaatgagatatctacgttcaacatctgtacctgccccgtatatatcagtaactcctgatgcaagtcctaatgtatttgaagagccagagagcaatatgaagtctatgccaccaagtttagaaaccagtcccataactgatactgatcttgcaaagagaactgtcttccaaagatcatactcagttgttgcttccgaatatgataaacaacactccattttacctgcacgagttaaagctattcctagaagaagagttaacagtggagacactgaagttggttcttcccttttgagacatccgtctcctgagctttctcggctaatctcagcccacagctctctttctaaaggagaacgaaatttccagtggccagttttagcttttgttatacaacatcatgatctagaaggtcttgaaatagcaatgaaacaggccctaaggaaatctgcttgtcgagtttttgctatggaggctttcaactggcttctgtgtaatgtcatccaaaccacttctctccatgatattctgtggcattttgtggcatcactgactcctgcaccagtggaaccagaggaagaagaggatgaagaaaataaaacaagcaaagaaaattcagaacaagagaaagatacaagagtatgtgaacatccactctcagacatagtgattgccggggaagctgctcatcctttaccacacacctttcaccgcttgctgcagaccatctcagaccttatgatgtctctccccagcggcagttcattacagcaaatggccctgaggtgctggagtctcaaattcaagcaatctgatcaccagttccttcatcagagcaacgtctttcatcacattaacaatattttgtcaaagtcagatgatggcgatagtgaagagagttttagcatcagtatacagtctggctttgaagctatgagtcaggaattatgcatagtaatgtgcttaaaggacttaaccagcattgttgacataaaaacttcaagccgacctgccatgattggcagtttgacagacggctccacagaaaccttttgggaatcaggagatgaagataaaaacaaaactaagaacatcaccatcaactgtgtaaaaggaatcaatgcccgctatgtgtctgttcacgtggacaattcccgagatcttgggaataaagttacctcaatgaccttcttaactggcaaagcagtagaagatttgtgcagaataaagcaggttgatctggattccaggcacattggctgggtaacaagtgaacttccaggaggggataatcacatcataaaaattgaattaaaaggcccagaaaatacactgagagttcgacaagtcaaagtcctgggctggaaagatggtgaaagcacaaaaatagctggccagatttcagccagtgtggcccagcagaggaactgtgaagctgagactctgcgagtattcagactgattacgtctcaagtatttggaaagctcatctctggagatgctgaacctacaccagaacaagaggaaaaagcactattgtcatcacctgaaggagaagaaaaagtatacaatgcaacatcagatgctgacctgaaagaacatatggttggaatcatattcagcaggagtaagctgactaacttacaaaaacaggtgtgtgctcatattgtccaagctattcgcatggaagctaccagagtccgtgaagaatgggaacatgctatatcaagcaaagaaaatgccaattctcagccaaatgatgaagatgcctcctctgatgcctactgctttgagctgctctctatggttttagcactgagtggctctaacgttggccggcaatatctggctcaacagctaaccctgcttcaggatctcttctcgctgcttcacacagcctctcctagagtccagagacaggtaacctctttactaagaagagttttgcctgaagtaacccctagtcgtctggccagcatcataggagtgaaatccctccccccagcagatatcagtgatatcattcactcaacagagaaaggagactggaataagctgggtatcttggacatgtttctaggatgcattgccaaagcactcactgtacagctaaaagccaaaggaaccaccatcactggaacagctggtaccactgtgggcaaaggagttacaacagttactcttccgatgattttcaattccagttatctccgacgaggtgaaagtcattggtggatgaagggctcaacccctacccagatctcagagatcatcattaaacttatcaaggatatggcagcaggtcatctgtcagaagcttggtcccgagtgacaaaaaatgctattgcagaaaccatcattgccttgaccaagatggaagaagaatttaggtctccagtgagatgtattgcaacaactagactctggcttgctctcgcatccctatgtgttcttgatcaggaccacgtagatcgtctctcctcggggagatggatgggaaaggatggacaacaaaaacaaatgcctatgtgtgataaccatgatgatggtgaaactgcagcaatcattttatgcaatgtctgtggaaatttatgtacagactgtgacagattccttcaccttcatcgaagaaccaaaactcatcaaagacaggtcttcaaagaagaagaagaagctataaaggttgaccttcatgaaggttgtggtagaaccaaattgttctggttgatggcactggcagattctaaaacaatgaaggcaatggtggaattccgagaacacacaggcaaacccaccacgagtagctcagaagcatgtcgcttctgtggttccaggagtggaacagagttatctgctgttggcagtgtttgttctgatgcagattgccaggaatacgctaagatagcctgtagtaagacgcatccttgtggccatccatgcgggggtgttaaaaacgaagagcactgtctgccctgtctacacggctgtgacaaaagtgccacaagcctgaagcaagacgccgatgacatgtgcatgatatgtttcaccgaagcgctctcggcagcaccagccattcagctggattgtagtcacatattccacttacagtgctgtcggcgagtattagaaaatcgatggcttggcccaaggataacatttggatttatatcttgtcccatttgcaagaacaaaattaatcacatagtactaaaagacctacttgatccaataaaagaactctatgaggatgtcagaagaaaagccttaatgagattggaatatgaaggtctgcataagagtgaagctatcacaactcctggtgtgaggttttataatgacccagctggctatgcaatgaatagatatgcatattatgtgtgctacaaatgcagaaaggcatattttggtggtgaagctcgctgcgatgctgaggctggacggggagatgattatgatcccagagagctcatttgtggtgcctgttctgatgtttccagggctcagatgtgtcccaaacatggcacagactttttggaatataaatgtcgctactgctgttcagtggctgtttttttctgttttggaacaacacatttttgtaatgcttgtcatgatgattttcaaagaatgactagcattcctaaggaagaactaccacactgtcctgcaggtcccaaaggcaagcagttagaaggaactgaatgtccactccatgttgttcatccacccactggggaagagtttgctctgggatgtggagtgtgcagaaatgcccacactttttagaacacgcagatcctttgtctacagagagaaaaattgccttcatcccccaagaggatgcggtgaagtttaaactctgctcaggataaggacgggaccatttttacatccatgaaaatgaaccattcacagtgcaagaaggataccaaataccatgtacataattcttgctatgaaaagtttccccattattttggtttatcttcttttgaacaaatgacatcaaacttgtgaggtgtttgcatgtggccattaccgtcattggcctgtgaagcattggacatttatagataattgatataaaagaatcgccatgcccatggactaagaacgatgctggctttcaagcaaaaaagaaaaataatcattgtttattgtatactgcctttttgtaatcctgtacaattgcatcacgggtggggataaaaagaggaatattctggtttatttcctagactgttatttaaaaaaaaaaaaaacattgtgttaggacagcatataaatgtaataagtatcacactgtatataaacatatcaatgtttgtcctgtataagaattactaaattacaaatgcaatttcatttaaacttctaggttaagtttgagcctgaaattttaatgaagtgcaatactgagtgtgcctcattatcttgcagctgtaaacatattggaatgtacatgtcaataaaaccactgtacatttttatacagtgataaagtcta

SEQ ID NO: 357464 - DNA, 7723 bp, Homo sapiens
tattgtttttcgcctcactccagcatgagaaagaaaagagaggctggccgcatcagtttttatttttatttttgtacttcaaaaagtgataagttcacgtaaactacatgccattattattcataatgataattgcattttctatacaatcgatatcatttccatttttattataaaacagcagactggtttctgtcataaaacaaatctggcttgtattagaacaaatacatcctcatttaaagaattttaaggtttctttcttgcattgagtatcttaagctttataacaacgtctggctcttaattttagtaaatggcatgacacactatatccatggagagcttctgacaaaaacttacttatcagacagaatttcttcggtgtgttgtttactcagatggcttcagtttctctttagtaaaataatatttccatgttggtgctagagtacagaaaaatgttgttactgtgcacgcatcttctgcagatgatatcctgttccctttctttgttgatatttttctttcttaaactttgttgctcagaatatctttaatgctagccaaggagtcagggatttggacgtattttcatggacttccaaagcttttttcccccaggaatctaaaactaatactgatgactttttcaaagacataaactcctgctgcccacaggaagcaacaatgcaagaacaagatatgccattcttgcgaggagggccaggcatgtacaaggtagtgaagacgggaccttcaggtcacaacatcagaagctgccctaaccttagaggtatcccaattggaatgttagttctgggaaacaaagtcaaagcagtgggagaggtaaccaattctgaagggacatgggtgcaactggatcagaacagcatggtagagttctgtgagagtgatgaaggagaggcatggtccttagctagagacagaggcggaaaccagtacctccgacatgaagatgaacaagctcttctggatcagaattctcaaactcctcctccaagccctttctcagtgcaagcttttaataaaggggcaagttgcagtgcccaaggatttgattatggactcggaaatagcaaaggtgatcgaggaaacatctcaacatcttctaaaccagcctctacatcaggaaaatcagagctgtcctctaaacacagcagatcgcttaaacctgatggacgtatgagccggactactgctgatcagaagaagccaaggggcacagaaagtttatctgctagtgaatccctcatcttaaaatctgatgctgcaaagttgaggtcagattcccacagtaggtcattatcccccaaccataacaccttgcagacattgaaatctgatgggaggatgccttctagctccagagctgaatccccaggaccaggttctcggttgtcatctcctaagccaaagactctcccagccaataggtctagcccatcgggtgctagttctccacgctcctcctcaccacatgataaaaatctacctcaaaaaagtactgctcctgttaagacaaagcttgatcctcctcgggaacgttctaaatcagactcttacacacttgatccagataccctccgcaagaagaaaatgcccctcacagaacctttgagaggacggtcaacgtcaccaaaaccaaaatcagtaccaaaggattctacagattcccctggatctgaaaatagagctccctctccccatgtggtacaggaaaacctccacagtgaggtggtcgaagtctgcacctcaagtactttaaaaacaaatagtctaacagacagcacctgcgatgacagcagtgaatttaagagtgtggatgaaggttcaaataaagttcattttagcattggaaaagcaccactgaaagatgaacaggaaatgagagcatctcccaaaataagtcgaaaatgtgctaatagacacaccaggcccaaaaaagaaaaatcgagttttcttttcaaaggagatggatccaagcctttagagccagccaagcaagccatgtctccttctgtggccgaatgtgccagagctgtgtttgcttccttcctctggcatgaaggcatagtacatgatgcaatggcttgttcttctttcctaaagtttcatcctgaactttccaaagaacatgctcctataaggagtagtttaaatagccaacaacctacagaggaaaaagaaaccaagttaaaaaatagacattcattagaaatatcatctgcactgaatatgtttaatattgcaccccatggaccagatatatctaagatgggtagcatcaacaaaaacaaggtattgtctatgcttaaggaaccacctctgcatgaaaaatgtgaggatgggaaaaccgagaccacttttgaaatgtccatgcataacacaatgaagtctaagtctcctcttcccttaactttacaacatttagtggctttttgggaagacatctctttggctactatcaaagctgcttcccagaatatgatttttccaagtcctggttcctgtgcagttcttaaaaagaaagagtgtgagaaagagaataagaagtccaaaaaggaaaaaaagaaaaaagaaaaggcagaagttaggcccaggggtaatttgtttggagagatggcccagctggcagtaggaggaccagagaaagataccatctgtgaactgtgtggggagtcacatccatacccggtgacctatcacatgagacaagctcacccaggttgtggccgatatgctggtggacaaggttacaatagcattgggcatttttgtggaggatgggctggtaactgtggtgatggtggcataggaggaagcacttggtatctggtatgtgatcgctgtagagaaaaatacctccgcgaaaaacaggctgctgcaagggagaaggtcaaacaatctaggagaaaaccaatgcaagtcaagacccctcgtgccttgcccaccatggaagctcaccaggtgattaaagccaatgcactcttcctgctgtccctgagcagtgcagcagaaccgagcattctgtgttaccatcctgcaaagccattccaatctcagttgcccagtgtaaaagaaggcatttctgaggatcttcctgtgaaaatgccttgtctctacctgcagacattagctaggcatcatcatgaaaattttgtgggctatcaagatgacaatctattccaggatgaaatgagatatctacgttcaacatctgtacctgccccgtatatatcagtaactcctgatgcaagtcctaatgtatttgaagagccagagagcaatatgaagtctatgccaccaagtttagaaaccagtcccataactgatactgatcttgcaaagagaactgtcttccaaagatcatactcagttgttgcttccgaatatgataaacaacactccattttacctgcacgagttaaagctattcctagaagaagagttaacagtggagacactgaagttggttcttcccttttgagacatccgtctcctgagctttctcggctaatctcagcccacagctctctttctaaaggagaacgaaatttccagtggccagttttagcttttgttatacaacatcatgatctagaaggtcttgaaatagcaatgaaacaggccctaaggaaatctgcttgtcgagtttttgctatggaggctttcaactggcttctgtgtaatgtcatccaaaccacttctctccatgatattctgtggcattttgtggcatcactgactcctgcaccagtggaaccagaggaagaagaggatgaagaaaataaaacaagcaaagaaaattcagaacaagagaaagatacaagagtatgtgaacatccactctcagacatagtgattgccggggaagctgctcatcctttaccacacacctttcaccgcttgctgcagaccatctcagaccttatgatgtctctccccagcggcagttcattacagcaaatggccctgaggtgctggagtctcaaattcaagcaatctgatcaccagttccttcatcagagcaacgtctttcatcacattaacaatattttgtcaaagtcagatgatggcgatagtgaagagagttttagcatcagtatacagtctggctttgaagctatgagtcaggaattatgcatagtaatgtgcttaaaggacttaaccagcattgttgacataaaaacttcaagccgacctgccatgattggcagtttgacagacggctccacagaaaccttttgggaatcaggagatgaagataaaaacaaaactaagaacatcaccatcaactgtgtaaaaggaatcaatgcccgctatgtgtctgttcacgtggacaattcccgagatcttgggaataaagttacctcaatgaccttcttaactggcaaagcagtagaagatttgtgcagaataaagcaggttgatctggattccaggcacattggctgggtaacaagtgaacttccaggaggggataatcacatcataaaaattgaattaaaaggcccagaaaatacactgagagttcgacaagtcaaagtcctgggctggaaagatggtgaaagcacaaaaatagctggccagatttcagccagtgtggcccagcagaggaactgtgaagctgagactctgcgagtattcagactgattacgtctcaagtatttggaaagctcatctctggagatgctgaacctacaccagaacaagaggaaaaagcactattgtcatcacctgaaggagaagaaaaagtatacaatgcaacatcagatgctgacctgaaagaacatatggttggaatcatattcagcaggagtaagctgactaacttacaaaaacaggtgtgtgctcatattgtccaagctattcgcatggaagctaccagagtccgtgaagaatgggaacatgctatatcaagcaaagaaaatgccaattctcagccaaatgatgaagatgcctcctctgatgcctactgctttgagctgctctctatggttttagcactgagtggctctaacgttggccggcaatatctggctcaacagctaaccctgcttcaggatctcttctcgctgcttcacacagcctctcctagagtccagagacaggtaacctctttactaagaagagttttgcctgaagtaacccctagtcgtctggccagcatcataggagtgaaatccctccccccagcagatatcagtgatatcattcactcaacagagaaaggagactggaataagctgggtatcttggacatgtttctaggatgcattgccaaagcactcactgtacagctaaaagccaaaggaaccaccatcactggaacagctggtaccactgtgggcaaaggagttacaacagttactcttccgatgattttcaattccagttatctccgacgaggtgaaagtcattggtggatgaagggctcaacccctacccagatctcagagatcatcattaaacttatcaaggatatggcagcaggtcatctgtcagaagcttggtcccgagtgacaaaaaatgctattgcagaaaccatcattgccttgaccaagatggaagaagaatttaggtctccagtgagatgtattgcaacaactagactctggcttgctctcgcatccctatgtgttcttgatcaggaccacgtagatcgtctctcctcggggagatggatgggaaaggatggacaacaaaaacaaatgcctatgtgtgataaccatgatgatggtgaaactgcagcaatcattttatgcaatgtctgtggaaatttatgtacagactgtgacagattccttcaccttcatcgaagaaccaaaactcatcaaagacaggtcttcaaagaagaagaagaagctataaaggttgaccttcatgaaggttgtggtagaaccaaattgttctggttgatggcactggcagattctaaaacaatgaaggcaatggtggaattccgagaacacacaggcaaacccaccacgagtagctcagaagcatgtcgcttctgtggttccaggagtggaacagagttatctgctgttggcagtgtttgttctgatgcagattgccaggaatacgctaagatagcctgtagtaagacgcatccttgtggccatccatgcgggggtgttaaaaacgaagagcactgtctgccctgtctacacggctgtgacaaaagtgccacaagcctgaagcaagacgccgatgacatgtgcatgatatgtttcaccgaagcgctctcggcagcaccagccattcagctggattgtagtcacatattccacttacagtgctgtcggcgagtattagaaaatcgatggcttggcccaaggataacatttggatttatatcttgtcccatttgcaagaacaaaattaatcacatagtactaaaagacctacttgatccaataaaagaactctatgaggatgtcagaagaaaagccttaatgagattggaatatgaaggtctgcataagagtgaagctatcacaactcctggtgtgaggttttataatgacccagctggctatgcaatgaatagatatgcatattatgtgtgctacaaatgcagaaaggcatattttggtggtgaagctcgctgcgatgctgaggctggacggggagatgattatgatcccagagagctcatttgtggtgcctgttctgatgtttccagggctcagatgtgtcccaaacatggcacagactttttggaatataaatgtcgctactgctgttcagtggctgtttttttctgttttggaacaacacatttttgtaatgcttgtcatgatgattttcaaagaatgactagcattcctaaggaagaactaccacactgtcctgcaggtcccaaaggcaagcagttagaaggaactgaatgtccactccatgttgttcatccacccactggggaagagtttgctctgggatgtggagtgtgcagaaatgcccacactttttagaacacgcagatcctttgtctacagagagaaaaattgccttcatcccccaagaggatgcggtgaagtttaaactctgctcaggataaggacgggaccatttttacatccatgaaaatgaaccattcacagtgcaagaaggataccaaataccatgtacataattcttgctatgaaaagtttccccattattttggtttatcttcttttgaacaaatgacatcaaacttgtgaggtgtttgcatgtggccattaccgtcattggcctgtgaagcattggacatttatagataattgatataaaagaatcgccatgcccatggactaagaacgatgctggctttcaagcaaaaaagaaaaataatcattgtttattgtatactgcctttttgtaatcctgtacaattgcatcacgggtggggataaaaagaggaatattctggtttatttcctagactgttatttaaaaaaaaaaaaaacattgtgttaggacagcatataaatgtaataagtatcacactgtatataaacatatcaatgtttgtcctgtataagaattactaaattacaaatgcaatttcatttaaacttctaggttaagtttgagcctgaaattttaatgaagtgcaatactgagtgtgcctcattatcttgcagctgtaaacatattggaatgtacatgtcaataaaaccactgtacatttttatacagtgataaagtcta

SEQ ID NO: 357465 - DNA, 15167 bp, Homo sapiens
tcttggagcgttctcagtttctcaacagatcttcacttgctaggcagccagaagccggcggcagtggcggcaccgcctcctcctcacattcccggggtggcggggttagatgagcggccccagtcgcggcgccgggggcgctgttcatgccggttcccgacggctccgtggctgctgcggggctggggctggggctacccgccgcggactccccgggtcactaccagctgctgctgtcaggccgggccctggccgaccgctaccggaggatttataccgctgcgctcaatgacagggaccaggggggcggcagcgctggacacccagcctccaggaataagaaaattttaaataagaagaaattgaaaagaaaacagaagagcaaatcaaaagtgaagacaagaagcaagtctgaaaacttagagaatacagtaatcataccagatatcaaactacatagcaatccttctgctttcaatatttactgtaatgtacgccattgcgttctggaatggcagaaaaaggaaatatcattggcagccgcatctaagaactctgtgcagagtggagaatcagatagtgatgaagaagaggaatccaaagagccccctatcaagcttccaaagattattgaggttggcctttgtgaagtttttgaattgatcaaagagacacgattttctcatccatccctgtgtctcaggagtctccaagccctgctcaacgtgctgcagggccagcagccagaagtgctccagtctgagccacctgaggtcctagagtctctcttccagcttcttttggaaatcaccgttcgaagtactgggatgaatgacagcacaggacagtccttaacagcactttcctgtgcttgcctctttagtctggtggcttcttggggagaaacaggaaggacacttcaggccatctctgctatcctcaccaacaatggaagccatgcttgccaaactattcagagacttaggaatgccattagagctcatagcaggagtataagaactacgttcatggaaagcctcccagaggatatgaggtgccaacaattctaaattcgctacagagaagtgtacaagcagttttggtgggaaaaattcaaattcaggactggtttagtaatggcattaagaaagcagctttaatgcacaagtggccattaaaagaaatatctgttgatgaagatgaccaatgtctacttcagaatgatggattttttctttatctattatgcaaggatggattatataaaataggctctggatacagtggaacagttaggggccatatatacaattctacatcccgtattagaaacagaaaagaaaaaaagtcttggttagggtatgctcagggttatttattatatagagatgtgaataaccacagcatgacagccataaggataagccctgaaacactggagcaagatggtactgtgatgttaccagattgccacactgaaggtcaaaatattttattcactgatggagaatatattaatcagatagctgcttcaagagatgatggctttgttgtcagaatatttgccacaagcactgaacctgttctacagcaagaattgcaacttaaactggctagaaaatgcttacatgcctgtggtatctcactattcgatctggaaaaggacttgcatattataagtacaggatttgatgaggagtcagcaattcttggtgcaggacgagagtttgcgctaatgaaaacagcaaatggaaagatatattacactggcaaataccagagtcttggaatcaaacaaggtggtccttcagcaggaaaatgggttgagctaccaattacaaaatctccaaagatagtacacttctcagttggacacgatggctctcacgcccttttagttgcagaagatgggagcatattctttacaggatctgctagtaaaggagaagatggagaatcaattaagagcagacggcaatccaaaccttataaacctaaaaagataattaagatggaaggaaagattgtggtatatacagcctgcaataatggaagtagttctgttatttctaaagatggagaactctacatgtttggaaaagatgccatttactctgatagttcaagtttggtaactgatttgaagggccattttgtaactcaggtagctatgggcaaagctcacacttgtgttttaatgaagaatggagaggtgtggacatttggtgtaaataataaaggacagtgtggacgagatactggtgccatgaaccaaggtgggaaagggtttggagttgaaaatatggcaacagcaatggatgaagacctggaagaagaactagatgaaaaagatgagaagtctatgatgtgccctccaggcatgcacaaatggaagctggagcagtgcatggtttgcactgtctgtggagactgtacaggttatggagccagctgtgtcagtagtggacggccagacagagtccccggagggatctgtggttgtggttccggagaatctggttgtgctgtgtgtggatgttgcaaggcctgtgcaagagagttagatggtcaagaggcaagacaaagaggaattcttgatgcagtgaaagaaatgatacctttagatcttcttttagctgtcccagtgcccggggttaacattgaagaacaccttcagttacgacaagaagaaaaacggcaacgtgtaatcagaaggcacagattagaggaaggaagaggcccccttgtatttgctggtcctatttttatgaaccatcgagaacaggctctagccagactcagatcccatccagcacacgtaaagcataaacgggacaagcacaaagatggaagtggagaaagaggcgaaaaggatgcaagcaaaatcacaacataccctccaggctctgtgcgatttgactgtgagctccgggcagtccaagtcagctgtggatttcaccattcagtggttttaatggaaaatggagatgtctatacatttggttatgggcagcatgggcagctaggacatggagatgtcaactccaggggatgtcccactcttgttcaagcattgccaggccctagcacacaagtcactgcaggcagcaaccatacggcagtacttttaatggatggacaggtcttcacatttggaagtttttctaaaggacaactgggcagaccaattttggatgtgccatattggaatgcaaagccagctcccatgcctaacattggatcaaaatatggaagaaaagctacttggataggtgcaagtggggaccaaacttttttacgaattgatgaagcacttattaattctcatgtacttgctacatcagaaatttttgccagtaaacacataataggcttggtacctgcttctatatcagaacctcctccatttaaatgccttctgataaataaagtggatgggagttgtaaaacttttaatgactcagaacaagaggatctgcaaggatttggtgtgtgtcttgatcctgtatatgatgtaatttggaggtttcgaccaaatactagagagctgtggtgttacaatgcggtggttgctgatgccaggcttccctctgcagcagacatgcagtccagatgtagtatcctaagtcctgaacttgccttaccaacaggatcaagggccctcactacccgatctcatgcagctttgcacattttaggttgtcttgataccttggcagctatgcaggacttaaaaatgggtgttgcaagtacagaggaagagactcaagcagtaatgaaggtttattctaaagaagattatagtgtggtaaacaggtttgaaagtcatggaggaggctggggttattctgcccattcagtagaagctatacgtttcagtgccgacactgatattttacttggtggtcttggtctgtttggaggtagaggagaatatactgctaaaattaagctgtttgaattgggtcctgatggaggagatcatgaaactgatggtgaccttcttgcagagactgatgtattggcttatgactgtgctgctagagaaaaatatgcaatgatgtttgatgagcctgttctcctgcaagctgggtggtggtatgtggcatgggcccgagtgtcaggacccagcagtgactgtggatctcatggacaggcatctattaccacagatgatggggttgttttccagttcaagagttcaaagaaatcaaataatggtacagatgttaatgcgggtcagatacctcagttattatacagacttccaaccagtgatggcagtgcttcaaaaggcaaacagcaaaccagtgaacctgtacacattttaaagaggtcttttgcaagaactgtctcagtggaatgttttgagtcattgttgagtattcttcactggagctggaccaccttagtcttaggagttgaagaacttagaggattaaaaggattccagttcacagctacactcctagatttagagagactgcgctttgtgggtacctgttgtctgaggttattgcgtgtctatacctgtgaaatttacccagtgtcagctacaggaaaagcagttgtagaagaaactagcaaattagcagagtgtattggaaaaaccagaactttgttaagaaaaattttatcagaaccacttgatcactgcatggtgaaattggataatgatcctcaaggatatctcagtcaacccttgagtcttctagaagctgtccttcaggaatgtcataatactttcactgcctgctttcattctttctacccaactcctgccttacagtgggcttgcctttgtgatctgctgaattgtttggatcaggatatccaagaagcaaacttcaagacatcaagtagccgactccttgcagctgttatgtcagctctgtgtcacacgtctgttaagctgacttccatcttcccgattgcgtatgatggagaagtattactacgatcaattgttaaacaagttagtacagagaacgactcaacactagttcatcgttttccccttttggtggcacatatggaaaaactcagccagagtgaagagaatatctcagggatgacaagcttccgtgaagttctggagaaaatgctggtcattgttgtgctaccagtcaggaacagcctgaggagagaaaatgaactcttctcctcccacctcgtctctaacacctgtggattactggccagcattgtcagtgaactgacagcgtcagccctgggatctgaggttgatggacttaattctcttcactctgtaaaagctagtgctaaccgatttacaaaaacaagtcagggcagaagttggaacactgggaacgggtcccctgatgcaatctgtttttcagtagacaaacctggaatagttgtggttggtttctctgtctatggaggaggtggaattcatgaatatgaattagaggtgttggttgatgatagtgaacatgcaggagattcaactcattcccacagatggacatctctggaattagtgaaaggaacgtacacaacggatgactcacccagtgatatagctgagatcagacttgacaaagtggttcctttaaaggaaaatgttaaatatgctgtgcgcttgaggaactatggaagccgtacagccaatggagatggaggaatgaccacagttcagtgccctgatggtgtgacattcacattcagcacgtgcagcttgagcagtaacggcacaaaccaaaccagaggacagatcccacagatactctactataggagtgaatttgatggagatttacaatcccaacttctgagtaaagccaatgaagaagataaaaactgtagcagagcattgtctgttgtaagcactgtcgttcgagcctctaaggacctcctgcacagagctcttgctgtggatgctgatgacattccagaactgctgagttcttccagtctgttttccatgctgctcccccttattatagcctacataggaccagtagctgctgctattcccaaggtggctgtagaagtctttggccttgtccaacaattgcttccgtcagttgccattttgaatcagaagtatgcaccgcctgccttcaaccctaatcagtcgacagatagcaccacaggaaaccagcctgaacagggcctctctgcttgtacaacctccagtcactatgctgtcatagagagtgagcacccgtataaacctgcctgtgtgatgcattacaaggtgacattcccagaatgtgtgaggtggatgacaatcgaatttgaccctcagtgtggtactgcacagtcagaagatgtccttcgtttgttgattcctgtcagaactgttcagaattcaggatatggaccaaaattgacatctgttcatgaaaatcttaattcatggatagaattaaagaaattttcaggatcctctgggtggcctactatggttttggtgttgccaggaaatgaggcccttttttcattggagactgcatcagattatgtgaaagatgacaaagcttctttctatggttttaagtgttttgcaattggatatgaatttagccctggacctgatgagggagtcatccaattggaaaaagaattagccaatcttggtggggtttgtgcagcagctctgatgaagaaggacctagcacttcctattggtaatgaattagaagaagaccttgaaattcttgaggaggctgcattgcaggtgtgcaaaacccattctggaattcttggaaagggtctagctctttctcattcaccaactatattagaagcacttgagggaaatttaccactccaaatccaaagcaatgaacagtcttttctggatgattttattgcctgtgtcccaggatcaagtggtggaaggcttgcaaggtggcttcagccagattcatatgcggatcctcagaaaacatctttgatcctgaataaggatgatattcgttgtggttggcctaccaccataactgttcaaacaaaagaccagtatggggatgtggtacatgttcccaatatgaaggtggaagtgaaagctgtccctgtttctcagaaaaaaatgtctttacaacaagatcaagcaaagaaacctcaaaggattcctggcagtcctgcagtaacagctgcatcttctaatactgacatgacttatggagggctggcatcaccaaagctagatgtttcatatgaaccaatgatagtgaaggaagctcgatatattgccataacaatgatgaaggtttatgaaaattattcatttgaagaactacgttttgcatcaccaactcctaagagacccagtgagaatatgctgatccgtgtcaataatgatgggacttattgtgcaaattggactccaggggctattggactctacactcttcatgttaccattgatggcattgaaatcgatgctggtctggaagtaaaagtaaaagacccaccaaaagggatgataccaccaggaactcagttggtcaaaccaaagtctgaacctcagcctaataaggttcgaaaatttgtggccaaggacagtgcggggcttcgcatccgtagccacccttcccttcagagtgagcagataggcatagtgaaagtcaatggaactatcacttttattgatgagatccataatgatgatggtgtgtggctgaggctgaatgatgagacaataaagaagtatgtccctaacatgaatggttacactgaagcctggtgcctctcttttaatcaacatcttggcaagagtcttctggtccctgttgacaatatctttaatgctagccaaggagtcagggatttggacgtattttcatggacttccaaagcttttttcccccaggaatctaaaactaatactgatgactttttcaaagacataaactcctgctgcccacaggaagcaacaatgcaagaacaagatatgccattcttgcgaggagggccaggcatgtacaaggtagtgaagacgggaccttcaggtcacaacatcagaagctgccctaaccttagaggtatcccaattggaatgttagttctgggaaacaaagtcaaagcagtgggagaggtaaccaattctgaagggacatgggtgcaactggatcagaacagcatggtagagttctgtgagagtgatgaaggagaggcatggtccttagctagagacagaggcggaaaccagtacctccgacatgaagatgaacaagctcttctggatcagaattctcaaactcctcctccaagccctttctcagtgcaagcttttaataaaggggcaagttgcagtgcccaaggatttgattatggactcggaaatagcaaaggtgatcgaggaaacatctcaacatcttctaaaccagcctctacatcaggaaaatcagagctgtcctctaaacacagcagatcgcttaaacctgatggacgtatgagccggactactgctgatcagaagaagccaaggggcacagaaagtttatctgctagtgaatccctcatcttaaaatctgatgctgcaaagttgaggtcagattcccacagtaggtcattatcccccaaccataacaccttgcagacattgaaatctgatgggaggatgccttctagctccagagctgaatccccaggaccaggttctcggttgtcatctcctaagccaaagactctcccagccaataggtctagcccatcgggtgctagttctccacgctcctcctcaccacatgataaaaatctacctcaaaaaagtactgctcctgttaagacaaagcttgatcctcctcgggaacgttctaaatcagactcttacacacttgatccagataccctccgcaagaagaaaatgcccctcacagaacctttgagaggacggtcaacgtcaccaaaaccaaaatcagtaccaaaggattctacagattcccctggatctgaaaatagagctccctctccccatgtggtacaggaaaacctccacagtgaggtggtcgaagtctgcacctcaagtactttaaaaacaaatagtctaacagacagcacctgcgatgacagcagtgaatttaagagtgtggatgaaggttcaaataaagttcattttagcattggaaaagcaccactgaaagatgaacaggaaatgagagcatctcccaaaataagtcgaaaatgtgctaatagacacaccaggcccaaaaaagaaaaatcgagttttcttttcaaaggagatggatccaagcctttagagccagccaagcaagccatgtctccttctgtggccgaatgtgccagagctgtgtttgcttccttcctctggcatgaaggcatagtacatgatgcaatggcttgttcttctttcctaaagtttcatcctgaactttccaaagaacatgctcctataaggagtagtttaaatagccaacaacctacagaggaaaaagaaaccaagttaaaaaatagacattcattagaaatatcatctgcactgaatatgtttaatattgcaccccatggaccagatatatctaagatgggtagcatcaacaaaaacaaggtattgtctatgcttaaggaaccacctctgcatgaaaaatgtgaggatgggaaaaccgagaccacttttgaaatgtccatgcataacacaatgaagtctaagtctcctcttcccttaactttacaacatttagtggctttttgggaagacatctctttggctactatcaaagctgcttcccagaatatgatttttccaagtcctggttcctgtgcagttcttaaaaagaaagagtgtgagaaagagaataagaagtccaaaaaggaaaaaaagaaaaaagaaaaggcagaagttaggcccaggggtaatttgtttggagagatggcccagctggcagtaggaggaccagagaaagataccatctgtgaactgtgtggggagtcacatccatacccggtgacctatcacatgagacaagctcacccaggttgtggccgatatgctggtggacaaggttacaatagcattgggcatttttgtggaggatgggctggtaactgtggtgatggtggcataggaggaagcacttggtatctggtatgtgatcgctgtagagaaaaatacctccgcgaaaaacaggctgctgcaagggagaaggtcaaacaatctaggagaaaaccaatgcaagtcaagacccctcgtgccttgcccaccatggaagctcaccaggtgattaaagccaatgcactcttcctgctgtccctgagcagtgcagcagaaccgagcattctgtgttaccatcctgcaaagccattccaatctcagttgcccagtgtaaaagaaggcatttctgaggatcttcctgtgaaaatgccttgtctctacctgcagacattagctaggcatcatcatgaaaattttgtgggctatcaagatgacaatctattccaggatgaaatgagatatctacgttcaacatctgtacctgccccgtatatatcagtaactcctgatgcaagtcctaatgtatttgaagagccagagagcaatatgaagtctatgccaccaagtttagaaaccagtcccataactgatactgatcttgcaaagagaactgtcttccaaagatcatactcagttgttgcttccgaatatgataaacaacactccattttacctgcacgagttaaagctattcctagaagaagagttaacagtggagacactgaagttggttcttcccttttgagacatccgtctcctgagctttctcggctaatctcagcccacagctctctttctaaaggagaacgaaatttccagtggccagttttagcttttgttatacaacatcatgatctagaaggtcttgaaatagcaatgaaacaggccctaaggaaatctgcttgtcgagtttttgctatggaggctttcaactggcttctgtgtaatgtcatccaaaccacttctctccatgatattctgtggcattttgtggcatcactgactcctgcaccagtggaaccagaggaagaagaggatgaagaaaataaaacaagcaaagaaaattcagaacaagagaaagatacaagagtatgtgaacatccactctcagacatagtgattgccggggaagctgctcatcctttaccacacacctttcaccgcttgctgcagaccatctcagaccttatgatgtctctccccagcggcagttcattacagcaaatggccctgaggtgctggagtctcaaattcaagcaatctgatcaccagttccttcatcagagcaacgtctttcatcacattaacaatattttgtcaaagtcagatgatggcgatagtgaagagagttttagcatcagtatacagtctggctttgaagctatgagtcaggaattatgcatagtaatgtgcttaaaggacttaaccagcattgttgacataaaaacttcaagccgacctgccatgattggcagtttgacagacggctccacagaaaccttttgggaatcaggagatgaagataaaaacaaaactaagaacatcaccatcaactgtgtaaaaggaatcaatgcccgctatgtgtctgttcacgtggacaattcccgagatcttgggaataaagttacctcaatgaccttcttaactggcaaagcagtagaagatttgtgcagaataaagcaggttgatctggattccaggcacattggctgggtaacaagtgaacttccaggaggggataatcacatcataaaaattgaattaaaaggcccagaaaatacactgagagttcgacaagtcaaagtcctgggctggaaagatggtgaaagcacaaaaatagctggccagatttcagccagtgtggcccagcagaggaactgtgaagctgagactctgcgagtattcagactgattacgtctcaagtatttggaaagctcatctctggagatgctgaacctacaccagaacaagaggaaaaagcactattgtcatcacctgaaggagaagaaaaagtatacaatgcaacatcagatgctgacctgaaagaacatatggttggaatcatattcagcaggagtaagctgactaacttacaaaaacaggtgtgtgctcatattgtccaagctattcgcatggaagctaccagagtccgtgaagaatgggaacatgctatatcaagcaaagaaaatgccaattctcagccaaatgatgaagatgcctcctctgatgcctactgctttgagctgctctctatggttttagcactgagtggctctaacgttggccggcaatatctggctcaacagctaaccctgcttcaggatctcttctcgctgcttcacacagcctctcctagagtccagagacaggtaacctctttactaagaagagttttgcctgaagtaacccctagtcgtctggccagcatcataggagtgaaatccctccccccagcagatatcagtgatatcattcactcaacagagaaaggagactggaataagctgggtatcttggacatgtttctaggatgcattgccaaagcactcactgtacagctaaaagccaaaggaaccaccatcactggaacagctggtaccactgtgggcaaaggagttacaacagttactcttccgatgattttcaattccagttatctccgacgaggtgaaagtcattggtggatgaagggctcaacccctacccagatctcagagatcatcattaaacttatcaaggatatggcagcaggtcatctgtcagaagcttggtcccgagtgacaaaaaatgctattgcagaaaccatcattgccttgaccaagatggaagaagaatttaggtctccagtgagatgtattgcaacaactagactctggcttgctctcgcatccctatgtgttcttgatcaggaccacgtagatcgtctctcctcggggagatggatgggaaaggatggacaacaaaaacaaatgcctatgtgtgataaccatgatgatggtgaaactgcagcaatcattttatgcaatgtctgtggaaatttatgtacagactgtgacagattccttcaccttcatcgaagaaccaaaactcatcaaagacaggtcttcaaagaagaagaagaagctataaaggttgaccttcatgaaggttgtggtagaaccaaattgttctggttgatggcactggcagattctaaaacaatgaaggcaatggtggaattccgagaacacacaggcaaacccaccacgagtagctcagaagcatgtcgcttctgtggttccaggagtggaacagagttatctgctgttggcagtgtttgttctgatgcagattgccaggaatacgctaagatagcctgtagtaagacgcatccttgtggccatccatgcgggggtgttaaaaacgaagagcactgtctgccctgtctacacggctgtgacaaaagtgccacaagcctgaagcaagacgccgatgacatgtgcatgatatgtttcaccgaagcgctctcggcagcaccagccattcagctggattgtagtcacatattccacttacagtgctgtcggcgagtattagaaaatcgatggcttggcccaaggataacatttggatttatatcttgtcccatttgcaagaacaaaattaatcacatagtactaaaagacctacttgatccaataaaagaactctatgaggatgtcagaagaaaagccttaatgagattggaatatgaaggtctgcataagagtgaagctatcacaactcctggtgtgaggttttataatgacccagctggctatgcaatgaatagatatgcatattatgtgtgctacaaatgcagaaaggcatattttggtggtgaagctcgctgcgatgctgaggctggacggggagatgattatgatcccagagagctcatttgtggtgcctgttctgatgtttccagggctcagatgtgtcccaaacatggcacagactttttggaatataaatgtcgctactgctgttcagtggctgtttttttctgttttggaacaacacatttttgtaatgcttgtcatgatgattttcaaagaatgactagcattcctaaggaagaactaccacactgtcctgcaggtcccaaaggcaagcagttagaaggaactgaatgtccactccatgttgttcatccacccactggggaagagtttgctctgggatgtggagtgtgcagaaatgcccacactttttagaacacgcagatcctttgtctacagagagaaaaattgccttcatcccccaagaggatgcggtgaagtttaaactctgctcaggataaggacgggaccatttttacatccatgaaaatgaaccattcacagtgcaagaaggataccaaataccatgtacataattcttgctatgaaaagtttccccattattttggtttatcttcttttgaacaaatgacatcaaacttgtgaggtgtttgcatgtggccattaccgtcattggcctgtgaagcattggacatttatagataattgatataaaagaatcgccatgcccatggactaagaacgatgctggctttcaagcaaaaaagaaaaataatcattgtttattgtatactgcctttttgtaatcctgtacaattgcatcacgggtggggataaaaagaggaatattctggtttatttcctagactgttatttaaaaaaaaaaaaaacattgtgttaggacagcatataaatgtaataagtatcacactgtatataaacatatcaatgtttgtcctgtataagaattactaaattacaaatgcaatttcatttaaacttctaggttaagtttgagcctgaaattttaatgaagtgcaatactgagtgtgcctcattatcttgcagctgtaaacatattggaatgtacatgtcaataaaaccactgtacatttttatacagtgataaagtctaaaaaaacaaaaacaaaaaacaaagaaaaacaacacaacaacaaacaccaaaaacgccaacaaacacaagaggggcggaccccccccacaaaccgacccacccgcgacggcgccacacgactcacgacagcgcccccggtctcacgacgtcaacacgagcgggcccccccacagacggggacggccaatctcagcaacccccggccacggcccgcggaaacacacc

SEQ ID NO: 357466 - DNA, 14006 bp, Homo sapiens
tcttggagcgttctcagtttctcaacagatcttcacttgctaggcagccagaagccggcggcagtggcggcaccgcctcctcctcacattcccggggtggcggggttagatgagcggccccagtcgcggcgccgggggcgctgttcatgccggttcccgacggctccgtggctgctgcggggctggggctggggctacccgccgcggactccccgggtcactaccagctgctgctgtcaggccgggccctggccgaccgctaccggaggatttataccgctgcgctcaatgacagggaccaggggggcggcagcgctggacacccagcctccaggaataagaaaattttaaataagaagaaattgaaaagaaaacagaagagcaaatcaaaagtgaagacaagaagcaagtctgaaaacttagagaatacagtaatcataccagatatcaaactacatagcaatccttctgctttcaatatttactgtaatgtacgccattgcgttctggaatggcagaaaaaggaaatatcattggcagccgcatctaagaactctgtgcagagtggagaatcagatagtgatgaagaagaggaatccaaagagccccctatcaagcttccaaagattattgaggttggcctttgtgaagtttttgaattgatcaaagagacacgattttctcatccatccctgtgtctcaggagtctccaagccctgctcaacgtgctgcagggccagcagccagaagtgctccagtctgagccacctgaggtcctagagtctctcttccagcttcttttggaaatcaccgttcgaagtactgggatgaatgacagcacaggacagtccttaacagcactttcctgtgcttgcctctttagtctggtggcttcttggggagaaacaggaaggacacttcaggccatctctgctatcctcaccaacaatggaagccatgcttgccaaactattcagagacttaggaatgccattagagctcatagcaggagtataagaactacgttcatggaaagcctcccagaggatatgaggtgccaacaattctaaattcgctacagagaagtgtacaagcagttttggtgggaaaaattcaaattcaggactggtttagtaatggcattaagaaagcagctttaatgcacaagtggccattaaaagaaatatctgttgatgaagatgaccaatgtctacttcagaatgatggattttttctttatctattatgcaaggatggattatataaaataggctctggatacagtggaacagttaggggccatatatacaattctacatcccgtattagaaacagaaaagaaaaaaagtcttggttagggtatgctcagggttatttattatatagagatgtgaataaccacagcatgacagccataaggataagccctgaaacactggagcaagatggtactgtgatgttaccagattgccacactgaaggtcaaaatattttattcactgatggagaatatattaatcagatagctgcttcaagagatgatggctttgttgtcagaatatttgccacaagcactgaacctgttctacagcaagaattgcaacttaaactggctagaaaatgcttacatgcctgtggtatctcactattcgatctggaaaaggacttgcatattataagtacaggatttgatgaggagtcagcaattcttggtgcaggacgagagtttgcgctaatgaaaacagcaaatggaaagatatattacactggcaaataccagagtcttggaatcaaacaaggtggtccttcagcaggaaaatgggttgagctaccaattacaaaatctccaaagatagtacacttctcagttggacacgatggctctcacgcccttttagttgcagaagatgggagcatattctttacaggatctgctagtaaaggagaagatggagaatcaattaagagcagacggcaatccaaaccttataaacctaaaaagataattaagatggaaggaaagattgtggtatatacagcctgcaataatggaagtagttctgttatttctaaagatggagaactctacatgtttggaaaagatgccatttactctgatagttcaagtttggtaactgatttgaagggccattttgtaactcaggtagctatgggcaaagctcacacttgtgttttaatgaagaatggagaggtgtggacatttggtgtaaataataaaggacagtgtggacgagatactggtgccatgaaccaaggtgggaaagggtttggagttgaaaatatggcaacagcaatggatgaagacctggaagaagaactagatgaaaaagatgagaagtctatgatgtgccctccaggcatgcacaaatggaagctggagcagtgcatggtttgcactgtctgtggagactgtacaggttatggagccagctgtgtcagtagtggacggccagacagagtccccggagggatctgtggttgtggttccggagaatctggttgtgctgtgtgtggatgttgcaaggcctgtgcaagagagttagatggtcaagaggcaagacaaagaggaattcttgatgcagtgaaagaaatgatacctttagatcttcttttagctgtcccagtgcccggggttaacattgaagaacaccttcagttacgacaagaagaaaaacggcaacgtgtaatcagaaggcacagattagaggaaggaagaggcccccttgtatttgctggtcctatttttatgaaccatcgagaacaggctctagccagactcagatcccatccagcacacgtaaagcataaacgggacaagcacaaagatggaagtggagaaagaggcgaaaaggatgcaagcaaaatcacaacataccctccaggctctgtgcgatttgactgtgagctccgggcagtccaagtcagctgtggatttcaccattcagtggttttaatggaaaatggagatgtctatacatttggttatgggcagcatgggcagctaggacatggagatgtcaactccaggggatgtcccactcttgttcaagcattgccaggccctagcacacaagtcactgcaggcagcaaccatacggcagtacttttaatggatggacaggtcttcacatttggaagtttttctaaaggacaactgggcagaccaattttggatgtgccatattggaatgcaaagccagctcccatgcctaacattggatcaaaatatggaagaaaagctacttggataggtgcaagtggggaccaaacttttttacgaattgatgaagcacttattaattctcatgtacttgctacatcagaaatttttgccagtaaacacataataggcttggtacctgcttctatatcagaacctcctccatttaaatgccttctgataaataaagtggatgggagttgtaaaacttttaatgactcagaacaagaggatctgcaaggatttggtgtgtgtcttgatcctgtatatgatgtaatttggaggtttcgaccaaatactagagagctgtggtgttacaatgcggtggttgctgatgccaggcttccctctgcagcagacatgcagtccagatgtagtatcctaagtcctgaacttgccttaccaacaggatcaagggccctcactacccgatctcatgcagctttgcacattttaggttgtcttgataccttggcagctatgcaggacttaaaaatgggtgttgcaagtacagaggaagagactcaagcagtaatgaaggtttattctaaagaagattatagtgtggtaaacaggtttgaaagtcatggaggaggctggggttattctgcccattcagtagaagctatacgtttcagtgccgacactgatattttacttggtggtcttggtctgtttggaggtagaggagaatatactgctaaaattaagctgtttgaattgggtcctgatggaggagatcatgaaactgatggtgaccttcttgcagagactgatgtattggcttatgactgtgctgctagagaaaaatatgcaatgatgtttgatgagcctgttctcctgcaagctgggtggtggtatgtggcatgggcccgagtgtcaggacccagcagtgactgtggatctcatggacaggcatctattaccacagatgatggggttgttttccagttcaagagttcaaagaaatcaaataatggtacagatgttaatgcgggtcagatacctcagttattatacagacttccaaccagtgatggcagtgcttcaaaaggcaaacagcaaaccagtgaacctgtacacattttaaagaggtcttttgcaagaactgtctcagtggaatgttttgagtcattgttgagtattcttcactggagctggaccaccttagtcttaggagttgaagaacttagaggattaaaaggattccagttcacagctacactcctagatttagagagactgcgctttgtgggtacctgttgtctgaggttattgcgtgtctatacctgtgaaatttacccagtgtcagctacaggaaaagcagttgtagaagaaactagcaaattagcagagtgtattggaaaaaccagaactttgttaagaaaaattttatcagaaccacttgatcactgcatggtgaaattggataatgatcctcaaggatatctcagtcaacccttgagtcttctagaagctgtccttcaggaatgtcataatactttcactgcctgctttcattctttctacccaactcctgccttacagtgggcttgcctttgtgatctgctgaattgtttggatcaggatatccaagaagcaaacttcaagacatcaagtagccgactccttgcagctgttatgtcagctctgtgtcacacgtctgttaagctgacttccatcttcccgattgcgtatgatggagaagtattactacgatcaattgttaaacaagttagtacagagaacgactcaacactagttcatcgttttccccttttggtggcacatatggaaaaactcagccagagtgaagagaatatctcagggatgacaagcttccgtgaagttctggagaaaatgctggtcattgttgtgctaccagtcaggaacagcctgaggagagaaaatgaactcttctcctcccacctcgtctctaacacctgtggattactggccagcattgtcagtgaactgacagcgtcagccctgggatctgaggttgatggacttaattctcttcactctgtaaaagctagtgctaaccgatttacaaaaacaagtcagggcagaagttggaacactgggaacgggtcccctgatgcaatctgtttttcagtagacaaacctggaatagttgtggttggtttctctgtctatggaggaggtggaattcatgaatatgaattagaggtgttggttgatgatagtgaacatgcaggagattcaactcattcccacagatggacatctctggaattagtgaaaggaacgtacacaacggatgactcacccagtgatatagctgagatcagacttgacaaagtggttcctttaaaggaaaatgttaaatatgctgtgcgcttgaggaactatggaagccgtacagccaatggagatggaggaatgaccacagttcagtgccctgatggtgtgacattcacattcagcacgtgcagcttgagcagtaacggcacaaaccaaaccagaggacagatcccacagatactctactataggagtgaatttgatggagatttacaatcccaacttctgagtaaagccaatgaagaagataaaaactgtagcagagcattgtctgttgtaagcactgtcgttcgagcctctaaggacctcctgcacagagctcttgctgtggatgctgatgacattccagaactgctgagttcttccagtctgttttccatgctgctcccccttattatagcctacataggaccagtagctgctgctattcccaaggtggctgtagaagtctttggccttgtccaacaattgcttccgtcagttgccattttgaatcagaagtatgcaccgcctgccttcaaccctaatcagtcgacagatagcaccacaggaaaccagcctgaacagggcctctctgcttgtacaacctccagtcactatgctgtcatagagagtgagcacccgtataaacctgcctgtgtgatgcattacaaggtgacattcccagaatgtgtgaggtggatgacaatcgaatttgaccctcagtgtggtactgcacagtcagaagatgtccttcgtttgttgattcctgtcagaactgttcagaattcaggatatggaccaaaattgacatctgttcatgaaaatcttaattcatggatagaattaaagaaattttcaggatcctctgggtggcctactatggttttggtgttgccaggaaatgaggcccttttttcattggagactgcatcagattatgtgaaagatgacaaagcttctttctatggttttaagtgttttgcaattggatatgaatttagccctggacctgatgagggagtcatccaattggaaaaagaattagccaatcttggtggggtttgtgcagcagctctgatgaagaaggacctagcacttcctattggtaatgaattagaagaagaccttgaaattcttgaggaggctgcattgcaggtgtgcaaaacccattctggaattcttggaaagggtctagctctttctcattcaccaactatattagaagcacttgagggaaatttaccactccaaatccaaagcaatgaacagtcttttctggatgattttattgcctgtgtcccaggatcaagtggtggaaggcttgcaaggtggcttcagccagattcatatgcggatcctcagaaaacatctttgatcctgaataaggatgatattcgttgtggttggcctaccaccataactgttcaaacaaaagaccagtatggggatgtggtacatgttcccaatatgaaggtggaagtgaaagctgtccctgtttctcagaaaaaaatgtctttacaacaagatcaagcaaagaaacctcaaaggattcctggcagtcctgcagtaacagctgcatcttctaatactgacatgacttatggagggctggcatcaccaaagctagatgtttcatatgaaccaatgatagtgaaggaagctcgatatattgccataacaatgatgaaggtttatgaaaattattcatttgaagaactacgttttgcatcaccaactcctaagagacccagtgagaatatgctgatccgtgtcaataatgatgggacttattgtgcaaattggactccaggggctattggactctacactcttcatgttaccattgatggcattgaaatcgatgctggtctggaagtaaaagtaaaagacccaccaaaagggatgataccaccaggaactcagttggtcaaaccaaagtctgaacctcagcctaataaggttcgaaaatttgtggccaaggacagtgcggggcttcgcatccgtagccacccttcccttcagagtgagcagataggcatagtgaaagtcaatggaactatcacttttattgatgagatccataatgatgatggtgtgtggctgaggctgaatgatgagacaataaagaagtatgtccctaacatgaatggttacactgaagcctggtgcctctcttttaatcaacatcttggcaagagtcttctggtccctgttgacaatatctttaatgctagccaaggagtcagggatttggacgtattttcatggacttccaaagcttttttcccccaggaatctaaaactaatactgatgactttttcaaagacataaactcctgctgcccacaggaagcaacaatgcaagaacaagatatgccattcttgcgaggagggccaggcatgtacaaggtagtgaagacgggaccttcaggtcacaacatcagaagctgccctaaccttagaggtatcccaattggaatgttagttctgggaaacaaagtcaaagcagtgggagaggtaaccaattctgaagggacatgggtgcaactggatcagaacagcatggtagagttctgtgagagtgatgaaggagaggcatggtccttagctagagacagaggcggaaaccagtacctccgacatgaagatgaacaagctcttctggatcagaattctcaaactcctcctccaagccctttctcagtgcaagcttttaataaaggggcaagttgcagtgcccaaggatttgattatggactcggaaatagcaaaggtgatcgaggaaacatctcaacatcttctaaaccagcctctacatcaggaaaatcagagctgtcctctaaacacagcagatcgcttaaacctgatggacgtatgagccggactactgctgatcagaagaagccaaggggcacagaaagtttatctgctagtgaatccctcatcttaaaatctgatgctgcaaagttgaggtcagattcccacagtaggtcattatcccccaaccataacaccttgcagacattgaaatctgatgggaggatgccttctagctccagagctgaatccccaggaccaggttctcggttgtcatctcctaagccaaagactctcccagccaataggtctagcccatcgggtgctagttctccacgctcctcctcaccacatgataaaaatctacctcaaaaaagtactgctcctgttaagacaaagcttgatcctcctcgggaacgttctaaatcagactcttacacacttgatccagataccctccgcaagaagaaaatgcccctcacagaacctttgagaggacggtcaacgtcaccaaaaccaaaatcagtaccaaaggattctacagattcccctggatctgaaaatagagctccctctccccatgtggtacaggaaaacctccacagtgaggtggtcgaagtctgcacctcaagtactttaaaaacaaatagtctaacagacagcacctgcgatgacagcagtgaatttaagagtgtggatgaaggttcaaataaagttcattttagcattggaaaagcaccactgaaagatgaacaggaaatgagagcatctcccaaaataagtcgaaaatgtgctaatagacacaccaggcccaaaaaagaaaaatcgagttttcttttcaaaggagatggatccaagcctttagagccagccaagcaagccatgtctccttctgtggccgaatgtgccagagctgtgtttgcttccttcctctggcatgaaggcatagtacatgatgcaatggcttgttcttctttcctaaagtttcatcctgaactttccaaagaacatgctcctataaggagtagtttaaatagccaacaacctacagaggaaaaagaaaccaagttaaaaaatagacattcattagaaatatcatctgcactgaatatgtttaatattgcaccccatggaccagatatatctaagatgggtagcatcaacaaaaacaaggtattgtctatgcttaaggaaccacctctgcatgaaaaatgtgaggatgggaaaaccgagaccacttttgaaatgtccatgcataacacaatgaagtctaagtctcctcttcccttaactttacaacatttagtggctttttgggaagacatctctttggctactatcaaagctgcttcccagaatatgatttttccaagtcctggttcctgtgcagttcttaaaaagaaagagtgtgagaaagagaataagaagtccaaaaaggaaaaaaagaaaaaagaaaaggcagaagttaggcccaggggtaatttgtttggagagatggcccagctggcagtaggaggaccagagaaagataccatctgtgaactgtgtggggagtcacatccatacccggtgacctatcacatgagacaagctcacccaggttgtggccgatatgctggtggacaaggttacaatagcattgggcatttttgtggaggatgggctggtaactgtggtgatggtggcataggaggaagcacttggtatctggtatgtgatcgctgtagagaaaaatacctccgcgaaaaacaggctgctgcaagggagaaggtcaaacaatctaggagaaaaccaatgcaagtcaagacccctcgtgccttgcccaccatggaagctcaccaggtgattaaagccaatgcactcttcctgctgtccctgagcagtgcagcagaaccgagcattctgtgttaccatcctgcaaagccattccaatctcagttgcccagtgtaaaagaaggcatttctgaggatcttcctgtgaaaatgccttgtctctacctgcagacattagctaggcatcatcatgaaaattttgtgggctatcaagatgacaatctattccaggatgaaatgagatatctacgttcaacatctgtacctgccccgtatatatcagtaactcctgatgcaagtcctaatgtatttgaagagccagagagcaatatgaagtctatgccaccaagtttagaaaccagtcccataactgatactgatcttgcaaagagaactgtcttccaaagatcatactcagttgttgcttccgaatatgataaacaacactccattttacctgcacgagttaaagctattcctagaagaagagttaacagtggagacactgaagttggttcttcccttttgagacatccgtctcctgagctttctcggctaatctcagcccacagctctctttctaaaggagaacgaaatttccagtggccagttttagcttttgttatacaacatcatgatctagaaggtcttgaaatagcaatgaaacaggccctaaggaaatctgcttgtcgagtttttgctatggaggctttcaactggcttctgtgtaatgtcatccaaaccacttctctccatgatattctgtggcattttgtggcatcactgactcctgcaccagtggaaccagaggaagaagaggatgaagaaaataaaacaagcaaagaaaattcagaacaagagaaagatacaagagtatgtgaacatccactctcagacatagtgattgccggggaagctgctcatcctttaccacacacctttcaccgcttgctgcagaccatctcagaccttatgatgtctctccccagcggcagttcattacagcaaatggccctgaggtgctggagtctcaaattcaagcaatctgatcaccagttccttcatcagagcaacgtctttcatcacattaacaatattttgtcaaagtcagatgatggcgatagtgaagagagttttagcatcagtatacagtctggctttgaagctatgagtcaggaattatgcatagtaatgtgcttaaaggacttaaccagcattgttgacataaaaacttcaagccgacctgccatgattggcagtttgacagacggctccacagaaaccttttgggaatcaggagatgaagataaaaacaaaactaagaacatcaccatcaactgtgtaaaaggaatcaatgcccgctatgtgtctgttcacgtggacaattcccgagatcttgggaataaagttacctcaatgaccttcttaactggcaaagcagtagaagatttgtgcagaataaagcaggttgatctggattccaggcacattggctgggtaacaagtgaacttccaggaggggataatcacatcataaaaattgaattaaaaggcccagaaaatacactgagagttcgacaagtcaaagtcctgggctggaaagatggtgaaagcacaaaaatagctggccagatttcagccagtgtggcccagcagaggaactgtgaagctgagactctgcgagtattcagactgattacgtctcaagtatttggaaagctcatctctggagatgctgaacctacaccagaacaagaggaaaaagcactattgtcatcacctgaaggagaagaaaaagtatacaatgcaacatcagatgctgacctgaaagaacatatggttggaatcatattcagcaggagtaagctgactaacttacaaaaacaggtgtgtgctcatattgtccaagctattcgcatggaagctaccagagtccgtgaagaatgggaacatgctatatcaagcaaagaaaatgccaattctcagccaaatgatgaagatgcctcctctgatgcctactgctttgagctgctctctatggttttagcactgagtggctctaacgttggccggcaatatctggctcaacagctaaccctgcttcaggatctcttctcgctgcttcacacagcctctcctagagtccagagacaggtaacctctttactaagaagagttttgcctgaagtaacccctagtcgtctggccagcatcataggagtgaaatccctccccccagcagatatcagtgatatcattcactcaacagagaaaggagactggaataagctgggtatcttggacatgtttctaggatgcattgccaaagcactcactgtacagctaaaagccaaaggaaccaccatcactggaacagctggtaccactgtgggcaaaggagttacaacagttactcttccgatgattttcaattccagttatctccgacgaggtgaaagtcattggtggatgaagggctcaacccctacccagatctcagagatcatcattaaacttatcaaggatatggcagcaggtcatctgtcagaagcttggtcccgagtgacaaaaaatgctattgcagaaaccatcattgccttgaccaagatggaagaagaatttaggtctccagtgagatgtattgcaacaactagactctggcttgctctcgcatccctatgtgttcttgatcaggaccacgtagatcgtctctcctcggggagatggatgggaaaggatggacaacaaaaacaaatgcctatgtgtgataaccatgatgatggtgaaactgcagcaatcattttatgcaatgtctgtggaaatttatgtacagactgtgacagattccttcaccttcatcgaagaaccaaaactcatcaaagacaggtcttcaaagaagaagaagaagctataaaggttgaccttcatgaaggttgtggtagaaccaaattgttctggttgatggcactggcagattctaaaacaatgaaggcaatggtggaattccgagaacacacaggcaaacccaccacgagtagctcagaagcatgtcgcttctgtggttccaggagtggaacagagttatctgctgttggcagtgtttgttctgatgcagattgccaggaatacgctaagatagcctgtagtaagacgcatccttgtggccatccatgcgggggtgttaaaaacgaagagcactgtctgccctgtctacacggctgtgacaaaagtgccacaagcctgaagcaagacgccgatgacatgtgcatgatatgtttcaccgaagcgctctcggcagcaccagccattcagctggattgtagtcacatattccacttacagtgctgtcggcgagtattagaaaatcgatggcttggcccaaggataacatttggatttatatcttgtcccatttgcaagaacaaaattaatcacatagtactaaaagacctacttgatccaataaaagaactctatgaggatgtcagaagaaaagccttaatgagattggaatatgaaggtctgcataagagtgaagctatcacaactcctggtgtgaggttttataatgacccagctggctatgcaatgaatagatatgcatattatgtgtgctacaaatgcagaaaggcatattttggtggtgaagctcgctgcgatgctgaggctggacggggagatgattatgatcccagagagctcatttgtggtgcctgttccgagtcttctacggggtcaacgacgtcccgtaccgagccagcactcccttcacgatcgacatctagcggactcctccttcccggac

SEQ ID NO: 357467 - DNA, 13624 bp, Homo sapiens
tcttggagcgttctcagtttctcaacagatcttcacttgctaggcagccagaagccggcggcagtggcggcaccgcctcctcctcacattcccggggtggcggggttagatgagcggccccagtcgcggcgccgggggcgctgttcatgccggttcccgacggctccgtggctgctgcggggctggggctggggctacccgccgcggactccccgggtcactaccagctgctgctgtcaggccgggccctggccgaccgctaccggaggatttataccgctgcgctcaatgacagggaccaggggggcggcagcgctggacacccagcctccaggaataagaaaattttaaataagaagaaattgaaaagaaaacagaagagcaaatcaaaagtgaagacaagaagcaagtctgaaaacttagagaatacagtaatcataccagatatcaaactacatagcaatccttctgctttcaatatttactgtaatgtacgccattgcgttctggaatggcagaaaaaggaaatatcattggcagccgcatctaagaactctgtgcagagtggagaatcagatagtgatgaagaagaggaatccaaagagccccctatcaagcttccaaagattattgaggttggcctttgtgaagtttttgaattgatcaaagagacacgattttctcatccatccctgtgtctcaggagtctccaagccctgctcaacgtgctgcagggccagcagccagaagtgctccagtctgagccacctgaggtcctagagtctctcttccagcttcttttggaaatcaccgttcgaagtactgggatgaatgacagcacaggacagtccttaacagcactttcctgtgcttgcctctttagtctggtggcttcttggggagaaacaggaaggacacttcaggccatctctgctatcctcaccaacaatggaagccatgcttgccaaactattcagagacttaggaatgccattagagctcatagcaggagtataagaactacgttcatggaaagcctcccagaggatatgaggtgccaacaattctaaattcgctacagagaagtgtacaagcagttttggtgggaaaaattcaaattcaggactggtttagtaatggcattaagaaagcagctttaatgcacaagtggccattaaaagaaatatctgttgatgaagatgaccaatgtctacttcagaatgatggattttttctttatctattatgcaaggatggattatataaaataggctctggatacagtggaacagttaggggccatatatacaattctacatcccgtattagaaacagaaaagaaaaaaagtcttggttagggtatgctcagggttatttattatatagagatgtgaataaccacagcatgacagccataaggataagccctgaaacactggagcaagatggtactgtgatgttaccagattgccacactgaaggtcaaaatattttattcactgatggagaatatattaatcagatagctgcttcaagagatgatggctttgttgtcagaatatttgccacaagcactgaacctgttctacagcaagaattgcaacttaaactggctagaaaatgcttacatgcctgtggtatctcactattcgatctggaaaaggacttgcatattataagtacaggatttgatgaggagtcagcaattcttggtgcaggacgagagtttgcgctaatgaaaacagcaaatggaaagatatattacactggcaaataccagagtcttggaatcaaacaaggtggtccttcagcaggaaaatgggttgagctaccaattacaaaatctccaaagatagtacacttctcagttggacacgatggctctcacgcccttttagttgcagaagatgggagcatattctttacaggatctgctagtaaaggagaagatggagaatcaattaagagcagacggcaatccaaaccttataaacctaaaaagataattaagatggaaggaaagattgtggtatatacagcctgcaataatggaagtagttctgttatttctaaagatggagaactctacatgtttggaaaagatgccatttactctgatagttcaagtttggtaactgatttgaagggccattttgtaactcaggtagctatgggcaaagctcacacttgtgttttaatgaagaatggagaggtgtggacatttggtgtaaataataaaggacagtgtggacgagatactggtgccatgaaccaaggtgggaaagggtttggagttgaaaatatggcaacagcaatggatgaagacctggaagaagaactagatgaaaaagatgagaagtctatgatgtgccctccaggcatgcacaaatggaagctggagcagtgcatggtttgcactgtctgtggagactgtacaggttatggagccagctgtgtcagtagtggacggccagacagagtccccggagggatctgtggttgtggttccggagaatctggttgtgctgtgtgtggatgttgcaaggcctgtgcaagagagttagatggtcaagaggcaagacaaagaggaattcttgatgcagtgaaagaaatgatacctttagatcttcttttagctgtcccagtgcccggggttaacattgaagaacaccttcagttacgacaagaagaaaaacggcaacgtgtaatcagaaggcacagattagaggaaggaagaggcccccttgtatttgctggtcctatttttatgaaccatcgagaacaggctctagccagactcagatcccatccagcacacgtaaagcataaacgggacaagcacaaagatggaagtggagaaagaggcgaaaaggatgcaagcaaaatcacaacataccctccaggctctgtgcgatttgactgtgagctccgggcagtccaagtcagctgtggatttcaccattcagtggttttaatggaaaatggagatgtctatacatttggttatgggcagcatgggcagctaggacatggagatgtcaactccaggggatgtcccactcttgttcaagcattgccaggccctagcacacaagtcactgcaggcagcaaccatacggcagtacttttaatggatggacaggtcttcacatttggaagtttttctaaaggacaactgggcagaccaattttggatgtgccatattggaatgcaaagccagctcccatgcctaacattggatcaaaatatggaagaaaagctacttggataggtgcaagtggggaccaaacttttttacgaattgatgaagcacttattaattctcatgtacttgctacatcagaaatttttgccagtaaacacataataggcttggtacctgcttctatatcagaacctcctccatttaaatgccttctgataaataaagtggatgggagttgtaaaacttttaatgactcagaacaagaggatctgcaaggatttggtgtgtgtcttgatcctgtatatgatgtaatttggaggtttcgaccaaatactagagagctgtggtgttacaatgcggtggttgctgatgccaggcttccctctgcagcagacatgcagtccagatgtagtatcctaagtcctgaacttgccttaccaacaggatcaagggccctcactacccgatctcatgcagctttgcacattttaggttgtcttgataccttggcagctatgcaggacttaaaaatgggtgttgcaagtacagaggaagagactcaagcagtaatgaaggtttattctaaagaagattatagtgtggtaaacaggtttgaaagtcatggaggaggctggggttattctgcccattcagtagaagctatacgtttcagtgccgacactgatattttacttggtggtcttggtctgtttggaggtagaggagaatatactgctaaaattaagctgtttgaattgggtcctgatggaggagatcatgaaactgatggtgaccttcttgcagagactgatgtattggcttatgactgtgctgctagagaaaaatatgcaatgatgtttgatgagcctgttctcctgcaagctgggtggtggtatgtggcatgggcccgagtgtcaggacccagcagtgactgtggatctcatggacaggcatctattaccacagatgatggggttgttttccagttcaagagttcaaagaaatcaaataatggtacagatgttaatgcgggtcagatacctcagttattatacagacttccaaccagtgatggcagtgcttcaaaaggcaaacagcaaaccagtgaacctgtacacattttaaagaggtcttttgcaagaactgtctcagtggaatgttttgagtcattgttgagtattcttcactggagctggaccaccttagtcttaggagttgaagaacttagaggattaaaaggattccagttcacagctacactcctagatttagagagactgcgctttgtgggtacctgttgtctgaggttattgcgtgtctatacctgtgaaatttacccagtgtcagctacaggaaaagcagttgtagaagaaactagcaaattagcagagtgtattggaaaaaccagaactttgttaagaaaaattttatcagaaccacttgatcactgcatggtgaaattggataatgatcctcaaggatatctcagtcaacccttgagtcttctagaagctgtccttcaggaatgtcataatactttcactgcctgctttcattctttctacccaactcctgccttacagtgggcttgcctttgtgatctgctgaattgtttggatcaggatatccaagaagcaaacttcaagacatcaagtagccgactccttgcagctgttatgtcagctctgtgtcacacgtctgttaagctgacttccatcttcccgattgcgtatgatggagaagtattactacgatcaattgttaaacaagttagtacagagaacgactcaacactagttcatcgttttccccttttggtggcacatatggaaaaactcagccagagtgaagagaatatctcagggatgacaagcttccgtgaagttctggagaaaatgctggtcattgttgtgctaccagtcaggaacagcctgaggagagaaaatgaactcttctcctcccacctcgtctctaacacctgtggattactggccagcattgtcagtgaactgacagcgtcagccctgggatctgaggttgatggacttaattctcttcactctgtaaaagctagtgctaaccgatttacaaaaacaagtcagggcagaagttggaacactgggaacgggtcccctgatgcaatctgtttttcagtagacaaacctggaatagttgtggttggtttctctgtctatggaggaggtggaattcatgaatatgaattagaggtgttggttgatgatagtgaacatgcaggagattcaactcattcccacagatggacatctctggaattagtgaaaggaacgtacacaacggatgactcacccagtgatatagctgagatcagacttgacaaagtggttcctttaaaggaaaatgttaaatatgctgtgcgcttgaggaactatggaagccgtacagccaatggagatggaggaatgaccacagttcagtgccctgatggtgtgacattcacattcagcacgtgcagcttgagcagtaacggcacaaaccaaaccagaggacagatcccacagatactctactataggagtgaatttgatggagatttacaatcccaacttctgagtaaagccaatgaagaagataaaaactgtagcagagcattgtctgttgtaagcactgtcgttcgagcctctaaggacctcctgcacagagctcttgctgtggatgctgatgacattccagaactgctgagttcttccagtctgttttccatgctgctcccccttattatagcctacataggaccagtagctgctgctattcccaaggtggctgtagaagtctttggccttgtccaacaattgcttccgtcagttgccattttgaatcagaagtatgcaccgcctgccttcaaccctaatcagtcgacagatagcaccacaggaaaccagcctgaacagggcctctctgcttgtacaacctccagtcactatgctgtcatagagagtgagcacccgtataaacctgcctgtgtgatgcattacaaggtgacattcccagaatgtgtgaggtggatgacaatcgaatttgaccctcagtgtggtactgcacagtcagaagatgtccttcgtttgttgattcctgtcagaactgttcagaattcaggatatggaccaaaattgacatctgttcatgaaaatcttaattcatggatagaattaaagaaattttcaggatcctctgggtggcctactatggttttggtgttgccaggaaatgaggcccttttttcattggagactgcatcagattatgtgaaagatgacaaagcttctttctatggttttaagtgttttgcaattggatatgaatttagccctggacctgatgagggagtcatccaattggaaaaagaattagccaatcttggtggggtttgtgcagcagctctgatgaagaaggacctagcacttcctattggtaatgaattagaagaagaccttgaaattcttgaggaggctgcattgcaggtgtgcaaaacccattctggaattcttggaaagggtctagctctttctcattcaccaactatattagaagcacttgagggaaatttaccactccaaatccaaagcaatgaacagtcttttctggatgattttattgcctgtgtcccaggatcaagtggtggaaggcttgcaaggtggcttcagccagattcatatgcggatcctcagaaaacatctttgatcctgaataaggatgatattcgttgtggttggcctaccaccataactgttcaaacaaaagaccagtatggggatgtggtacatgttcccaatatgaaggtggaagtgaaagctgtccctgtttctcagaaaaaaatgtctttacaacaagatcaagcaaagaaacctcaaaggattcctggcagtcctgcagtaacagctgcatcttctaatactgacatgacttatggagggctggcatcaccaaagctagatgtttcatatgaaccaatgatagtgaaggaagctcgatatattgccataacaatgatgaaggtttatgaaaattattcatttgaagaactacgttttgcatcaccaactcctaagagacccagtgagaatatgctgatccgtgtcaataatgatgggacttattgtgcaaattggactccaggggctattggactctacactcttcatgttaccattgatggcattgaaatcgatgctggtctggaagtaaaagtaaaagacccaccaaaagggatgataccaccaggaactcagttggtcaaaccaaagtctgaacctcagcctaataaggttcgaaaatttgtggccaaggacagtgcggggcttcgcatccgtagccacccttcccttcagagtgagcagataggcatagtgaaagtcaatggaactatcacttttattgatgagatccataatgatgatggtgtgtggctgaggctgaatgatgagacaataaagaagtatgtccctaacatgaatggttacactgaagcctggtgcctctcttttaatcaacatcttggcaagagtcttctggtccctgttgacaatatctttaatgctagccaaggagtcagggatttggacgtattttcatggacttccaaagcttttttcccccaggaatctaaaactaatactgatgactttttcaaagacataaactcctgctgcccacaggaagcaacaatgcaagaacaagatatgccattcttgcgaggagggccaggcatgtacaaggtagtgaagacgggaccttcaggtcacaacatcagaagctgccctaaccttagaggtatcccaattggaatgttagttctgggaaacaaagtcaaagcagtgggagaggtaaccaattctgaagggacatgggtgcaactggatcagaacagcatggtagagttctgtgagagtgatgaaggagaggcatggtccttagctagagacagaggcggaaaccagtacctccgacatgaagatgaacaagctcttctggatcagaattctcaaactcctcctccaagccctttctcagtgcaagcttttaataaaggggcaagttgcagtgcccaaggatttgattatggactcggaaatagcaaaggtgatcgaggaaacatctcaacatcttctaaaccagcctctacatcaggaaaatcagagctgtcctctaaacacagcagatcgcttaaacctgatggacgtatgagccggactactgctgatcagaagaagccaaggggcacagaaagtttatctgctagtgaatccctcatcttaaaatctgatgctgcaaagttgaggtcagattcccacagtaggtcattatcccccaaccataacaccttgcagacattgaaatctgatgggaggatgccttctagctccagagctgaatccccaggaccaggttctcggttgtcatctcctaagccaaagactctcccagccaataggtctagcccatcgggtgctagttctccacgctcctcctcaccacatgataaaaatctacctcaaaaaagtactgctcctgttaagacaaagcttgatcctcctcgggaacgttctaaatcagactcttacacacttgatccagataccctccgcaagaagaaaatgcccctcacagaacctttgagaggacggtcaacgtcaccaaaaccaaaatcagtaccaaaggattctacagattcccctggatctgaaaatagagctccctctccccatgtggtacaggaaaacctccacagtgaggtggtcgaagtctgcacctcaagtactttaaaaacaaatagtctaacagacagcacctgcgatgacagcagtgaatttaagagtgtggatgaaggttcaaataaagttcattttagcattggaaaagcaccactgaaagatgaacaggaaatgagagcatctcccaaaataagtcgaaaatgtgctaatagacacaccaggcccaaaaaagaaaaatcgagttttcttttcaaaggagatggatccaagcctttagagccagccaagcaagccatgtctccttctgtggccgaatgtgccagagctgtgtttgcttccttcctctggcatgaaggcatagtacatgatgcaatggcttgttcttctttcctaaagtttcatcctgaactttccaaagaacatgctcctataaggagtagtttaaatagccaacaacctacagaggaaaaagaaaccaagttaaaaaatagacattcattagaaatatcatctgcactgaatatgtttaatattgcaccccatggaccagatatatctaagatgggtagcatcaacaaaaacaaggtattgtctatgcttaaggaaccacctctgcatgaaaaatgtgaggatgggaaaaccgagaccacttttgaaatgtccatgcataacacaatgaagtctaagtctcctcttcccttaactttacaacatttagtggctttttgggaagacatctctttggctactatcaaagctgcttcccagaatatgatttttccaagtcctggttcctgtgcagttcttaaaaagaaagagtgtgagaaagagaataagaagtccaaaaaggaaaaaaagaaaaaagaaaaggcagaagttaggcccaggggtaatttgtttggagagatggcccagctggcagtaggaggaccagagaaagataccatctgtgaactgtgtggggagtcacatccatacccggtgacctatcacatgagacaagctcacccaggttgtggccgatatgctggtggacaaggttacaatagcattgggcatttttgtggaggatgggctggtaactgtggtgatggtggcataggaggaagcacttggtatctggtatgtgatcgctgtagagaaaaatacctccgcgaaaaacaggctgctgcaagggagaaggtcaaacaatctaggagaaaaccaatgcaagtcaagacccctcgtgccttgcccaccatggaagctcaccaggtgattaaagccaatgcactcttcctgctgtccctgagcagtgcagcagaaccgagcattctgtgttaccatcctgcaaagccattccaatctcagttgcccagtgtaaaagaaggcatttctgaggatcttcctgtgaaaatgccttgtctctacctgcagacattagctaggcatcatcatgaaaattttgtgggctatcaagatgacaatctattccaggatgaaatgagatatctacgttcaacatctgtacctgccccgtatatatcagtaactcctgatgcaagtcctaatgtatttgaagagccagagagcaatatgaagtctatgccaccaagtttagaaaccagtcccataactgatactgatcttgcaaagagaactgtcttccaaagatcatactcagttgttgcttccgaatatgataaacaacactccattttacctgcacgagttaaagctattcctagaagaagagttaacagtggagacactgaagttggttcttcccttttgagacatccgtctcctgagctttctcggctaatctcagcccacagctctctttctaaaggagaacgaaatttccagtggccagttttagcttttgttatacaacatcatgatctagaaggtcttgaaatagcaatgaaacaggccctaaggaaatctgcttgtcgagtttttgctatggaggctttcaactggcttctgtgtaatgtcatccaaaccacttctctccatgatattctgtggcattttgtggcatcactgactcctgcaccagtggaaccagaggaagaagaggatgaagaaaataaaacaagcaaagaaaattcagaacaagagaaagatacaagagtatgtgaacatccactctcagacatagtgattgccggggaagctgctcatcctttaccacacacctttcaccgcttgctgcagaccatctcagaccttatgatgtctctccccagcggcagttcattacagcaaatggccctgaggtgctggagtctcaaattcaagcaatctgatcaccagttccttcatcagagcaacgtctttcatcacattaacaatattttgtcaaagtcagatgatggcgatagtgaagagagttttagcatcagtatacagtctggctttgaagctatgagtcaggaattatgcatagtaatgtgcttaaaggacttaaccagcattgttgacataaaaacttcaagccgacctgccatgattggcagtttgacagacggctccacagaaaccttttgggaatcaggagatgaagataaaaacaaaactaagaacatcaccatcaactgtgtaaaaggaatcaatgcccgctatgtgtctgttcacgtggacaattcccgagatcttgggaataaagttacctcaatgaccttcttaactggcaaagcagtagaagatttgtgcagaataaagcaggttgatctggattccaggcacattggctgggtaacaagtgaacttccaggaggggataatcacatcataaaaattgaattaaaaggcccagaaaatacactgagagttcgacaagtcaaagtcctgggctggaaagatggtgaaagcacaaaaatagctggccagatttcagccagtgtggcccagcagaggaactgtgaagctgagactctgcgagtattcagactgattacgtctcaagtatttggaaagctcatctctggagatgctgaacctacaccagaacaagaggaaaaagcactattgtcatcacctgaaggagaagaaaaagtatacaatgcaacatcagatgctgacctgaaagaacatatggttggaatcatattcagcaggagtaagctgactaacttacaaaaacaggtgtgtgctcatattgtccaagctattcgcatggaagctaccagagtccgtgaagaatgggaacatgctatatcaagcaaagaaaatgccaattctcagccaaatgatgaagatgcctcctctgatgcctactgctttgagctgctctctatggttttagcactgagtggctctaacgttggccggcaatatctggctcaacagctaaccctgcttcaggatctcttctcgctgcttcacacagcctctcctagagtccagagacaggtaacctctttactaagaagagttttgcctgaagtaacccctagtcgtctggccagcatcataggagtgaaatccctccccccagcagatatcagtgatatcattcactcaacagagaaaggagactggaataagctgggtatcttggacatgtttctaggatgcattgccaaagcactcactgtacagctaaaagccaaaggaaccaccatcactggaacagctggtaccactgtgggcaaaggagttacaacagttactcttccgatgattttcaattccagttatctccgacgaggtgaaagtcattggtggatgaagggctcaacccctacccagatctcagagatcatcattaaacttatcaaggatatggcagcaggtcatctgtcagaagcttggtcccgagtgacaaaaaatgctattgcagaaaccatcattgccttgaccaagatggaagaagaatttaggtctccagtgagatgtattgcaacaactagactctggcttgctctcgcatccctatgtgttcttgatcaggaccacgtagatcgtctctcctcggggagatggatgggaaaggatggacaacaaaaacaaatgcctatgtgtgataaccatgatgatggtgaaactgcagcaatcattttatgcaatgtctgtggaaatttatgtacagactgtgacagattccttcaccttcatcgaagaaccaaaactcatcaaagacaggtcttcaaagaagaagaagaagctataaaggttgaccttcatgaaggttgtggtagaaccaaattgttctggttgatggcactggcagattctaaaacaatgaaggcaatggtggaattccgagaacacacaggcaaacccaccacgagtagctcagaagcatgtcgcttctgtggttccaggagtggaacagagttatctgctgttggcagtgtttgttctgatgcagattgccaggaatacgctaagatagcctgtagtaagacgcatccttgtggccatccatgcgggggtgttaaaaacgaagagcactgtctgccctgtctacacggctgtgacaaaagtgccacaagcctgaagcaagacgccgatgacatgtgcatgatatgtttcaccgaagcgctctcggcagcaccagccattcagctggatcgtagtcacatagtcgcacattacagtgctgtccggccgagtacatagcaaagcgagggcgctggaccaaggataacacgtcggcgacggaccgagctcagattc

SEQ ID NO: 357468 - DNA, 1549 bp, Homo sapiens
cgactctagagatccccctcgcgaacgtgttatccttgtgccacaagcctgaagcaagacgccgatgacatgtgcatgatatgtttcaccgaagcgctctcggcagcaccagccattcagctggattgtagtcacatattccacttacagtgctgtcggcgagtattagaaaatcgatggcttggcccaaggataacatttggatttatatcttgtcccatttgcaagaacaaaattaatcacatagtactaaaagacctacttgatccaataaaagaactctatgaggatgtcagaagaaaagccttaatgagattggaatatgaaggtctgcataagagtgaagctatcacaactcctggtgtgaggttttataatgacccagctggctatgcaatgaatagatatgcatattatgtgtgctacaaatgcagaaaggcatattttggtggtgaagctcgctgcgatgctgaggctggacggggagatgattatgatcccagagagctcatttgtggtgcctgttctgatgtttccagggctcagatgtgtcccaaacatggcacagactttttggaatataaatgtcgctactgctgttcagtggctgtttttttctgttttggaacaacacatttttgtaatgcttgtcatgatgattttcaaagaatgactagcattcctaaggaagaactaccacactgtcctgcaggtcccaaaggcaagcagttagaaggaactgaatgtccactccatgttgttcatccacccactggggaagagtttgctctgggatgtggagtgtgcagaaatgcccacactttttagaacacgcagatcctttgtctacagagagaaaaattgccttcatcccccaagaggatgcggtgaagtttaaactctgctcaggataaggacgggaccatttttacatccatgaaaatgaaccattcacagtgcaagaaggataccaaataccatgtacataattcttgctatgaaaagtttccccattattttggtttatcttcttttgaacaaatgacatcaaacttgtgaggtgtttgcatgtggccattaccgtcattggcctgtgaagcattggacatttatagataattgatataaaagaatcgccatgcccatggactaagaacgatgctggctttcaagcaaaaaagaaaaataatcattgtttattgtatactgcctttttgtaatcctgtacaattgcatcacgggtggggataaaaagaggaatattctggtttatttcctagactgttatttaaaaaaaaaaaaaacattgtgttaggacagcatataaatgtaataagtatcacactgtatataaacatatcaatgtttgtcctgtataagaattactaaattacaaatgcaatttcatttaaacttctaggttaagtttgagcctgaaattttaatgaagtgcaatactgagtgtgcctcattatcttgcagctgtaaacatattggaatgtacatgtcaataaaaccactgtacatttttatacagtgataaagtcta

SEQ ID NO: 357469 - DNA, 8469 bp, Homo sapiens
tcttggagcgttctcagtttctcaacagatcttcacttgctaggcagccagaagccggcggcagtggcggcaccgcctcctcctcacattcccggggtggcggggttagatgagcggccccagtcgcggcgccgggggcgctgttcatgccggttcccgacggctccgtggctgctgcggggctggggctggggctacccgccgcggactccccgggtcactaccagctgctgctgtcaggccgggccctggccgaccgctaccggaggatttataccgctgcgctcaatgacagggaccaggggggcggcagcgctggacacccagcctccaggaataagaaaattttaaataagaagaaattgaaaagaaaacagaagagcaaatcaaaagtgaagacaagaagcaagtctgaaaacttagagaatacagtaatcataccagatatcaaactacatagcaatccttctgctttcaatatttactgtaatgtacgccattgcgttctggaatggcagaaaaaggaaatatcattggcagccgcatctaagaactctgtgcagagtggagaatcagatagtgatgaagaagaggaatccaaagagccccctatcaagcttccaaagattattgaggttggcctttgtgaagtttttgaattgatcaaagagacacgattttctcatccatccctgtgtctcaggagtctccaagccctgctcaacgtgctgcagggccagcagccagaagtgctccagtctgagccacctgaggtcctagagtctctcttccagcttcttttggaaatcaccgttcgaagtactgggatgaatgacagcacaggacagtccttaacagcactttcctgtgcttgcctctttagtctggtggcttcttggggagaaacaggaaggacacttcaggccatctctgctatcctcaccaacaatggaagccatgcttgccaaactattcagagacttaggaatgccattagagctcatagcaggagtataagaactacgttcatggaaagcctcccagaggatatgaggtgccaacaattctaaattcgctacagagaagtgtacaagcagttttggtgggaaaaattcaaattcaggactggtttagtaatggcattaagaaagcagctttaatgcacaagtggccattaaaagaaatatctgttgatgaagatgaccaatgtctacttcagaatgatggattttttctttatctattatgcaaggatggattatataaaataggctctggatacagtggaacagttaggggccatatatacaattctacatcccgtattagaaacagaaaagaaaaaaagtcttggttagggtatgctcagggttatttattatatagagatgtgaataaccacagcatgacagccataaggataagccctgaaacactggagcaagatggtactgtgatgttaccagattgccacactgaaggtcaaaatattttattcactgatggagaatatattaatcagatagctgcttcaagagatgatggctttgttgtcagaatatttgccacaagcactgaacctgttctacagcaagaattgcaacttaaactggctagaaaatgcttacatgcctgtggtatctcactattcgatctggaaaaggacttgcatattataagtacaggatttgatgaggagtcagcaattcttggtgcaggacgagagtttgcgctaatgaaaacagcaaatggaaagatatattacactggcaaataccagagtcttggaatcaaacaaggtggtccttcagcaggaaaatgggttgagctaccaattacaaaatctccaaagatagtacacttctcagttggacacgatggctctcacgcccttttagttgcagaagatgggagcatattctttacaggatctgctagtaaaggagaagatggagaatcaattaagagcagacggcaatccaaaccttataaacctaaaaagataattaagatggaaggaaagattgtggtatatacagcctgcaataatggaagtagttctgttatttctaaagatggagaactctacatgtttggaaaagatgccatttactctgatagttcaagtttggtaactgatttgaagggccattttgtaactcaggtagctatgggcaaagctcacacttgtgttttaatgaagaatggagaggtgtggacatttggtgtaaataataaaggacagtgtggacgagatactggtgccatgaaccaaggtgggaaagggtttggagttgaaaatatggcaacagcaatggatgaagacctggaagaagaactagatgaaaaagatgagaagtctatgatgtgccctccaggcatgcacaaatggaagctggagcagtgcatggtttgcactgtctgtggagactgtacaggttatggagccagctgtgtcagtagtggacggccagacagagtccccggagggatctgtggttgtggttccggagaatctggttgtgctgtgtgtggatgttgcaaggcctgtgcaagagagttagatggtcaagaggcaagacaaagaggaattcttgatgcagtgaaagaaatgatacctttagatcttcttttagctgtcccagtgcccggggttaacattgaagaacaccttcagttacgacaagaagaaaaacggcaacgtgtaatcagaaggcacagattagaggaaggaagaggcccccttgtatttgctggtcctatttttatgaaccatcgagaacaggctctagccagactcagatcccatccagcacacgtaaagcataaacgggacaagcacaaagatggaagtggagaaagaggcgaaaaggatgcaagcaaaatcacaacataccctccaggctctgtgcgatttgactgtgagctccgggcagtccaagtcagctgtggatttcaccattcagtggttttaatggaaaatggagatgtctatacatttggttatgggcagcatgggcagctaggacatggagatgtcaactccaggggatgtcccactcttgttcaagcattgccaggccctagcacacaagtcactgcaggcagcaaccatacggcagtacttttaatggatggacaggtcttcacatttggaagtttttctaaaggacaactgggcagaccaattttggatgtgccatattggaatgcaaagccagctcccatgcctaacattggatcaaaatatggaagaaaagctacttggataggtgcaagtggggaccaaacttttttacgaattgatgaagcacttattaattctcatgtacttgctacatcagaaatttttgccagtaaacacataataggcttggtacctgcttctatatcagaacctcctccatttaaatgccttctgataaataaagtggatgggagttgtaaaacttttaatgactcagaacaagaggatctgcaaggatttggtgtgtgtcttgatcctgtatatgatgtaatttggaggtttcgaccaaatactagagagctgtggtgttacaatgcggtggttgctgatgccaggcttccctctgcagcagacatgcagtccagatgtagtatcctaagtcctgaacttgccttaccaacaggatcaagggccctcactacccgatctcatgcagctttgcacattttaggttgtcttgataccttggcagctatgcaggacttaaaaatgggtgttgcaagtacagaggaagagactcaagcagtaatgaaggtttattctaaagaagattatagtgtggtaaacaggtttgaaagtcatggaggaggctggggttattctgcccattcagtagaagctatacgtttcagtgccgacactgatattttacttggtggtcttggtctgtttggaggtagaggagaatatactgctaaaattaagctgtttgaattgggtcctgatggaggagatcatgaaactgatggtgaccttcttgcagagactgatgtattggcttatgactgtgctgctagagaaaaatatgcaatgatgtttgatgagcctgttctcctgcaagctgggtggtggtatgtggcatgggcccgagtgtcaggacccagcagtgactgtggatctcatggacaggcatctattaccacagatgatggggttgttttccagttcaagagttcaaagaaatcaaataatggtacagatgttaatgcgggtcagatacctcagttattatacagacttccaaccagtgatggcagtgcttcaaaaggcaaacagcaaaccagtgaacctgtacacattttaaagaggtcttttgcaagaactgtctcagtggaatgttttgagtcattgttgagtattcttcactggagctggaccaccttagtcttaggagttgaagaacttagaggattaaaaggattccagttcacagctacactcctagatttagagagactgcgctttgtgggtacctgttgtctgaggttattgcgtgtctatacctgtgaaatttacccagtgtcagctacaggaaaagcagttgtagaagaaactagcaaattagcagagtgtattggaaaaaccagaactttgttaagaaaaattttatcagaaccacttgatcactgcatggtgaaattggataatgatcctcaaggatatctcagtcaacccttgagtcttctagaagctgtccttcaggaatgtcataatactttcactgcctgctttcattctttctacccaactcctgccttacagtgggcttgcctttgtgatctgctgaattgtttggatcaggatatccaagaagcaaacttcaagacatcaagtagccgactccttgcagctgttatgtcagctctgtgtcacacgtctgttaagctgacttccatcttcccgattgcgtatgatggagaagtattactacgatcaattgttaaacaagttagtacagagaacgactcaacactagttcatcgttttccccttttggtggcacatatggaaaaactcagccagagtgaagagaatatctcagggatgacaagcttccgtgaagttctggagaaaatgctggtcattgttgtgctaccagtcaggaacagcctgaggagagaaaatgaactcttctcctcccacctcgtctctaacacctgtggattactggccagcattgtcagtgaactgacagcgtcagccctgggatctgaggttgatggacttaattctcttcactctgtaaaagctagtgctaaccgatttacaaaaacaagtcagggcagaagttggaacactgggaacgggtcccctgatgcaatctgtttttcagtagacaaacctggaatagttgtggttggtttctctgtctatggaggaggtggaattcatgaatatgaattagaggtgttggttgatgatagtgaacatgcaggagattcaactcattcccacagatggacatctctggaattagtgaaaggaacgtacacaacggatgactcacccagtgatatagctgagatcagacttgacaaagtggttcctttaaaggaaaatgttaaatatgctgtgcgcttgaggaactatggaagccgtacagccaatggagatggaggaatgaccacagttcagtgccctgatggtgtgacattcacattcagcacgtgcagcttgagcagtaacggcacaaaccaaaccagaggacagatcccacagatactctactataggagtgaatttgatggagatttacaatcccaacttctgagtaaagccaatgaagaagataaaaactgtagcagagcattgtctgttgtaagcactgtcgttcgagcctctaaggacctcctgcacagagctcttgctgtggatgctgatgacattccagaactgctgagttcttccagtctgttttccatgctgctcccccttattatagcctacataggaccagtagctgctgctattcccaaggtggctgtagaagtctttggccttgtccaacaattgcttccgtcagttgccattttgaatcagaagtatgcaccgcctgccttcaaccctaatcagtcgacagatagcaccacaggaaaccagcctgaacagggcctctctgcttgtacaacctccagtcactatgctgtcatagagagtgagcacccgtataaacctgcctgtgtgatgcattacaaggtgacattcccagaatgtgtgaggtggatgacaatcgaatttgaccctcagtgtggtactgcacagtcagaagatgtccttcgtttgttgattcctgtcagaactgttcagaattcaggatatggaccaaaattgacatctgttcatgaaaatcttaattcatggatagaattaaagaaattttcaggatcctctgggtggcctactatggttttggtgttgccaggaaatgaggcccttttttcattggagactgcatcagattatgtgaaagatgacaaagcttctttctatggttttaagtgttttgcaattggatatgaatttagccctggacctgatgagggagtcatccaattggaaaaagaattagccaatcttggtggggtttgtgcagcagctctgatgaagaaggacctagcacttcctattggtaatgaattagaagaagaccttgaaattcttgaggaggctgcattgcaggtgtgcaaaacccattctggaattcttggaaagggtctagctctttctcattcaccaactatattagaagcacttgagggaaatttaccactccaaatccaaagcaatgaacagtcttttctggatgattttattgcctgtgtcccaggatcaagtggtggaaggcttgcaaggtggcttcagccagattcatatgcggatcctcagaaaacatctttgatcctgaataaggatgatattcgttgtggttggcctaccaccataactgttcaaacaaaagaccagtatggggatgtggtacatgttcccaatatgaaggtggaagtgaaagctgtccctgtttctcagaaaaaaatgtctttacaacaagatcaagcaaagaaacctcaaaggattcctggcagtcctgcagtaacagctgcatcttctaatactgacatgacttatggagggctggcatcaccaaagctagatgtttcatatgaaccaatgatagtgaaggaagctcgatatattgccataacaatgatgaaggtttatgaaaattattcatttgaagaactacgttttgcatcaccaactcctaagagacccagtgagaatatgctgatccgtgtcaataatgatgggacttattgtgcaaattggactccaggggctattggactctacactcttcatgttaccattgatggcattgaaatcgatgctggtctggaagtaaaagtaaaagacccaccaaaagggatgataccaccaggaactcagttggtcaaaccaaagtctgaacctcagcctaataaggttcgaaaatttgtggccaaggacagtgcggggcttcgcatccgtagccacccttcccttcagagtgagcagataggcatagtgaaagtcaatggaactatcacttttattgatgagatccataatgatgatggtgtgtggctgaggctgaatgatgagacaataaagaagtatgtccctaacatgaatggttacactgaagcctggtgcctctcttttaatcaacatcttggcaagagtcttctggtccctgttgacaatatctttaatgctagccaaggagtcagggatttggacgtattttcatggacttccaaagcttttttcccccaggaatctaaaactaatactgatgactttttcaaagacataaactcctgctgcccacaggaagcaacaatgcaagaacaagatatgccattcttgcgaggagggccaggcatgtacaaggtagtgaagacgggaccttcaggtcacaacatcagaagctgccctaaccttagaggtatcccaattggaatgttagttctgggaaacaaagtcaaagcagtgggagaggtaaccaattctgaagggacatgggtgcaactggatcagaacagcatggtagagttctgtgagagtgatgaaggagaggcatggtccttagctagagacagaggcggaaaccagtacctccgacatgaagatgaacaagctcttctggatcagaattctcaaactcctcctccaagccctttctcagtgcaagcttttaataaaggggcaagttgcagtgcccaaggatttgattatggactcggaaatagcaaaggtaggtatttaaaagtaagtcttttacttacctaacttcaatattttttattaccttctcttttatacactttttatttgtgttcacccagaaatctttattaaattaaaatttgttcatggaaagctaataaaaaatgtttaca

SEQ ID NO: 357470 - DNA, 255 bp, Homo sapiens
tctcattttatttttcttaccaggtaacctctttactaagaagagttttgcctgaagtaacccctagtcgtctggccagcatcataggagtgaaatccctccccccagcagatatcagtgatatcattcactcaacagagaaaggagactggaataagctgggtatcttggacatgtttctaggatgcattgccaaagcactcactgtacagctaaaagccaaaggaaccaccatcactggaacagctggtacca

SEQ ID NO: 357471 - DNA, 580 bp, Homo sapiens
aagtataggtggctcagcctaagcatccaatttattaggctatttaaatgatatattcacagtatacagaacagggattgttaaagtaccattcaaaagaagtcctccttggcttaacacatcgactttaatttaaccaggtaggaaactcacttcttttctttttctagctatgtttttgctcaccgaagctaaatatacatatgaattgattccacagccatggaattgagaaaaaccaggaagtgatgctgaaaacataaatgaaactatgatccacgatctgttgctctaaacgccgtttcttccggagaaccttaaagataaatatgcaaccctttacattctccagtgatgtcaacagcctaagctgaatttcaaattacatcgagtcaatgaaaaggtgaatggatttttagagcaactcagattcaaagaatcaaatcgcctttattcttattttaaggaacatgactgataacctgtgcagaaaataaaaaaaaaactaactatagcaatcgcagcatatgtttaacctaacaattaaaaatatataactgaaaattacaataaaaagcga

SEQ ID NO: 357472 - DNA, 666 bp, Homo sapiens
aagtataggtggctcagcctaagcatccaatttattaggctatttaaatgatatattcacagtatacagaacagggattgttaaagtaccattcaaaagaagtcctccttggcttaacacatcgactttaatttaaccaggtaggaaactcacttcttttctttttctagctatgtttttgctcaccgaagctaaatatacatatgaattgattccacagccatggaattgagaaaaaccaggaagtgatgctgaaaacataaatgaaactatggtattatttagaaaaaaactttcaaggaatcagttattttaccaattccaaaagaatgaaaaaagtgaagactcagaaaacgtcagatccacgatctgttgctctaaacgccgtttcttccggagaaccttaaagataaatatgcaaccctttacattctccagtgatgtcaacagcctaagctgaatttcaaattacatcgagtcaatgaaaaggtgaatggatttttagagcaactcagattcaaagaatcaaatcgcctttattcttattttaaggaacatgactgataacctgtgcagaaaataaaaaaaaaactaactatagcaatcgcagcatatgtttaacctaacaattaaaaatatataactgaaaattacaataaaaagcga

SEQ ID NO: 357473 - DNA, 442 bp, Homo sapiens
ggggacacgcctcactttgagacaacttgaggctgcgtcagtgaccttgtactgttgttatacaattcaatattgaagcgagagattctccagaacttgcccagaagccaagacgtctggaaaggatctcagcctctgtcagcctgcagcttgggaagagtgattcacagagcctgactgtccactgctgctaaaccatacactggccttggctcacacatctgactgaactgtctcctatgactaactgcctctctttcttcagccttgcaagtttcctgggagtcctgggagtgggacttcacatataaaaggggactctggggagacctagttcctgggcttctcttctgggaagtcaggggaagagtatagggaaggagtgggccacagtgcccaacttgacaatttgacaattttcaccaagtaagtcctttttggg

SEQ ID NO: 357474 - DNA, 722 bp, Homo sapiens
aaataagaatgcaaaagagtgagagaaatcctacaaaacttaagttacatcaataggcacacaaatagtaatcttatgggaattccagaaggtgaagagaaggaaaattacatagaaaatctggttaatgaaatagtagatgaacactttccatgtcggtggagagagatggacgtttcaattcaggaatctcaaaggtctccaaagagaatcaactgcaaatggtcctccccaaggcatattgcaattaaatggtcaaatggcagagacaggaaaaaaatttaaaaacagcaagagaatgaggagaaaaagcaaaaaagaacagcaaaacagtcaagtcacatacaaaggaatcccaattagaataacagatttcttgcagaaaccttacaggctatgaatgagtgggatgatgtattcaaagtgctgaaagaaaaaataattgttttacatgatacgaccgagaatactgtaactgtaaaaaccaaagaatactataaccaccaaagctgtagttcagcagagagagagagaaataatgtctttcctagaaaaaaatctgagagaatttataactgctagatcagccttacaagaaatagtcaaggtagtccgagatctagcaggccacaggacaatattcaccatcatgaaaacatgagaaagataatagaacagatattaaaagaaaacagagacaagaattaaaccttgtcgctgca

SEQ ID NO: 357475 - DNA, 1142 bp, Homo sapiens
ggccccgccctactccgcgtggattggttgaccgcccttcgagcccggtgctgactggcttgcgtctctgccactttctttcagcttagtggcgcgcggcgcggcgacgaccgccgggagcgtgtgcagcggcggcggcggaagtggccggcgagcccggtccccgccggcaccatgcttcccttgtcactgctgaagacggctcagaatcaccccatgttggtggagctgaaaaatggggagacgtacaatggacacctggtgagctgcgacaactggatgaacattaacctgcgagaagtcatctgcacgtccagggacggggacaagttctggcggatgcccgagtgctacatccgcggcagcaccatcaagtacctgcgcatccccgacgagatcatcgacatggtcaaggaggaggtggtggccaagggccgcggccgcggaggcctgcagcagcagaagcagcagaaaggccgcggcatgggcggcgctggccgaggtgtgtttggtggccggggccgaggtgggatcccgggcacaggcagaggccagccagagaagaagcctggcagacaggcgggcaaacagtgagcgcccacccagaccggctgctgcgccccctcctgccagggtggcgattccgctccacagtctcggacggatctgctcagaaaggaagaggcaggcgccagggggaacccccttcgtgttttgtgaccctcccttttaggtgaagcccctttttcttgctaaaaccggcaattctccggttagaaatgttacttggtgttttttggttttgtgaaacggccgtcccaaagctggctggattcctagaagagtctgtgttgaaggcatctttcaagccctcgctctggttctcagggcagcattttccaggcgggtttgttttgcatttcttggagcctctccgagcagcaaccagacgggagatttttattttaagctgttcatgctgggactgacagcctgcagggtttccttgggcgcggccccaaaattgccttcaaaacaaacccgggacggttgaaagccttcgaaccgtgcaggggatgcctcgggccctggcccttcgcttcctctcttgtgttatggaaataaaaacaaataaaactaca

SEQ ID NO: 357476 - DNA, 706 bp, Homo sapiens
  misc_feature (29)..(29): n is a, c, g, or t
  misc_feature (673)..(673): n is a, c, g, or t
  misc_feature (706)..(706): n is a, c, g, or t
ggacgcgtgggtcggacgcgtgggtcganccacgcgtcgaccatgcttcccttgtcactgctgaagacggctcagaatcaccccatgttggtggagctgaaaaatggggagacgtacaatggacacctggtgagctgcgacaactggatgaacattaacctgcgagaagtcatctgcacgtccagggacggggacaagttctggcggatgcccgagtgctacatccgcggcagcaccatcaagtacctgcgcatccccgacgagatcatcgacatggtcaaggaggaggtggtggccaagggccgcggccgcggaggcctgcagcagcagaagcagcagaaaggccgcggcatgggcggcgctggccgaggtgtgtttggtggccggggccgaggtgggatcccgggcacaggcagaggccagccagagaagaagcctggcagacaggcgggcaaacagtgagcgcccacccagaccggctgctgcgccccctcctgccagggtggcgattccgctccacagtctcggacggatctgctcagaaaggaagaggcaggcgccagggggaacccccttcgtgttttgtgaccctcccttttaggtgaagcccctttttcttgctgtccaagctggttgattctagaaagtctgtgtgaagcatctttcaggcctngctttggtttaaggcagcactttcaggcgggtn

SEQ ID NO: 357477 - DNA, 413 bp, Homo sapiens
ggccccgccctactccgcgtggattggttgaccgcccttcgagcccggtgctgactggcttgcgtctctgccactttctttcagcttagtggcgcgcggcgcggcgacgaccgccgggagcgtgtgcagcggcggcggcggaagtggccggcgagcccggtccccgccggcaccatgcttcccttgtcactgctgaagacggctcagaatcaccccatgttggtggagctgaaaaatggggagacgtacaatggacacctggtgagctgcgacaactggatgaacattaacctgcgagaagtcatctgcacgtccagggtgggtgctgcacccaccaacgggggtgggatgcagggggtgcacactcagcctcctccctccctccctgggcctcatgggaggagtcagtgggg

SEQ ID NO: 357478 - DNA, 1841 bp, Homo sapiens
ggccccgccctactccgcgtggattggttgaccgcccttcgagcccggtgctgactggcttgcgtctctgccactttctttcagcttagtggcgcgcggcgcggcgacgaccgccgggagcgtgtgcagcggcggcggcggaagtggccggcgagcccggtccccgccggcaccatgcttcccttgtcactgctgaagacggctcagaatcaccccatgttggtggagctgaaaaatggggagacgtacaatggacacctggtgagctgcgacaactggatgaacattaacctgcgagaagtcatctgcacgtccagggacggggacaagttctggcggatgcccgagtgctacatccgcggcagcaccatcaagtacctgcgcatccccgacgagatcatcgacatggtcaaggaggaggtggtggccaagggccgcggccgcggaggcctgcagcagcagaagcagcagaaaggccgcggcatgggcggcgctggccgaggtgtgtttggtggccggggccgaggtgggatcccgggcacaggcagaggccagccagagaagaagcctggcagacaggcgggcaaacagtgagcgcccacccagaccggctgctgcgccccctcctgccagggtggcgattccgctccacagtctcggacggatctgctcagaaaggaagaggcaggcgccagggggaacccccttcgtgttttgtgaccctcccttttaggtgaagcccctttttcttgctaaaaccggcaattctccggttagaaatgttacttggtgttttttggttttgtgaaacggccgtcccaaagctggctggattcctagaagagtctgtgttgaaggcatctttcaagccctcgctctggttctcagggcagcattttccaggcgggtttgttttgcatttcttggagcctctccgagcagcaaccagacgggagatttttattttaagctgttcatgctgggactgacagcctgcagggtttccttgggcgcggccccaaaattgccttcaaaacaaacccgggacggttgaaagccttcgaaccgtgcaggggatgcctcgggccctggcccttcgcttcctctcttgtgttatggaaataaaaacaaataaaactacacactgcacatccactgttccttttgagcttctgggtgcacctagcgggtctcctgccctctgtccatcgctggactctcaggaaatccccgttcccgtaagggaagcttccttttgagagttctcaccaggtgtcagcggcacagtgaggcactgatgtccttttacaaaaggcaagaccagcatctggacagtgggggctcttgagagtccccggcgccccccacaccaggttgtcctataaccctccccctctgtggaaacgttaatgccaaggggtgtgtggggaagggaaagtcccaggcaggggccacgcatggtcccccatcaccccctcctgggtggcctggactccatcatctatcctcatctgtccacactggcgttcacacagagaagacaggacaggaatcccctcggaagatgctcatggaagattctcacgaggctcctgccccctttctgagccaggccgggtttgccactcctcgggcgcgcacctgagacactgagtcagcgctttcgagaaaggctccgggtagcatctgtggaccgtgaagaaaccagagggaagccctgagccaggcagcggcccgtccccctgcatagccttctcttcagggtcctcgttcggagacctattttgagaggtgattggaataaaaggtcccgtccgtgaggaactctttaaattgagtct

SEQ ID NO: 357479 - DNA, 1812 bp, Homo sapiens
  misc_feature (1654)..(1654): n is a, c, g, or t
  misc_feature (1812)..(1812): n is a, c, g, or t
ggccccgccctactccgcgtggattggttgaccgcccttcgagcccggtgctgactggcttgcgtctctgccactttctttcagcttagtggcgcgcggcgcggcgacgaccgccgggagcgtgtgcagcggcggcggcggaagtggccggcgagcccggtccccgccggcaccatgcttcccttgtcactgctgaagacggctcagaatcaccccatgttggtggagctgaaaaatggggagacgtacaatggacacctggtgagctgcgacaactggatgaacattaacctgcgagaagtcatctgcacgtccagggacggggacaagttctggcggatgcccgagtgctacatccgcggcagcaccatcaagtacctgcgcatccccgacgagatcatcgacatggtcaaggaggaggtggtggccaagggccgcggccgcggaggcctgcagcagcagaagcagcagaaaggccgcggcatgggcggcgctggccgaggtgtgtttggtggccggggccgaggtgggatcccgggcacaggcagaggccagccagagaagaagcctggcagacaggcgggcaaacagtgagcgcccacccagaccggctgctgcgccccctcctgccagggtggcgattccgctccacagtctcggacggatctgctcagaaaggaagaggcaggcgccagggggaacccccttcgtgttttgtgaccctcccttttaggtgaagcccctttttcttgctaaaaccggcaattctccggttagaaatgttacttggtgttttttggttttgtgaaacggccgtcccaaagctggctggattcctagaagagtctgtgttgaaggcatctttcaagccctcgctctggttctcagggcagcattttccaggcgggtttgttttgcatttcttggagcctctccgagcagcaaccagacgggagatttttattttaagctgttcatgctgggactgacagcctgcagggtttccttgggcgcggccccaaaattgccttcaaaacaaacccgggacggttgaaagccttcgaaccgtgcaggggatgcctcgggccctggcccttcgcttcctctcttgtgttatggaaataaaaacaaataaaactacaaaaaaaaaaaaaaaaaaaaaaaaaaaaaaaaaaaaaaaaaaaaaaaaaaaaaaaaaaaaaagggggggggggaaaaaaacccccgggggggcgccatggggcccccgtttttggaaagggggccccaagggggaggcgataaataaagagcaagaggcggcgggggcccggggataaacaacaggcgcgccggagggggggaagaacagcgtggtgctcccgcggggaatgctgtggcgggagagagaaccccccccactgtcggggggggggcgccccacctgtgtcgggcaccaccaccccccccgcagaggaggtattttaacgcgctcccaggggaacaatacacacccttggaggcgctctagcggcggtgcaccacccacaggcggttatatatgcgtggcgggggggggaaaaaaaaattatccggcgcccgcggcgggatctatgttctccgcgcgagacaatttttcttccgccggacgtcggtgtgttaaggaatattccangtacgtctggcgtccacctaacaccaccagcacacaccacacacaccgacaccaccgacgagttgaccatcgatgccgactcgtcgacatcaagcggatcgacaggcatccacgatgacacagccgcaaccatcacacacaccaccacagatcacccn

SEQ ID NO: 357480 - DNA, 1085 bp, Homo sapiens
cggcgaccccaaggctgtctgcgagggcagcgcttgtcccgccgccgtcacccgcacaggcacagactctgccacagcccgccgccgcacgtgccgccgccggtccccgccggcaccatgcttcccttgtcactgctgaagacggctcagaatcaccccatgttggtggagctgaaaaatggggagacgtacaatggacacctggtgagctgcgacaactggatgaacattaacctgcgagaagtcatctgcacgtccagggacggggacaagttctggcggatgcccgagtgctacatccgcggcagcaccatcaagtacctgcgcatccccgacgagatcatcgacatggtcaaggaggaggtggtggccaagggccgcggccgcggaggcctgcagcagcagaagcagcagaaaggccgcggcatgggcggcgctggccgaggtgtgtttggtggccggggccgaggtgggatcccgggcacaggcagaggccagccagagaagaagcctggcagacaggcgggcaaacagtgagcgcccacccagaccggctgctgcgccccctcctgccagggtggcgattccgctccacagtctcggacggatctgctcagaaaggaagaggcaggcgccagggggaacccccttcgtgttttgtgaccctcccttttaggtgaagcccctttttcttgctaaaaccggcaattctccggttagaaatgttacttggtgttttttggttttgtgaaacggccgtcccaaagctggctggattcctagaagagtctgtgttgaaggcatctttcaagccctcgctctggttctcagggcagcattttccaggcgggtttgttttgcatttcttggagcctctccgagcagcaaccagacgggagatttttattttaagctgttcatgctgggactgacagcctgcagggtttccttgggcgcggccccaaaattgccttcaaaacaaacccgggacggttgaaagccttcgaaccgtgcaggggatgcctcgggccctggcccttcgcttcctctcttgtgttatggaaataaaaacaaataaaactaca

SEQ ID NO: 357481 - DNA, 1010 bp, Homo sapiens
  misc_feature (29)..(29): n is a, c, g, or t
ggacgcgtgggtcggacgcgtgggtcganccacgcgtcgaccatgcttcccttgtcactgctgaagacggctcagaatcaccccatgttggtggagctgaaaaatggggagacgtacaatggacacctggtgagctgcgacaactggatgaacattaacctgcgagaagtcatctgcacgtccagggacggggacaagttctggcggatgcccgagtgctacatccgcggcagcaccatcaagtacctgcgcatccccgacgagatcatcgacatggtcaaggaggaggtggtggccaagggccgcggccgcggaggcctgcagcagcagaagcagcagaaaggccgcggcatgggcggcgctggccgaggtgtgtttggtggccggggccgaggtgggatcccgggcacaggcagaggccagccagagaagaagcctggcagacaggcgggcaaacagtgagcgcccacccagaccggctgctgcgccccctcctgccagggtggcgattccgctccacagtctcggacggatctgctcagaaaggaagaggcaggcgccagggggaacccccttcgtgttttgtgaccctcccttttaggtgaagcccctttttcttgctaaaaccggcaattctccggttagaaatgttacttggtgttttttggttttgtgaaacggccgtcccaaagctggctggattcctagaagagtctgtgttgaaggcatctttcaagccctcgctctggttctcagggcagcattttccaggcgggtttgttttgcatttcttggagcctctccgagcagcaaccagacgggagatttttattttaagctgttcatgctgggactgacagcctgcagggtttccttgggcgcggccccaaaattgccttcaaaacaaacccgggacggttgaaagccttcgaaccgtgcaggggatgcctcgggccctggcccttcgcttcctctcttgtgttatggaaataaaaacaaataaaactaca

SEQ ID NO: 357482 - DNA, 1247 bp, Homo sapiens
ggccccgccctactccgcgtggattggttgaccgcccttcgagcccggtgctgactggcttgcgtctctgccactttctttcagcttagtggcgcgcggcgcggcgacgaccgccgggagcgtgtgcagcggcggcggcggaagtggccggcgagcccggtccccgccggcaccatgcttcccttgtcactgctgaagacggctcagaatcaccccatgttggtggagctgaaaaatggggagacgtacaatggacacctggtgagctgcgacaactggatgaacattaacctgcgagaagtcatctgcacgtccagggtgaagaaccccaaccagagagagccccatcccaggctggagggagccccagtcagccactcctgagccaggcccacgggcagaggataggagccagtcttccttgacggggacaagttctggcggatgcccgagtgctacatccgcggcagcaccatcaagtacctgcgcatccccgacgagatcatcgacatggtcaaggaggaggtggtggccaagggccgcggccgcggaggcctgcagcagcagaagcagcagaaaggccgcggcatgggcggcgctggccgaggtgtgtttggtggccggggccgaggtgggatcccgggcacaggcagaggccagccagagaagaagcctggcagacaggcgggcaaacagtgagcgcccacccagaccggctgctgcgccccctcctgccagggtggcgattccgctccacagtctcggacggatctgctcagaaaggaagaggcaggcgccagggggaacccccttcgtgttttgtgaccctcccttttaggtgaagcccctttttcttgctaaaaccggcaattctccggttagaaatgttacttggtgttttttggttttgtgaaacggccgtcccaaagctggctggattcctagaagagtctgtgttgaaggcatctttcaagccctcgctctggttctcagggcagcattttccaggcgggtttgttttgcatttcttggagcctctccgagcagcaaccagacgggagatttttattttaagctgttcatgctgggactgacagcctgcagggtttccttgggcgcggccccaaaattgccttcaaaacaaacccgggacggttgaaagccttcgaaccgtgcaggggatgcctcgggccctggcccttcgcttcctctcttgtgttatggaaataaaaacaaataaaactaca

SEQ ID NO: 357483 - DNA, 965 bp, Homo sapiens
ggaagtgcggagccctcccgacatgctcctgtcactgctgaacggcaaatccccatgtggtggagctgaaatggggagacgtacaaggacatgtgagctgcgaactggatgaactactgagaagttctgcgcaggacgacggacggggacaagttctggcggatgcccgagtgctacatccgcggcagcaccatcaagtacctgcgcatccccgacgagatcatcgacatggtcaaggaggaggtggtggccaagggccgcggccgcggaggcctgcagcagcagaagcagcagaaaggccgcggcatgggcggcgctggccgaggtgtgtttggtggccggggccgaggtgggatcccgggcacaggcagaggccagccagagaagaagcctggcagacaggcgggcaaacagtgagcgcccacccagaccggctgctgcgccccctcctgccagggtggcgattccgctccacagtctcggacggatctgctcagaaaggaagaggcaggcgccagggggaacccccttcgtgttttgtgaccctcccttttaggtgaagcccctttttcttgctaaaaccggcaattctccggttagaaatgttacttggtgttttttggttttgtgaaacggccgtcccaaagctggctggattcctagaagagtctgtgttgaaggcatctttcaagccctcgctctggttctcagggcagcattttccaggcgggtttgttttgcatttcttggagcctctccgagcagcaaccagacgggagatttttattttaagctgttcatgctgggactgacagcctgcagggtttccttgggcgcggccccaaaattgccttcaaaacaaacccgggacggttgaaagccttcgaaccgtgcaggggatgcctcgggccctggcccttcgcttcctctcttgtgttatggaaataaaaacaaataaaactaca

SEQ ID NO: 357484 - DNA, 449 bp, Homo sapiens
catcccaggctggagggagccccagtcagccactcctgagccaggcccacgggcagaggataggagccagtcttccttgtgagtgcacaatgggggctgcgcctaccacacccacccttgctcctgggtgaaggattgcctggggtcaggacagatcctgcctgcagggtggaccctttgccacgtatgtcccgggactgatactgtgcagcttgcaggggtggtacggggtgcaggctgggcaggatctgcagggcctcccgcgctcccagggctgggccagacggcccggtggtaagttaataacctgctccccttctccgcagggacggggacaagttctggcggatgcccgagtgctacatccgcggcagcaccatcaagtacctgcgcatccccgacgagatcatcgacatggtcaaggaggaggtggtggccaagggccgcgg

SEQ ID NO: 357485 - DNA, 520 bp, Homo sapiens
  misc_feature (503)..(503): n is a, c, g, or t
ggccccgccctactccgcgtggattggttgaccgcccttcgagcccggtgctgactggcttgcgtctctgccactttctttcagcttagtggcgcgcggcgcggcgacgaccgccgggagcgtgtgcagcggcggcggcggaagtggccggcgagcccggtccccgccggcaccatgcttcccttgtcactgctgaagacggctcagaatcaccccatgttggtggagctgaaaaatggggagacgtacaatggacacctggtgagctgcgacaactggatgaacattaacctgcgagaagtcatctgcacgtccagggacggggacaagttctggcggatgcccgagtgctacatccgcggcagcaccatcaagtacctgcgcatccccgacgagatcatcgacatggtcaaggaggaggtggtggccaagggccgcgggaccccgtgaggccctggcaagtaagctcgagtccggctctggccccgttggttgggccggcncctttggccccgggtgg

SEQ ID NO: 357486 - DNA, 1225 bp, Homo sapiens
ggccccgccctactccgcgtggattggttgaccgcccttcgagcccggtgctgactggcttgcgtctctgccactttctttcagcttagtggcgcgcggcgcggcgacgaccgccgggagcgtgtgcagcggcggcggcggaagtggccggcgagcccggtccccgccggcaccatgcttcccttgtcactgctgaagacggctcagaatcaccccatgttggtggagctgaaaaatggggagacgtacaatggacacctggtgagctgcgacaactggatgaacattaacctgcgagaagtcatctgcacgtccagggacggggacaagttctggcggatgcccgagtgctacatccgcggcagcaccatcaagtacctgcgcatccccgacgagatcatcgacatggtcaaggaggaggtggtggccaagggccgcggccgcggaggcctgcagcagcagaagcagcagaaaggccgcggcatgggcggcgctggccgaggtgtgtttggtggccggggccgaggtgggatcccgggcacaggcagaggccagccagagaagaagcctggcagacaggcgggcaaacagtgagcgcccacccagaccggctgctgcgccccctcctgccagggtggcgattccgctccacagtctcggacggatctgctcagaaaggaagaggcaggcgccagggggaacccccttcgtgttttgtgaccctcccttttaggtgaagcccctttttcttgctaaaaccggcaattctccggttagaaatgttacttggtgttttttggttttgtgaaacggccgtcccaaagctggctggattcctagaagagtctgtgttgaaggcatctttcaagccctcgctctggttctcagggcagcattttccaggcgggtttgttttgcatttcttggagcctctccgagcagcaaccagacgggagatttttattttaagctgttcatgctgggactgacagccaggccgggtttgccactcctcgggcgcgcacctgagacactgagtcagcgctttcgagaaaggctccgggtagcatctgtggaccgtgaagaaaccagagggaagccctgagccaggcagcggcccgtccccctgcatagccttctcttcagggtcctcgttcggagacctattttgagaggtgattggaataaaaggtcccgtccgtgaggaactctttaaattgagtct

SEQ ID NO: 357487 - DNA, 1115 bp, Homo sapiens
cggcacgaggtggatcacttaatgtatgggatgtatttcagtcacggctgttattaaaatgttttattcagacagctttattgaggtataatcgacttacaataaatgtcacatgtctaaagtgtacaatgtgaaaaatttgacatatgtatacgtccatgaaaccatcatcacagccaagatcatggatatctacaccacaccccaaagcttgctcctccctgtcctttccgctctccctgcgacaactggatgaacattaacctgcgagaagtcatctgcacgtccagggacggggacaagttctggcggatgcccgagtgctacatccgcggcagcaccatcaagtacctgcgcatccccgacgagatcatcgacatggtcaaggaggaggtggtggccaagggccgcggccgcggaggcctgcagcagcagaagcagcagaaaggccgcggcatgggcggcgctggccgaggtgtgtttggtggccggggccgaggtgggatcccgggcacaggcagaggccagccagagaagaagcctggcagacaggcgggcaaacagtgagcgcccacccagaccggctgctgcgccccctcctgccagggtggcgattccgctccacagtctcggacggatctgctcagaaaggaagaggcaggcgccagggggaacccccttcgtgttttgtgaccctcccttttaggtgaagcccctttttcttgctaaaaccggcaattctccggttagaaatgttacttggtgttttttggttttgtgaaacggccgtcccaaagctggctggattcctagaagagtctgtgttgaaggcatctttcaagccctcgctctggttctcagggcagcattttccaggcgggtttgttttgcatttcttggagcctctccgagcagcaaccagacgggagatttttattttaagctgttcatgctgggactgacagcctgcagggtttccttgggcgcggccccaaaattgccttcaaaacaaacccgggacggttgaaagccttcgaaccgtgcaggggatgcctcgggccctggcccttcgcttcctctcttgtgttatggaaataaaaacaaataaaactaca

SEQ ID NO: 357488 - DNA, 916 bp, Homo sapiens
ttacgggggctatgtgcatactgatggcccctcggtgttatcggacgaggactggataacattaatctgcgagaagtatctgcacgtcagtggacggggacaagttctggcggatgcccgagtgctacatccgcggcagcaccatcaagtacctgcgcatccccgacgagatcatcgacatggtcaaggaggaggtggtggccaagggccgcggccgcggaggcctgcagcagcagaagcagcagaaaggccgcggcatgggcggcgctggccgaggtgtgtttggtggccggggccgaggtgggatcccgggcacaggcagaggccagccagagaagaagcctggcagacaggcgggcaaacagtgagcgcccacccagaccggctgctgcgccccctcctgccagggtggcgattccgctccacagtctcggacggatctgctcagaaaggaagaggcaggcgccagggggaacccccttcgtgttttgtgaccctcccttttaggtgaagcccctttttcttgctaaaaccggcaattctccggttagaaatgttacttggtgttttttggttttgtgaaacggccgtcccaaagctggctggattcctagaagagtctgtgttgaaggcatctttcaagccctcgctctggttctcagggcagcattttccaggcgggtttgttttgcatttcttggagcctctccgagcagcaaccagacgggagatttttattttaagctgttcatgctgggactgacagcctgcagggtttccttgggcgcggccccaaaattgccttcaaaacaaacccgggacggttgaaagccttcgaaccgtgcaggggatgcctcgggccctggcccttcgcttcctctcttgtgttatggaaataaaaacaaataaaactaca

SEQ ID NO: 357489 - DNA, 1002 bp, Homo sapiens
ggaggagtagctgggcttcggctgtgtctggtgcacagggaggcccccacccgctctgggctttgggctgcaggtgaagaaccccaaccagagagagccccatcccaggctggagggagccccagtcagccactcctgagccaggcccacgggcagaggataggagccagtcttccttgacggggacaagttctggcggatgcccgagtgctacatccgcggcagcaccatcaagtacctgcgcatccccgacgagatcatcgacatggtcaaggaggaggtggtggccaagggccgcggccgcggaggcctgcagcagcagaagcagcagaaaggccgcggcatgggcggcgctggccgaggtgtgtttggtggccggggccgaggtgggatcccgggcacaggcagaggccagccagagaagaagcctggcagacaggcgggcaaacagtgagcgcccacccagaccggctgctgcgccccctcctgccagggtggcgattccgctccacagtctcggacggatctgctcagaaaggaagaggcaggcgccagggggaacccccttcgtgttttgtgaccctcccttttaggtgaagcccctttttcttgctaaaaccggcaattctccggttagaaatgttacttggtgttttttggttttgtgaaacggccgtcccaaagctggctggattcctagaagagtctgtgttgaaggcatctttcaagccctcgctctggttctcagggcagcattttccaggcgggtttgttttgcatttcttggagcctctccgagcagcaaccagacgggagatttttattttaagctgttcatgctgggactgacagcctgcagggtttccttgggcgcggccccaaaattgccttcaaaacaaacccgggacggttgaaagccttcgaaccgtgcaggggatgcctcgggccctggcccttcgcttcctctcttgtgttatggaaataaaaacaaataaaactaca

SEQ ID NO: 357490 - DNA, 1744 bp, Homo sapiens
  misc_feature (1264)..(1264): n is a, c, g, or t
  misc_feature (1347)..(1347): n is a, c, g, or t
  misc_feature (1356)..(1356): n is a, c, g, or t
  misc_feature (1442)..(1442): n is a, c, g, or t
  misc_feature (1518)..(1518): n is a, c, g, or t
  misc_feature (1533)..(1533): n is a, c, g, or t
  misc_feature (1563)..(1563): n is a, c, g, or t
  misc_feature (1574)..(1574): n is a, c, g, or t
  misc_feature (1603)..(1603): n is a, c, g, or t
  misc_feature (1607)..(1607): n is a, c, g, or t
  misc_feature (1619)..(1619): n is a, c, g, or t
  misc_feature (1698)..(1698): n is a, c, g, or t
gcgcgggtccgcctggtatataagggccgaatggcccagccgactgcagggcgcgcaggcggcgcgggtgcgcggtgcggcgctggtatccagaggacgcggtcaccgcctctggcatttgtcgttctgcgcttctccgcaaggaccctctgttaggcaggcgcccaccgtaagcctcccgggccttgtgaacctgcaaacccaagtctgagagacgatccgccttcagcgctttccagcttggcagagaggctttcccggcggggatctttggttggcgctggcgatgcgcggggaagaaaggcgaggagcggcgtccaggctgggtgatgtcccagcacgagtaggcgggatgcgctcgcttggtcctccgggcgcccggtccctgcccgcgtcgcgcgcccacccctggggacgagaaggcggccgcctgaggacccccgcccgcgacctccgcgagtctggagcgcagaggacagggtctggctgctctttggccttggatggaaagtggggaattgggtggggggctgcggaccccttaacgtggattacttggtgtgtatcagctgggctcagaagacccacgacctcttctccatccgtggattgatttgttctgcttaacagctgggtcgccaagctggaggtatttttccctctccaccctggtcttctcctgtaacgtgtggccgccttttccagcacggcctcctgccttcctggtgcactttttggagaacgtggtggaatcagaggtttctggctgactcggtgggtgctttgaaccaggaaaggacaagaaagaggttggagtacagtggcatgatctcagctcactgcagcctcgacttcctgggctcaagaaatcctcctgtctctgccttccgagtagctgtgatcacagttgtatgccatcatgcccagaccagatttcgccatattgctcaggatggtcttgaactcctgggctcaagtgatccgcctgccttggcctcccagaatgccaggattacagatgtgagccactgtgcctggcctgaagtctagtaatttttaaaactttgcatgttattctgctcatgagccaagttcgggtgcctgtggaacagctatattcctcaaactagatatgcaccccagtccctggggattctgtcaaaaggcagattcacattcagcaggtctagggtggggggcctgacattcggcacgtctcacaagctcccaggcgatgctgatggtgctggtccctggacgcccncttgagtagtaaggaacaaaaggactctcccctgttcttttcagctacgtagcccagtggttctccacttaggcttcacactngaatcatcnagggagttttaaactatagtgatgcctggcggtgtcttactcgcagagcttctggtttgattggtctaggttgcagcctgggcaangagatttaaaaacttctcagatgggccaggcatggtggctcaagcctgtaatcccagcactttgggaggcagaggngggcggatcacgagntcaggagatcgagaccatcctggctagcanggcgaaacccngtctctactaaaaatacaaaaaattagcngggngtggtggcgtgngcctgtggtcccagctgctcgggaggctgaggcagaagaatggcctgaacccgggaggcggagcttgcagacagccgancgtgccactgcactccagcctgggcgacagagcgagactccgtctc

SEQ ID NO: 357491 - DNA, 734 bp, Homo sapiens
gcgcgggtccgcctggtatataagggccgaatggcccagccgactgcagggcgcgcaggcggcgcgggtgcgcggtgcggcgctggtatccagaggacgcggtcaccgcctctggcatttgtcgttctgcgcttctccgcaaggaccctctgttaggcaggcgcccaccgtaagcctcccgggccttgtgaacctgcaaacccaagtctgagagacgatccgccttcagcgctttccagcttggcagagaggctttcccggcggggatctttggttggcgctggcgatgcgcggggaagaaaggcgaggagcggcgtccaggctgggtgatgtcccagcacgagtaggcgggatgcgctcgcttggtcctccgggcgcccggtccctgcccgcgtcgcgcgcccacccctggggacgagaaggcggccgcctgaggacccccgcccgcgacctccgcgagtctggagcgcagaggacagggtctggctgctctttggccttggatggaaagtggggaattgggtggggggctgcggaccccttaacgtggattacttggtgtgtatcagctgggctcagaagacccacgacctcttctccatccgtggattgatttgttctgcttaacagctgggtcgccaagctggaggtaagtttccctgcggttcggggaagggatctgatttactttcttttctttctttccttttttcctccgcgtcgtttttcgaagg

SEQ ID NO: 357492 - DNA, 435 bp, Homo sapiens
  misc_feature (35)..(35): n is a, c, g, or t
gcaagaaggggtccttgcatagtgcagggaagagnaaagttttgtctgcaacgactctcttaatttccaccgctacacacccatgcaggagacctctccaggtacacatatttcctgctactgaatggcttagactgggatttgcaaggaactacgaagtccaagacctttgcctttcttttagaagaaggcaccagctggttctccaatgttgaaggtcttctccagagatgaactctgaaagccacatgttgagatggccccattacaggatggagagcacctgaacccccaagttatggactagaagaagacagttgccctggaaaatcatctgacccacattggactttatgtgagggggaaataaacctttattatgttaagctacacaataataaataacaacaataattgtgtttatttgttacctca

SEQ ID NO: 357493 - DNA, 661 bp, Homo sapiens
agcattctcagggccttctgccaagggcccgctttgatctcccttaaaggacagcattatctgaccagagacccatgcaggagacctctccaggtacacatatttcctgctactgaatggcttagactgggatttgcaaggaactacgaagtccaagacctttgcctttcttttagaagaaggcaccagctggttctccaatgttgaaggtcttctccagagatgggcatgcagaaggagtgaaaaaacaagaaggaagacaaggaagacattgttttggctgctgacatttcctgaaagatctgaggcgtccccttcacttcgggcatgggacccagacggctgagtgatggaccttaaggtgtggggagattacaacttgctcaaggtctcatagctagaagatgtcagagtgataactcaaaccatgtcacatgactctaagcccaaagcagcctctagaaggttgtttgatcttctgatggaagcacaaatcaccattccaacatgaaagatggagaaacttaagtctagagagatttaaaggacttgtcaaaggcaatgaaacaagtgatgaggaaactgaggcccagagaggataaatgacttgctcaaggttagccagttggtcaatggcaaagattaaaccagaacccagatc

SEQ ID NO: 357494 - DNA, 531 bp, Homo sapiens
gtccctgcagcgggctccatctccaggcctcccacttcaccctgggacattatggtcgctggtcagacctcatgactcacttggactcttgagccacctctgggggtggagtctctctcctggcatctggacccttggtgctatcgacgaagcttggctggcgctcttagctgctatgtgcaagacgtgtgtcccagggaaagcccctctctctctgcagaggtcaagtgaaagccacggccgcagccaacagagttcaaaatgcaggcttggaaagtccagggggctctgtggaggagattagtcctgagagactgacaccagagccacctgacgaatgtgggtgctcagagccttggactcgatgacctacctctcctgcctcccacctgactcctgaagtaggggagtgtattaacagtcacaggcctcagtttacctgctttcagcctctgcccttcccgagagggttgaagctgacttgctgcatcgcagttttgtcctttagttcatcagctctggaactttcca

SEQ ID NO: 357495 - DNA, 2317 bp, Homo sapiens
gcgcgggtccgcctggtatataagggccgaatggcccagccgactgcagggcgcgcaggcggcgcgggtgcgcggtgcggcgctggtatccagaggacgcggtcaccgcctctggcatttgtcgttctgcgcttctccgcaaggaccctctgttaggcaggcgcccaccgtaagcctcccgggccttgtgaacctgcaaacccaagtctgagagacgatccgccttcagcgctttccagcttggcagagaggctttcccggcggggatctttggttggcgctggcgatgcgcggggaagaaaggcgaggagcggcgtccaggctgggtgatgtcccagcacgagtaggcgggatgcgctcgcttggtcctccgggcgcccggtccctgcccgcgtcgcgcgcccacccctggggacgagaaggcggccgcctgaggacccccgcccgcgacctccgcgagtctggagcgcagaggacagggtctggctgctctttggccttggatggaaagtggggaattgggtggggggctgcggaccccttaacgtggattacttggtgtgtatcagctgggctcagaagacccacgacctcttctccatccgtggattgatttgttctgcttaacagctgggtcgccaagctggaggtatttttccctctccaccctggtcttctcctgtaacgtgtggccgccttttccagcacggcctcctgccttcctggtgcactttttggagaacgtggtggaatcagaggtttctggctgactcggtgggtgctttgaaccaggaaaggacaagaaagaggatgggaaggactgatccacattcccaccaggaagtttagcagaacccccgcgtgccacctggaccccttggaaggacctggctcaggctggaccacctcttgagaggcaggagctctggatttgatcaagaattctttgctgagcatggtgcctcatgcctataatcccaacactttgggaggccagtgtgggaggatctcttgagcccaggagttcaagactagcctgggcaacacagagagaccccatctctaaaataataataataataaaataaaaaattagcagggcatggtggcatgtgcctgtagtcccagctacccaggaggctgaggcaagaggatggctggagcctgggatgttgaggctgcaatgaactgtgattaccccactgcactccagcctgggcaaaagagcgagagaccctgtctcaaataataataataataataatcttattttggagaataaagagacctctggatttgaggtgccatttgggtagaaagaaaagacgtttacaccgagaaatagtctgtgttgccctgaaggagcagagggatgcatcgctggaggtgacctacagttgaagaagactcattatgacagaccttgtccttcttccttgtggaaagtgtttcctctgctgctactgctcatgagactcttccccctccctgtcccagggaaccaaagggctttctaccacaccctttcttgccccccgcctcccatgtctgctgtgcctttgtactcagcaattcttgtttgctccattatcttccagccggatacagagtgaatagttaaccacacttaggtcaaataggatctaaatttttgttcctgctccgtgtaaagaggccagtgtttgtgtgttgcaagcagccttggaatagtaactcttctcatttgtttgggatctggccaccaagttccagaatgatacacggatcagtgcagaagttcatcaggctctcggaccttagggctgttggagaaggcttcagcagcagaactgatggtgaaggctcgtgttctccatcctcaactttctttgcttcgatcatacacaagaatacatttggaagggcaaaaaatgaacactgtcgttcattgcagccgtgttttgtgacacagatgcacagtctgctgtgaagaccttctctcaagtggcatttgggagtccatgccagatcatggtgcttcatgagagactgacagctatcaggggttgtggcacttagtgaggactctcctcccccagtgtgtgctgatgacacatacacacctgacaatagcttgagtcttctctgttccttttactctgtagccaacatacacatgatttaaaaccctttctaaatatctatcatggttcatccttgtccaaatgcagagtcagagctatttgtacttcattattatttccaaggcgaatagttggctttctttttgcaaaaataattaaagtttttgtatgttgcagttgcaatgattgaatga

SEQ ID NO: 357496 - DNA, 2309 bp, Homo sapiens
tatatagactcatgtataaatagatacttgtaatatacgagcatctgctctgtggaagatgtttttttccaggcccagaagtgtaagatccggtgcctatcttcaggcgggtggcaaacaaacatcacataaaggagagtgtctggcttgtgtcttctgggttcgtgatccccctgacttcagtgtgagaatgtggccagagcgtctggggaagacagggagagttgtcagagaggagttttgaggaggccctgaaggctcgccggctgttaaggcctgagctgtagtgggcaagaagagatggccagttcaggtagaggaagcctgctttgagctgaagaccggaggtgaatctggacagggcttcccaggaccagtatttttccctctccaccctggtcttctcctgtaacgtgtggccgccttttccagcacggcctcctgccttcctggtgcactttttggagaacgtggtggaatcagaggtttctggctgactcggtgggtgctttgaaccaggaaaggacaagaaagaggtgccacctcctgagtcctggttcctgcggctccgtcgaatctgcagtgaaggcctttgggaagcgtgggttatgtgggtccaggggtcccatcctcccgtggaggcccttgacctgaggatcactaactcacaccccaccgacttccggcccccaacaagggcagtgttcctcttgctccattctgctctgaagtcccccaaaccgcttcctggggctgcttagtgaaatacaaggctcatctctgaggacctctacagggctggatgggaaggactgatccacattcccaccaggaagtttagcagaacccccgcgtgccacctggaccccttggaaggacctggctcaggctggaccacctcttgagaggcaggagctctggatttgatcaagaattctttgctgagcatggtgcctcatgcctataatcccaacactttgggaggccagtgtgggaggatctcttgagcccaggagttcaagactagcctgggcaacacagagagaccccatctctaaaataataataataataaaataaaaaattagcagggcatggtggcatgtgcctgtagtcccagctacccaggaggctgaggcaagaggatggctggagcctgggatgttgaggctgcaatgaactgtgattaccccactgcactccagcctgggcaaaagagcgagagaccctgtctcaaataataataataataataatcttattttggagaataaagagacctctggatttgaggtgccatttgggtagaaagaaaagacgtttacaccgagaaatagtctgtgttgccctgaaggagcagagggatgcatcgctggaggtgacctacagttgaagaagactcattatgacagaccttgtccttcttccttgtggaaagtgtttcctctgctgctactgctcatgagactcttccccctccctgtcccagggaaccaaagggctttctaccacaccctttcttgccccccgcctcccatgtctgctgtgcctttgtactcagcaattcttgtttgctccattatcttccagccggatacagagtgaatagttaaccacacttaggtcaaataggatctaaatttttgttcctgctccgtgtaaagaggccagtgtttgtgtgttgcaagcagccttggaatagtaactcttctcatttgtttgggatctggccaccaagttccagaatgatacacggatcagtgcagaagttcatcaggctctcggaccttagggctgttggagaaggcttcagcagcagaactgatggtgaaggctcgtgttctccatcctcaactttctttgcttcgatcatacacaagaatacatttggaagggcaaaaaatgaacactgtcgttcattgcagccgtgttttgtgacacagatgcacagtctgctgtgaagaccttctctcaagtggcatttgggagtccatgccagatcatggtgcttcatgagagactgacagctatcaggggttgtggcacttagtgaggactctcctcccccagtgtgtgctgatgacacatacacacctgacaatagcttgagtcttctctgttccttttactctgtagccaacatacacatgatttaaaaccctttctaaatatctatcatggttcatccttgtccaaatgcagagtcagagctatttgtacttcattattatttccaaggcgaatagttggctttctttttgcaaaaataattaaagtttttgtatgttgcagttgcaatgattgaatga

SEQ ID NO: 357497 - DNA, 1804 bp, Homo sapiens
gtccctgcagcgggctccatctccaggcctcccacttcaccctgggacattatggtcgctggtcagacctcatgactcacttggactcttgagccacctctgggggtggagtctctctcctggcatctggacccttggtgctatcgacgaagcttggctggcgctcttagctgctatgtgcaagacgtgtgtcccagggaaagcccctctctctctgcagaggtcaagtgaaagccacggccgcagccaacagagttcaaaatgcaggcttggaaagtccagggggctctgtggaggatgggaaggactgatccacattcccaccaggaagtttagcagaacccccgcgtgccacctggaccccttggaaggacctggctcaggctggaccacctcttgagaggcaggagctctggatttgatcaagaattctttgctgagcatggtgcctcatgcctataatcccaacactttgggaggccagtgtgggaggatctcttgagcccaggagttcaagactagcctgggcaacacagagagaccccatctctaaaataataataataataaaataaaaaattagcagggcatggtggcatgtgcctgtagtcccagctacccaggaggctgaggcaagaggatggctggagcctgggatgttgaggctgcaatgaactgtgattaccccactgcactccagcctgggcaaaagagcgagagaccctgtctcaaataataataataataataatcttattttggagaataaagagacctctggatttgaggtgccatttgggtagaaagaaaagacgtttacaccgagaaatagtctgtgttgccctgaaggagcagagggatgcatcgctggaggtgacctacagttgaagaagactcattatgacagaccttgtccttcttccttgtggaaagtgtttcctctgctgctactgctcatgagactcttccccctccctgtcccagggaaccaaagggctttctaccacaccctttcttgccccccgcctcccatgtctgctgtgcctttgtactcagcaattcttgtttgctccattatcttccagccggatacagagtgaatagttaaccacacttaggtcaaataggatctaaatttttgttcctgctccgtgtaaagaggccagtgtttgtgtgttgcaagcagccttggaatagtaactcttctcatttgtttgggatctggccaccaagttccagaatgatacacggatcagtgcagaagttcatcaggctctcggaccttagggctgttggagaaggcttcagcagcagaactgatggtgaaggctcgtgttctccatcctcaactttctttgcttcgatcatacacaagaatacatttggaagggcaaaaaatgaacactgtcgttcattgcagccgtgttttgtgacacagatgcacagtctgctgtgaagaccttctctcaagtggcatttgggagtccatgccagatcatggtgcttcatgagagactgacagctatcaggggttgtggcacttagtgaggactctcctcccccagtgtgtgctgatgacacatacacacctgacaatagcttgagtcttctctgttccttttactctgtagccaacatacacatgatttaaaaccctttctaaatatctatcatggttcatccttgtccaaatgcagagtcagagctatttgtacttcattattatttccaaggcgaatagttggctttctttttgcaaaaataattaaagtttttgtatgttgcagttgcaatgattgaatga

SEQ ID NO: 357498 - DNA, 1826 bp, Homo sapiens
gaccccaaatgcagaggagccccttgaactcttagttgctggtggctccccaggtgccacctcctgagtcctggttcctgcggctccgtcgaatctgcagtgaaggcctttgggaagcgtgggttatgtgggtccaggggtcccatcctcccgtggaggcccttgacctgaggatcactaactcacaccccaccgacttccggcccccaacaagggcagtgttcctcttgctccattctgctctgaagtcccccaaaccgcttcctggggctgcttagtgaaatacaaggctcatctctgaggacctctacagggctggatgggaaggactgatccacattcccaccaggaagtttagcagaacccccgcgtgccacctggaccccttggaaggacctggctcaggctggaccacctcttgagaggcaggagctctggatttgatcaagaattctttgctgagcatggtgcctcatgcctataatcccaacactttgggaggccagtgtgggaggatctcttgagcccaggagttcaagactagcctgggcaacacagagagaccccatctctaaaataataataataataaaataaaaaattagcagggcatggtggcatgtgcctgtagtcccagctacccaggaggctgaggcaagaggatggctggagcctgggatgttgaggctgcaatgaactgtgattaccccactgcactccagcctgggcaaaagagcgagagaccctgtctcaaataataataataataataatcttattttggagaataaagagacctctggatttgaggtgccatttgggtagaaagaaaagacgtttacaccgagaaatagtctgtgttgccctgaaggagcagagggatgcatcgctggaggtgacctacagttgaagaagactcattatgacagaccttgtccttcttccttgtggaaagtgtttcctctgctgctactgctcatgagactcttccccctccctgtcccagggaaccaaagggctttctaccacaccctttcttgccccccgcctcccatgtctgctgtgcctttgtactcagcaattcttgtttgctccattatcttccagccggatacagagtgaatagttaaccacacttaggtcaaataggatctaaatttttgttcctgctccgtgtaaagaggccagtgtttgtgtgttgcaagcagccttggaatagtaactcttctcatttgtttgggatctggccaccaagttccagaatgatacacggatcagtgcagaagttcatcaggctctcggaccttagggctgttggagaaggcttcagcagcagaactgatggtgaaggctcgtgttctccatcctcaactttctttgcttcgatcatacacaagaatacatttggaagggcaaaaaatgaacactgtcgttcattgcagccgtgttttgtgacacagatgcacagtctgctgtgaagaccttctctcaagtggcatttgggagtccatgccagatcatggtgcttcatgagagactgacagctatcaggggttgtggcacttagtgaggactctcctcccccagtgtgtgctgatgacacatacacacctgacaatagcttgagtcttctctgttccttttactctgtagccaacatacacatgatttaaaaccctttctaaatatctatcatggttcatccttgtccaaatgcagagtcagagctatttgtacttcattattatttccaaggcgaatagttggctttctttttgcaaaaataattaaagtttttgtatgttgcagttgcaatgattgaatga

SEQ ID NO: 357499 - DNA, 1073 bp, Homo sapiens
gcgcgggtccgcctggtatataagggccgaatggcccagccgactgcagggcgcgcaggcggcgcgggtgcgcggtgcggcgctggtatccagaggacgcggtcaccgcctctggcatttgtcgttctgcgcttctccgcaaggaccctctgttaggcaggcgcccaccgtaagcctcccgggccttgtgaacctgcaaacccaagtctgagagacgatccgccttcagcgctttccagcttggcagagaggctttcccggcggggatctttggttggcgctggcgatgcgcggggaagaaaggcgaggagcggcgtccaggctgggtgatgtcccagcacgagtaggcgggatgcgctcgcttggtcctccgggcgcccggtccctgcccgcgtcgcgcgcccacccctggggacgagaaggcggccgcctgaggacccccgcccgcgacctccgcgagtctggagcgcagaggacagggtctggctgctctttggccttggatggaaagtggggaattgggtggggggctgcggaccccttaacgtggattacttggtgtgtatcagctgggctcagaagacccacgacctcttctccatccgtggattgatttgttctgcttaacagctgggtcgccaagctggaggtatttttccctctccaccctggtcttctcctgtaacgtgtggccgccttttccagcacggcctcctgccttcctggtgcactttttggagaacgtggtggaatcagaggtttctggctgactcggtgggtgctttgaaccaggaaaggacaagaaagaggtgagttgcacttggcagttatagtacagctgcctgcctgtggctcttcttgctttgaggtttgctccttcttcagtgcaaccctttgcccagacatccctaatgcccccagctcagagcagcagttggcaggcaggagctttgcagttagccatcggagagccccacagacaggggttaataagtacaaacagtcatcacaattaattcaggccaggctgtgtgctcctggcttttagttgaatcaactcattttcacctctc

SEQ ID NO: 357500 - DNA, 655 bp, Homo sapiens
  misc_feature (35)..(35): n is a, c, g, or t
gcaagaaggggtccttgcatagtgcagggaagagnaaagttttgtctgcaacgactctcttaatttccaccgctacacacccatgcaggagacctctccaggtacacatatttcctgctactgaatggcttagactgggatttgcaaggaactacgaagtccaagacctttgcctttcttttagaagaaggcaccagctggttctccaatgttgaaggtcttctccagagataccttaaggtgtggggagattacaacttgctcaaggtctcatagctagaagatgtcagagtgataactcaaaccatgtcacatgactctaagcccaaagcagcctctagaaggttgtttgatcttctgatggaagcacaaatcaccattccaacatgaaagatggagaaacttaagtctagagagatttaaaggacttgtcaaaggcaatgaaacaagtggaactctgaaagccacatgttgagatggccccattacaggatggagagcacctgaacccccaagttatggactagaagaagacagttgccctggaaaatcatctgacccacattggactttatgtgagggggaaataaacctttattatgttaagctacacaataataaataacaacaataattgtgtttatttgttacctca

SEQ ID NO: 357501 - DNA, 550 bp, Homo sapiens
tggcatctggacccttggtgctatcgacgaagcttggctggcgctcttagctgctatgtgcaagacgtgtgtcccagggaaagcccctctctctctgcagaggtcaagtgaaagccacggccgcagccaacagagttcaaaatgcaggcttggaaagtccagggggctctgtggaggtgagacagccacaggctgagctttctgagcccttggggtgagtttggctgtgatacctgagagatgggggaactaacaagcgccgggttgcagtgtcgtcccatgcagaggagcgagcagagttcacccaaaaggccaacggctggcagggtgtcacgtttcccaccacacccggggctcagcctctgctgtcatttctcctccttggttttcatcttctaagggaagaaatagtgtcatcttttctcaacctgtcagtctcacacctgcctggagcccctggcagtgagacacccagtgctgtttaatctgatgtcatctctgttgattgtctgttttagaaaccaggtagcaagagggactttctgaggat

SEQ ID NO: 357502 - DNA, 915 bp, Homo sapiens
gcgcgggtccgcctggtatataagggccgaatggcccagccgactgcagggcgcgcaggcggcgcgggtgcgcggtgcggcgctggtatccagaggacgcggtcaccgcctctggcatttgtcgttctgcgcttctccgcaaggaccctctgttaggcaggcgcccaccgtaagcctcccgggccttgtgaacctgcaaacccaagtctgagagacgatccgccttcagcgctttccagcttggcagagaggctttcccggcggggatctttggttggcgctggcgatgcgcggggaagaaaggcgaggagcggcgtccaggctgggtgatgtcccagcacgagtaggcgggatgcgctcgcttggtcctccgggcgcccggtccctgcccgcgtcgcgcgcccacccctggggacgagaaggcggccgcctgaggacccccgcccgcgacctccgcgagtctggagcgcagaggacagggtctggctgctctttggccttggatggaaagtggggaattgggtggggggctgcggaccccttaacgtggattacttggtgtgtatcagctgggctcagaagacccacgacctcttctccatccgtggattgatttgttctgcttaacagctgggtcgccaagctggaggtggaatcagaggtttctggctgactcggtgggtgctttgaaccaggaaaggacaagaaagaggaactctgaaagccacatgttgagatggccccattacaggatggagagcacctgaacccccaagttatggactagaagaagacagttgccctggaaaatcatctgacccacattggactttatgtgagggggaaataaacctttattatgttaagctacacaataataaataacaacaataattgtgtttatttgttacctca

SEQ ID NO: 357503 - DNA, 482 bp, Homo sapiens
  misc_feature (18)..(18): n is a, c, g, or t
cactcctgttctagcacncagttcaagtgcaacagcgggcgttgcatccccgagcactggacctgcgatggggacaatgactgcggagactacagtgatgagaagagctgtgagggagtgacccacgtctgcgatcccagtgtcaagtttggctgcaaggactcagctcggtgcatcagcaaagcgtgggtgtgtgatggctatcaggggttgtggcacttagtgaggactctcctcccccagtgtgtgctgatgacacatacacacctgacaatagcttgagtcttctctgttccttttactctgtagccaacatacacatgatttaaaaccctttctaaatatctatcatggttcatccttgtccaaatgcagagtcagagctatttgtacttcattattatttccaaggcgaatagttggctttctttttgcaaaaataattaaagtttttgtatgttgcagttgcaatgattgaatga

SEQ ID NO: 357504 - DNA, 2582 bp, Homo sapiens
gcgcgggtccgcctggtatataagggccgaatggcccagccgactgcagggcgcgcaggcggcgcgggtgcgcggtgcggcgctggtatccagaggacgcggtcaccgcctctggcatttgtcgttctgcgcttctccgcaaggaccctctgttaggcaggcgcccaccgtaagcctcccgggccttgtgaacctgcaaacccaagtctgagagacgatccgccttcagcgctttccagcttggcagagaggctttcccggcggggatctttggttggcgctggcgatgcgcggggaagaaaggcgaggagcggcgtccaggctgggtgatgtcccagcacgagtaggcgggatgcgctcgcttggtcctccgggcgcccggtccctgcccgcgtcgcgcgcccacccctggggacgagaaggcggccgcctgaggacccccgcccgcgacctccgcgagtctggagcgcagaggacagggtctggctgctctttggccttggatggaaagtggggaattgggtggggggctgcggaccccttaacgtggattacttggtgtgtatcagctgggctcagaagacccacgacctcttctccatccgtggattgatttgttctgcttaacagctgggtcgccaagctggaggtatttttccctctccaccctggtcttctcctgtaacgtgtggccgccttttccagcacggcctcctgccttcctggtgcactttttggagaacgtggtggaatcagaggtttctggctgactcggtgggtgctttgaaccaggaaaggacaagaaagaggtgccacctcctgagtcctggttcctgcggctccgtcgaatctgcagtgaaggcctttgggaagcgtgggttatgtgggtccaggggtcccatcctcccgtggaggcccttgacctgaggatcactaactcacaccccaccgacttccggcccccaacaagggcagtgttcctcttgctccattctgctctgaagtcccccaaaccgcttcctggggctgcttagtgaaatacaaggctcatctctgaggacctctacagggctggatgggaaggactgatccacattcccaccaggaagtttagcagaacccccgcgtgccacctggaccccttggaaggacctggctcaggctggaccacctcttgagaggcaggagctctggatttgatcaagaattctttgctgagcatggtgcctcatgcctataatcccaacactttgggaggccagtgtgggaggatctcttgagcccaggagttcaagactagcctgggcaacacagagagaccccatctctaaaataataataataataaaataaaaaattagcagggcatggtggcatgtgcctgtagtcccagctacccaggaggctgaggcaagaggatggctggagcctgggatgttgaggctgcaatgaactgtgattaccccactgcactccagcctgggcaaaagagcgagagaccctgtctcaaataataataataataataatcttattttggagaataaagagacctctggatttgaggtgccatttgggtagaaagaaaagacgtttacaccgagaaatagtctgtgttgccctgaaggagcagagggatgcatcgctggaggtgacctacagttgaagaagactcattatgacagaccttgtccttcttccttgtggaaagtgtttcctctgctgctactgctcatgagactcttccccctccctgtcccagggaaccaaagggctttctaccacaccctttcttgccccccgcctcccatgtctgctgtgcctttgtactcagcaattcttgtttgctccattatcttccagccggatacagagtgaatagttaaccacacttaggtcaaataggatctaaatttttgttcctgctccgtgtaaagaggccagtgtttgtgtgttgcaagcagccttggaatagtaactcttctcatttgtttgggatctggccaccaagttccagaatgatacacggatcagtgcagaagttcatcaggctctcggaccttagggctgttggagaaggcttcagcagcagaactgatggtgaaggctcgtgttctccatcctcaactttctttgcttcgatcatacacaagaatacatttggaagggcaaaaaatgaacactgtcgttcattgcagccgtgttttgtgacacagatgcacagtctgctgtgaagaccttctctcaagtggcatttgggagtccatgccagatcatggtgcttcatgagagactgacagctatcaggggttgtggcacttagtgaggactctcctcccccagtgtgtgctgatgacacatacacacctgacaatagcttgagtcttctctgttccttttactctgtagccaacatacacatgatttaaaaccctttctaaatatctatcatggttcatccttgtccaaatgcagagtcagagctatttgtacttcattattatttccaaggcgaatagttggctttctttttgcaaaaataattaaagtttttgtatgttgcagttgcaatgattgaatga

SEQ ID NO: 357505 - DNA, 2220 bp, Homo sapiens
gcgcgggtccgcctggtatataagggccgaatggcccagccgactgcagggcgcgcaggcggcgcgggtgcgcggtgcggcgctggtatccagaggacgcggtcaccgcctctggcatttgtcgttctgcgcttctccgcaaggaccctctgttaggcaggcgcccaccgtaagcctcccgggccttgtgaacctgcaaacccaagtctgagagacgatccgccttcagcgctttccagcttggcagagaggctttcccggcggggatctttggttggcgctggcgatgcgcggggaagaaaggcgaggagcggcgtccaggctgggtgatgtcccagcacgagtaggcgggatgcgctcgcttggtcctccgggcgcccggtccctgcccgcgtcgcgcgcccacccctggggacgagaaggcggccgcctgaggacccccgcccgcgacctccgcgagtctggagcgcagaggacagggtctggctgctctttggccttggatggaaagtggggaattgggtggggggctgcggaccccttaacgtggattacttggtgtgtatcagctgggctcagaagacccacgacctcttctccatccgtggattgatttgttctgcttaacagctgggtcgccaagctggaggtggaatcagaggtttctggctgactcggtgggtgctttgaaccaggaaaggacaagaaagaggatgggaaggactgatccacattcccaccaggaagtttagcagaacccccgcgtgccacctggaccccttggaaggacctggctcaggctggaccacctcttgagaggcaggagctctggatttgatcaagaattctttgctgagcatggtgcctcatgcctataatcccaacactttgggaggccagtgtgggaggatctcttgagcccaggagttcaagactagcctgggcaacacagagagaccccatctctaaaataataataataataaaataaaaaattagcagggcatggtggcatgtgcctgtagtcccagctacccaggaggctgaggcaagaggatggctggagcctgggatgttgaggctgcaatgaactgtgattaccccactgcactccagcctgggcaaaagagcgagagaccctgtctcaaataataataataataataatcttattttggagaataaagagacctctggatttgaggtgccatttgggtagaaagaaaagacgtttacaccgagaaatagtctgtgttgccctgaaggagcagagggatgcatcgctggaggtgacctacagttgaagaagactcattatgacagaccttgtccttcttccttgtggaaagtgtttcctctgctgctactgctcatgagactcttccccctccctgtcccagggaaccaaagggctttctaccacaccctttcttgccccccgcctcccatgtctgctgtgcctttgtactcagcaattcttgtttgctccattatcttccagccggatacagagtgaatagttaaccacacttaggtcaaataggatctaaatttttgttcctgctccgtgtaaagaggccagtgtttgtgtgttgcaagcagccttggaatagtaactcttctcatttgtttgggatctggccaccaagttccagaatgatacacggatcagtgcagaagttcatcaggctctcggaccttagggctgttggagaaggcttcagcagcagaactgatggtgaaggctcgtgttctccatcctcaactttctttgcttcgatcatacacaagaatacatttggaagggcaaaaaatgaacactgtcgttcattgcagccgtgttttgtgacacagatgcacagtctgctgtgaagaccttctctcaagtggcatttgggagtccatgccagatcatggtgcttcatgagagactgacagctatcaggggttgtggcacttagtgaggactctcctcccccagtgtgtgctgatgacacatacacacctgacaatagcttgagtcttctctgttccttttactctgtagccaacatacacatgatttaaaaccctttctaaatatctatcatggttcatccttgtccaaatgcagagtcagagctatttgtacttcattattatttccaaggcgaatagttggctttctttttgcaaaaataattaaagtttttgtatgttgcagttgcaatgattgaatga

SEQ ID NO: 357506 - DNA, 1713 bp, Homo sapiens
gcgcgggtccgcctggtatataagggccgaatggcccagccgactgcagggcgcgcaggcggcgcgggtgcgcggtgcggcgctggtatccagaggacgcggtcaccgcctctggcatttgtcgttctgcgcttctccgcaaggaccctctgttaggcaggcgcccaccgtaagcctcccgggccttgtgaacctgcaaacccaagtctgagagacgatccgccttcagcgctttccagcttggcagagaggctttcccggcggggatctttggttggcgctggcgatgcgcggggaagaaaggcgaggagcggcgtccaggctgggtgatgtcccagcacgagtaggcgggatgcgctcgcttggtcctccgggcgcccggtccctgcccgcgtcgcgcgcccacccctggggacgagaaggcggccgcctgaggacccccgcccgcgacctccgcgagtctggagcgcagaggacagggtctggctgctctttggccttggatggaaagtggggaattgggtggggggctgcggaccccttaacgtggattacttggtgtgtatcagctgggctcagaagacccacgacctcttctccatccgtggattgatttgttctgcttaacagctgggtcgccaagctggaggtatttttccctctccaccctggtcttctcctgtaacgtgtggccgccttttccagcacggcctcctgccttcctggtgcactttttggagaacgtggtggaatcagaggtttctggctgactcggtgggtgctttgaaccaggaaaggacaagaaagaggttggagtacagtggcatgatctcagctcactgcagcctcgacttcctgggctcaagaaatcctcctgtctctgccttccgagtagctgtgatcacagttgtatgccatcatgcccagaccagatttcgccatattgctcaggatggtcttgaactcctgggctcaagtgatccgcctgccttggcctcccagaatgccaggattacagataaacagcttgatggattgctgaggcagagtgcaccgagcaagggttcagtcctccatagagctcagagcaaaaggaatgacccagccgggatgaacttgaacctatggccacctagctctggtttctgcttggacattttatttcaatcttatggcctgccttgcgctccaagggttacttatttcctctgcacatattttattttgatgccaaaatttcagatctgttttcttaagagcagaaggtcttgacctcaaagcccgggccatcacacagctctctgtggagtggggtgagggaggccagctgccggtcaccttctgctccagcaccgtgggaggcctgagtggcaaagctccagccccgctgctcccgggcggtgtccgcaacaagaggcttccgccccatcccaccagccatccacggagacgccctccccagaggtcaggagggtagcgggggaaggaaatgccaatcaatccatcaaagccccgccctcccggggctcctaggccccgggagctgcgtctgcgcatccttgacccactcctgggggccaggagctgggcgagccggggaagtgcatttggtaatgattctcgatttcctgtttggtttctgtccagggggctttgggataggctaactcgtattatatgtgtacacatgcacatttcattcctccttgtctg

SEQ ID NO: 357507 - DNA, 1012 bp, Homo sapiens
gcgcgggtccgcctggtatataagggccgaatggcccagccgactgcagggcgcgcaggcggcgcgggtgcgcggtgcggcgctggtatccagaggacgcggtcaccgcctctggcatttgtcgttctgcgcttctccgcaaggaccctctgttaggcaggcgcccaccgtaagcctcccgggccttgtgaacctgcaaacccaagtctgagagacgatccgccttcagcgctttccagcttggcagagaggctttcccggcggggatctttggttggcgctggcgatgcgcggggaagaaaggcgaggagcggcgtccaggctgggtgatgtcccagcacgagtaggcgggatgcgctcgcttggtcctccgggcgcccggtccctgcccgcgtcgcgcgcccacccctggggacgagaaggcggccgcctgaggacccccgcccgcgacctccgcgagtctggagcgcagaggacagggtctggctgctctttggccttggatggaaagtggggaattgggtggggggctgcggaccccttaacgtggattacttggtgtgtatcagctgggctcagaagacccacgacctcttctccatccgtggattgatttgttctgcttaacagctgggtcgccaagctggaggtatttttccctctccaccctggtcttctcctgtaacgtgtggccgccttttccagcacggcctcctgccttcctggtgcactttttggagaacgtggtggaatcagaggtttctggctgactcggtgggtgctttgaaccaggaaaggacaagaaagaggaactctgaaagccacatgttgagatggccccattacaggatggagagcacctgaacccccaagttatggactagaagaagacagttgccctggaaaatcatctgacccacattggactttatgtgagggggaaataaacctttattatgttaagctacacaataataaataacaacaataattgtgtttatttgttacctca

SEQ ID NO: 357508 - DNA, 896 bp, Homo sapiens
gcgcgggtccgcctggtatataagggccgaatggcccagccgactgcagggcgcgcaggcggcgcgggtgcgcggtgcggcgctggtatccagaggacgcggtcaccgcctctggcatttgtcgttctgcgcttctccgcaaggaccctctgttaggcaggcgcccaccgtaagcctcccgggccttgtgaacctgcaaacccaagtctgagagacgatccgccttcagcgctttccagcttggcagagaggctttcccggcggggatctttggttggcgctggcgatgcgcggggaagaaaggcgaggagcggcgtccaggctgggtgatgtcccagcacgagtaggcgggatgcgctcgcttggtcctccgggcgcccggtccctgcccgcgtcgcgcgcccacccctggggacgagaaggcggccgcctgaggacccccgcccgcgacctccgcgagtctggagcgcagaggacagggtctggctgctctttggccttggatggaaagtggggaattgggtggggggctgcggaccccttaacgtggattacttggtgtgtatcagctgggctcagaagacccacgacctcttctccatccgtggattgatttgttctgcttaacagctgggtcgccaagctggaggtatttttccctctccaccctggtcttctcctgtaacgtgtggccgccttttccagcacggcctcctgccttcctggtgcactttttggagaacgtggtggaatcagaggtttctggctgactcggtgggtgctttgaaccaggaaaggacaagaaagagaagatcaggttcaagttgccagccagactctgggcttccaggaggagtgggctgtggatggcctggcctcatttgcatgtccctctc

SEQ ID NO: 357509 - DNA, 815 bp, Homo sapiens
gctgctcagggctgggctgtttgctgcccagaaccaaggctaggatgaggagctcagactcttccagtggaagcagtgctaggacggaagacagccgcccctgaagaggggacattgacatacagttgatctgcctgggaaggtgtaatagagatgaacttgtgtcatcgcatctttcacacaagccacaaagaaagctaatcctgattcctggtgagaagaaaccaaactcgaggaatgttttatatcacaggacggtcacagcctgtactggggcacgagccagggctgagtagagtgctgcccctgcactcactgacttgatcctctcatttactctgtggagcagtccctgttgggatcctgctgctttgggaaattgctctgttaagcttgcagagctatgaaattgtggccctatttcaaacccatgagggcctgattctacagactgaccactgggctcttttacttcagcaggacttgggctggggctgcagggatttcaccaaggaatgtcaggcaggaggtggccattgtgaaacctgtcccatcttgcctgtacctcctggctgaaagtgggatgcaggacttagattgccaagcttaggaattatttgtggctctgctgttcacaattttggagaatgttaaggaatactcaagaagttgtgagagtaagggccctcacatatatcagaacatgaaagcattccagttaggaccttgtgatattgaaactagaataagcaacccagtggatagactgtgaaagagaatccacatatagacctatgtgtaagaatttatgatca

SEQ ID NO: 357510 - DNA, 2547 bp, Homo sapiens
ggccgactccaagcaagtttgtcggccttggggagtctggccccgttcctagtgctggagggggaagttgttgcctttcctgctccgtgggccggccccctctccctccagacccacctgggcatagtggacgcgggcttacccagcctccatgccaagtctagggggtcccagcgagtctgttgttaggggctttgggtcacaccctctgtggaattccttggcctgtgcagctcgggcctgccccccgaccttgctagggaggggtggagggtgaagctcccgggagctcattggcactagaggttctggccacgccctctccgcgagtccagtcccacgcgggatgaagagggcaccctccgccaagaggctgctgcgggacccgggtttcccctttccggcgccttccagcctcccaatcctcgggtctcgcctccctccgtctcctccctttcccctgtctgtctttccattggtccatgccgcccacgtgctccccggggctccgcaggcaggactgggccccggggcggtgcgctgggctgcacctccctccccgcgccccgtcctctcccgccctacaggccctagcagggcaggcgggaggtgagcgcggccatcccgctcccggagttccgggatcctggagtccgtagttcgtggtccttcgccggtgtccccggagcccagcggctgtggatggcagaagcccagagtgggactggtcagctgcaggagcagaagaaaggtcttctgatagccgtcagcgtctccgttgataaaatcatctcgcatttcggggccgcccggaacttggtgcagaaggcccagttgggtgatagccggctgagcccggatgtggggcacctggtgctgaccaccctctgcccggccctccacgccctggtggcggacgggctgaagcctttccggaaggacctcatcaccgggcagcgcaggagcagcccctggagcgtggtggaggcgtcggtgaagccaggctccagcacccgctcccttggaaccctgtatagccaggtcagccgtctagccccgctgagcagcagccgtagccgcttccatgcctttatcctgggcctcctcaacaccaagcagttggagctgtggttttccagtctccaggaagatgcaggcctgctctccctcctgtacctgccaacaggatttttctccctggcccgcggtggttgtccctccctgtccacagagctgctgctcctgctgcagccattgtcggtgctcactttccacctggacctgctctttgagcaccaccaccacctgcccctgggcccacctcaggcccctgcccctccaggcccacctccagctctgcagcagactatgcaagccatgctgcactttgggggccggctggcccagagccttcgggggacttccaaggaagctgcttcagacccctctgactctccaaaccttcccacaccagggagctggtgggagcagttgacccaggcctcccgggtctatgcctctgggggcactgagggctttcctctttcccgatgggcaccggggcgtcatgggactgcagctgaagaaggtgcacaggagagacccctgcccacagatgagatggcaccaggcaggggcctctggttgggaagactatttggagtgcctgggggccccgcagaaaatgagaatggagccctaaagtccaggagaccatctagctggctgcccccgacagtgagtgtgttggctcttgtgaagcggggggcacctcccgagatgccttctcctcaggagcttgaggcctcagcacccaggatggtgcaaacccatagggcagtgcgggctctctgtgatcacactgctgcaagacctgaccagttgagcttccggcgtggggaagtgctgcgtgtcatcaccacagtggatgaggactggctccgctgtgggcgggatggcatggagggtctggtgcctgtggggtatacctcccttgttctgtagccctgggaccctttcctgcgtatgtgtctccttcctgtcacctgggaatggaatggccagtgaacaccatcccagaagcattttccctctgcaaaatgacgtttcttcccacgtctgtttctgctaatatttaaaataaactttccttcttccctcctatacccacctgtaaggtgaaatctgctcttcttccaaatatataaaaaaggaattgccctccaggtaatccctttcctttttcccgtctatataagggaatgtcttccttcctatctatctgcaaaatggaaatctagacctccttcttcatccataagtggactgtgccagtacaatacatgcctcagcccccaagcctagaaggacctctagtctccttcctgtgtggaatcttccccactccatccctcccaagttgcctgtattgataatgtactcactcatgctgtactaggtgctgaagcctggacacccttggtgggtgggcctgtggtgatggtttgcatccttcctcctttgtcccaataaagtatgggagttgaa

SEQ ID NO: 357511 - DNA, 1936 bp, Homo sapiens
tgctggtactggtcccgaattcttaagatggcaggcgggagtccgtagttcgtggtccttcgccggtgtccccggagcccagcggctgtggatggcagaagcccagagtgggactggtcagctgcaggagcagaagaaaggtcttctgatagccgtcagcgtctccgttgataaaatcatctcgcatttcggggccgcccggaacttggtgcagaaggcccagttgggtgatagccggctgagcccggatgtggggcacctggtgctgaccaccctctgcccggccctccacgccctggtggcggacgggctgaagcctttccggaaggacctcatcaccgggcagcgcaggagcagcccctggagcgtggtggaggcgtcggtgaagccaggctccagcacccgctcccttggaaccctgtatagccaggtcagccgtctagccccgctgagcagcagccgtagccgcttccatgcctttatcctgggcctcctcaacaccaagcagttggagctgtggttttccagtctccaggaagatgcaggcctgctctccctcctgtacctgccaacaggatttttctccctggcccgcggtggttgtccctccctgtccacagagctgctgctcctgctgcagccattgtcggtgctcactttccacctggacctgctctttgagcaccaccaccacctgcccctgggcccacctcaggcccctgcccctccaggcccacctccagctctgcagcagactatgcaagccatgctgcactttgggggccggctggcccagagccttcgggggacttccaaggaagctgcttcagacccctctgactctccaaaccttcccacaccagggagctggtgggagcagttgacccaggcctcccgggtctatgcctctgggggcactgagggctttcctctttcccgatgggcaccggggcgtcatgggactgcagctgaagaaggtgcacaggagagacccctgcccacagatgagatggcaccaggcaggggcctctggttgggaagactatttggagtgcctgggggccccgcagaaaatgagaatggagccctaaagtccaggagaccatctagctggctgcccccgacagtgagtgtgttggctcttgtgaagcggggggcacctcccgagatgccttctcctcaggagcttgaggcctcagcacccaggatggtgcaaacccatagggcagtgcgggctctctgtgatcacactgctgcaagacctgaccagttgagcttccggcgtggggaagtgctgcgtgtcatcaccacagtggatgaggactggctccgctgtgggcgggatggcatggagggtctggtgcctgtggggtatacctcccttgttctgtagccctgggaccctttcctgcgtatgtgtctccttcctgtcacctgggaatggaatggccagtgaacaccatcccagaagcattttccctctgcaaaatgacgtttcttcccacgtctgtttctgctaatatttaaaataaactttccttcttccctcctatacccacctgtaaggtgaaatctgctcttcttccaaatatataaaaaaggaattgccctccaggtaatccctttcctttttcccgtctatataagggaatgtcttccttcctatctatctgcaaaatggaaatctagacctccttcttcatccataagtggactgtgccagtacaatacatgcctcagcccccaagcctagaaggacctctagtctccttcctgtgtggaatcttccccactccatccctcccaagttgcctgtattgataatgtactcactcatgctgtactaggtgctgaagcctggacacccttggtgggtgggcctgtggtgatggtttgcatccttcctcctttgtcccaataaagtatgggagttgaa

SEQ ID NO: 357512 - DNA, 2240 bp, Homo sapiens
ggtgatacgtgggtgagaaaggtcctggtccgcgccagagcccagcgcgcctcgtcgccatgcctcggaaaattgaggaaatcaaggacttcctgctcacagcccgacgaaaggatgccaaatctgtcaagatcaagaaaaataaggacaacgtgaagtttaaagttcgatgcagcagatacctttacaccctggtcatcactgacaaagagaaggcagagaaactgaagcagtccctgccccccggttgggcagtgaaggaactgaaatgaaccagacacactgattggaactgtattatattaaaatactaaaaaaaacaggccctagcagggcaggcgggagtccgtagttcgtggtccttcgccggtgtccccggagcccagcggctgtggatggcagaagcccagagtgggactggtcagctgcaggagcagaagaaaggtcttctgatagccgtcagcgtctccgttgataaaatcatctcgcatttcggggccgcccggaacttggtgcagaaggcccagttgggtgatagccggctgagcccggatgtggggcacctggtgctgaccaccctctgcccggccctccacgccctggtggcggacgggctgaagcctttccggaaggacctcatcaccgggcagcgcaggagcagcccctggagcgtggtggaggcgtcggtgaagccaggctccagcacccgctcccttggaaccctgtatagccaggtcagccgtctagccccgctgagcagcagccgtagccgcttccatgcctttatcctgggcctcctcaacaccaagcagttggagctgtggttttccagtctccaggaagatgcaggcctgctctccctcctgtacctgccaacaggatttttctccctggcccgcggtggttgtccctccctgtccacagagctgctgctcctgctgcagccattgtcggtgctcactttccacctggacctgctctttgagcaccaccaccacctgcccctgggcccacctcaggcccctgcccctccaggcccacctccagctctgcagcagactatgcaagccatgctgcactttgggggccggctggcccagagccttcgggggacttccaaggaagctgcttcagacccctctgactctccaaaccttcccacaccagggagctggtgggagcagttgacccaggcctcccgggtctatgcctctgggggcactgagggctttcctctttcccgatgggcaccggggcgtcatgggactgcagctgaagaaggtgcacaggagagacccctgcccacagatgagatggcaccaggcaggggcctctggttgggaagactatttggagtgcctgggggccccgcagaaaatgagaatggagccctaaagtccaggagaccatctagctggctgcccccgacagtgagtgtgttggctcttgtgaagcggggggcacctcccgagatgccttctcctcaggagcttgaggcctcagcacccaggatggtgcaaacccatagggcagtgcgggctctctgtgatcacactgctgcaagacctgaccagttgagcttccggcgtggggaagtgctgcgtgtcatcaccacagtggatgaggactggctccgctgtgggcgggatggcatggagggtctggtgcctgtggggtatacctcccttgttctgtagccctgggaccctttcctgcgtatgtgtctccttcctgtcacctgggaatggaatggccagtgaacaccatcccagaagcattttccctctgcaaaatgacgtttcttcccacgtctgtttctgctaatatttaaaataaactttccttcttccctcctatacccacctgtaaggtgaaatctgctcttcttccaaatatataaaaaaggaattgccctccaggtaatccctttcctttttcccgtctatataagggaatgtcttccttcctatctatctgcaaaatggaaatctagacctccttcttcatccataagtggactgtgccagtacaatacatgcctcagcccccaagcctagaaggacctctagtctccttcctgtgtggaatcttccccactccatccctcccaagttgcctgtattgataatgtactcactcatgctgtactaggtgctgaagcctggacacccttggtgggtgggcctgtggtgatggtttgcatccttcctcctttgtcccaataaagtatgggagttgaa

SEQ ID NO: 357513 - DNA, 2670 bp, Homo sapiens
ggccgactccaagcaagtttgtcggccttggggagtctggccccgttcctagtgctggagggggaagttgttgcctttcctgctccgtgggccggccccctctccctccagacccacctgggcatagtggacgcgggcttacccagcctccatgccaagtctagggggtcccagcgagtctgttgttaggggctttgggtcacaccctctgtggaattccttggcctgtgcagctcgggcctgccccccgaccttgctagggaggggtggagggtgaagctcccgggagctcattggcactagaggttctggccacgccctctccgcgagtccagtcccacgcgggatgaagagggcaccctccgccaagaggctgctgcgggacccgggtttcccctttccggcgccttccagcctcccaatcctcgggtctcgcctccctccgtctcctccctttcccctgtctgtctttccattggtccatgccgcccacgtgctccccggggctccgcaggcaggactgggccccggggcggtgcgctgggctgcacctccctccccgcgccccgtcctctcccgccctacaggccctagcagggcaggcgggaggtgagcgcggccatcccgctcccggagttccgggatcctggaggtgggggctgtgccctgagggagggcacagggaaccgggatggggctgggggacagcgagtgctgggaagtgtgcgagatttcactccggggctcgggtcgagctaccccgtgcttcaggcggtcctgcgcctcctctccccaagacccttcggggacacagcactgcagacccgccggagacaacttgtgcgggagcccggagtcctcggaataacacttggtcttctgatagccgtcagcgtctccgttgataaaatcatctcgcatttcggggccgcccggaacttggtgcagaaggcccagttgggtgatagccggctgagcccggatgtggggcacctggtgctgaccaccctctgcccggccctccacgccctggtggcggacgggctgaagcctttccggaaggacctcatcaccgggcagcgcaggagcagcccctggagcgtggtggaggcgtcggtgaagccaggctccagcacccgctcccttggaaccctgtatagccaggtcagccgtctagccccgctgagcagcagccgtagccgcttccatgcctttatcctgggcctcctcaacaccaagcagttggagctgtggttttccagtctccaggaagatgcaggcctgctctccctcctgtacctgccaacaggatttttctccctggcccgcggtggttgtccctccctgtccacagagctgctgctcctgctgcagccattgtcggtgctcactttccacctggacctgctctttgagcaccaccaccacctgcccctgggcccacctcaggcccctgcccctccaggcccacctccagctctgcagcagactatgcaagccatgctgcactttgggggccggctggcccagagccttcgggggacttccaaggaagctgcttcagacccctctgactctccaaaccttcccacaccagggagctggtgggagcagttgacccaggcctcccgggtctatgcctctgggggcactgagggctttcctctttcccgatgggcaccggggcgtcatgggactgcagctgaagaaggtgcacaggagagacccctgcccacagatgagatggcaccaggcaggggcctctggttgggaagactatttggagtgcctgggggccccgcagaaaatgagaatggagccctaaagtccaggagaccatctagctggctgcccccgacagtgagtgtgttggctcttgtgaagcggggggcacctcccgagatgccttctcctcaggagcttgaggcctcagcacccaggatggtgcaaacccatagggcagtgcgggctctctgtgatcacactgctgcaagacctgaccagttgagcttccggcgtggggaagtgctgcgtgtcatcaccacagtggatgaggactggctccgctgtgggcgggatggcatggagggtctggtgcctgtggggtatacctcccttgttctgtagccctgggaccctttcctgcgtatgtgtctccttcctgtcacctgggaatggaatggccagtgaacaccatcccagaagcattttccctctgcaaaatgacgtttcttcccacgtctgtttctgctaatatttaaaataaactttccttcttccctcctatacccacctgtaaggtgaaatctgctcttcttccaaatatataaaaaaggaattgccctccaggtaatccctttcctttttcccgtctatataagggaatgtcttccttcctatctatctgcaaaatggaaatctagacctccttcttcatccataagtggactgtgccagtacaatacatgcctcagcccccaagcctagaaggacctctagtctccttcctgtgtggaatcttccccactccatccctcccaagttgcctgtattgataatgtactcactcatgctgtactaggtgctgaagcctggacacccttggtgggtgggcctgtggtgatggtttgcatccttcctcctttgtcccaataaagtatgggagttgaa

SEQ ID NO: 357514 - DNA, 2723 bp, Homo sapiens
ggccgactccaagcaagtttgtcggccttggggagtctggccccgttcctagtgctggagggggaagttgttgcctttcctgctccgtgggccggccccctctccctccagacccacctgggcatagtggacgcgggcttacccagcctccatgccaagtctagggggtcccagcgagtctgttgttaggggctttgggtcacaccctctgtggaattccttggcctgtgcagctcgggcctgccccccgaccttgctagggaggggtggagggtgaagctcccgggagctcattggcactagaggttctggccacgccctctccgcgagtccagtcccacgcgggatgaagagggcaccctccgccaagaggctgctgcgggacccgggtttcccctttccggcgccttccagcctcccaatcctcgggtctcgcctccctccgtctcctccctttcccctgtctgtctttccattggtccatgccgcccacgtgctccccggggctccgcaggcaggactgggccccggggcggtgcgctgggctgcacctccctccccgcgccccgtcctctcccgccctacaggccctagcagggcaggcgggaggtgagcgcggccatcccgctcccggagttccgggatcctggaggtgggggctgtgccctgagggagggcacagggaaccgggatggggctgggggacagcgagtgctgggaagtgtgcgagatttcactccggggctcgggtcgagctaccccgtgcttcaggcggtcctgcgcctcctctccccaagacccttcggggacacagcactgcagacccgccggagacaacttgtgcgggagcccggagtcctcggaataacacttggtaagtgttaccgcgcccttcttcccttacgccagtccgtagttcgtggtccttcgccggtgtccccggagcccagcggctgtggatggcagaagcccagagtgggactggtcagctgcaggagcagaagaaaggtcttctgatagccgtcagcgtctccgttgataaaatcatctcgcatttcggggccgcccggaacttggtgcagaaggtggcggacgggctgaagcctttccggaaggacctcatcaccgggcagcgcaggagcagcccctggagcgtggtggaggcgtcggtgaagccaggctccagcacccgctcccttggaaccctgtatagccaggtcagccgtctagccccgctgagcagcagccgtagccgcttccatgcctttatcctgggcctcctcaacaccaagcagttggagctgtggttttccagtctccaggaagatgcaggcctgctctccctcctgtacctgccaacaggatttttctccctggcccgcggtggttgtccctccctgtccacagagctgctgctcctgctgcagccattgtcggtgctcactttccacctggacctgctctttgagcaccaccaccacctgcccctgggcccacctcaggcccctgcccctccaggcccacctccagctctgcagcagactatgcaagccatgctgcactttgggggccggctggcccagagccttcgggggacttccaaggaagctgcttcagacccctctgactctccaaaccttcccacaccagggagctggtgggagcagttgacccaggcctcccgggtctatgcctctgggggcactgagggctttcctctttcccgatgggcaccggggcgtcatgggactgcagctgaagaaggtgcacaggagagacccctgcccacagatgagatggcaccaggcaggggcctctggttgggaagactatttggagtgcctgggggccccgcagaaaatgagaatggagccctaaagtccaggagaccatctagctggctgcccccgacagtgagtgtgttggctcttgtgaagcggggggcacctcccgagatgccttctcctcaggagcttgaggcctcagcacccaggatggtgcaaacccatagggcagtgcgggctctctgtgatcacactgctgcaagacctgaccagttgagcttccggcgtggggaagtgctgcgtgtcatcaccacagtggatgaggactggctccgctgtgggcgggatggcatggagggtctggtgcctgtggggtatacctcccttgttctgtagccctgggaccctttcctgcgtatgtgtctccttcctgtcacctgggaatggaatggccagtgaacaccatcccagaagcattttccctctgcaaaatgacgtttcttcccacgtctgtttctgctaatatttaaaataaactttccttcttccctcctatacccacctgtaaggtgaaatctgctcttcttccaaatatataaaaaaggaattgccctccaggtaatccctttcctttttcccgtctatataagggaatgtcttccttcctatctatctgcaaaatggaaatctagacctccttcttcatccataagtggactgtgccagtacaatacatgcctcagcccccaagcctagaaggacctctagtctccttcctgtgtggaatcttccccactccatccctcccaagttgcctgtattgataatgtactcactcatgctgtactaggtgctgaagcctggacacccttggtgggtgggcctgtggtgatggtttgcatccttcctcctttgtcccaataaagtatgggagttgaa

SEQ ID NO: 357515 - DNA, 2352 bp, Homo sapiens
ggccgactccaagcaagtttgtcggccttggggagtctggccccgttcctagtgctggagggggaagttgttgcctttcctgctccgtgggccggccccctctccctccagacccacctgggcatagtggacgcgggcttacccagcctccatgccaagtctagggggtcccagcgagtctgttgttaggggctttgggtcacaccctctgtggaattccttggcctgtgcagctcgggcctgccccccgaccttgctagggaggggtggagggtgaagctcccgggagctcattggcactagaggttctggccacgccctctccgcgagtccagtcccacgcgggatgaagagggcaccctccgccaagaggctgctgcgggacccgggtttcccctttccggcgccttccagcctcccaatcctcgggtctcgcctccctccgtctcctccctttcccctgtctgtctttccattggtccatgccgcccacgtgctccccggggctccgcaggcaggactgggccccggggcggtgcgctgggctgcacctccctccccgcgccccgtcctctcccgccctacaggccctagcagggcaggcgggaggtgagcgcggccatcccgctcccggagttccgggatcctggaggtgggggctgtgccctgagggagggcacagggaaccgggatggggctgggggacagcgagtgctgggaagtgtgcgagatttcactccggggctcgggtcgagctaccccgtgcttcaggcggtcctgcgcctcctctccccaagacccttcggggacacagcactgcagacccgccggagacaacttgtgcgggagcccggagtcctcggaataacacttggtcttctgatagccgtcagcgtctccgttgataaaatcatctcgcatttcggggccgcccggaacttggtgcagaaggcccagttgggtgatagccggctgagcccggatgtggggcacctggtgctgaccaccctctgcccggccctccacgccctggtggcggacgggctgaagcctttccggaaggacctcatcaccgggcagcgcaggagcagcccctggagcgtggtggaggcgtcggtgaagccaggctccagcacccgctcccttggaaccctgtatagccaggtcagccgtctagccccgctgagcagcagccgtagccgcttccatgcctttatcctgggcctcctcaacaccaagcagttggagctgtggttttccagtctccaggaagatgcagggagctggtgggagcagttgacccaggcctcccgggtctatgcctctgggggcactgagggctttcctctttcccgatgggcaccggggcgtcatgggactgcagctgaagaaggtgcacaggagagacccctgcccacagatgagatggcaccaggcaggggcctctggttgggaagactatttggagtgcctgggggccccgcagaaaatgagaatggagccctaaagtccaggagaccatctagctggctgcccccgacagtgagtgtgttggctcttgtgaagcggggggcacctcccgagatgccttctcctcaggagcttgaggcctcagcacccaggatggtgcaaacccatagggcagtgcgggctctctgtgatcacactgctgcaagacctgaccagttgagcttccggcgtggggaagtgctgcgtgtcatcaccacagtggatgaggactggctccgctgtgggcgggatggcatggagggtctggtgcctgtggggtatacctcccttgttctgtagccctgggaccctttcctgcgtatgtgtctccttcctgtcacctgggaatggaatggccagtgaacaccatcccagaagcattttccctctgcaaaatgacgtttcttcccacgtctgtttctgctaatatttaaaataaactttccttcttccctcctatacccacctgtaaggtgaaatctgctcttcttccaaatatataaaaaaggaattgccctccaggtaatccctttcctttttcccgtctatataagggaatgtcttccttcctatctatctgcaaaatggaaatctagacctccttcttcatccataagtggactgtgccagtacaatacatgcctcagcccccaagcctagaaggacctctagtctccttcctgtgtggaatcttccccactccatccctcccaagttgcctgtattgataatgtactcactcatgctgtactaggtgctgaagcctggacacccttggtgggtgggcctgtggtgatggtttgcatccttcctcctttgtcccaataaagtatgggagttgaa

SEQ ID NO: 357516 - DNA, 2474 bp, Homo sapiens
ggccgactccaagcaagtttgtcggccttggggagtctggccccgttcctagtgctggagggggaagttgttgcctttcctgctccgtgggccggccccctctccctccagacccacctgggcatagtggacgcgggcttacccagcctccatgccaagtctagggggtcccagcgagtctgttgttaggggctttgggtcacaccctctgtggaattccttggcctgtgcagctcgggcctgccccccgaccttgctagggaggggtggagggtgaagctcccgggagctcattggcactagaggttctggccacgccctctccgcgagtccagtcccacgcgggatgaagagggcaccctccgccaagaggctgctgcgggacccgggtttcccctttccggcgccttccagcctcccaatcctcgggtctcgcctccctccgtctcctccctttcccctgtctgtctttccattggtccatgccgcccacgtgctccccggggctccgcaggcaggactgggccccggggcggtgcgctgggctgcacctccctccccgcgccccgtcctctcccgccctacaggccctagcagggcaggcgggagtccgtagttcgtggtccttcgccggtgtccccggagcccagcggctgtggatggcagaagcccagagtgggactggtcagctgcaggagcagaagaaaggtcttctgatagccgtcagcgtctccgttgataaaatcatctcgcatttcggggccgcccggaacttggtgcagaaggcccagttgggtgatagccggctgagcccggatgtggggcacctggtgctgaccaccctctgcccggccctccacgccctggtggcggacgggctgaagcctttccggaaggacctcatcaccgggcagcgcaggagcagcccctggagcgtggtggaggcgtcggtgaagccaggctccagcacccgctcccttggaaccctgtatagccaggtcagccgtctagccccgctgagcagcagccgtagccgcttccatgcctttatcctgggcctcctcaacaccaagcagttggagctgtggttttccagtctccaggaagatgcaggatttttctccctggcccgcggtggttgtccctccctgtccacagagctgctgctcctgctgcagccattgtcggtgctcactttccacctggacctgctctttgagcaccaccaccacctgcccctgggcccacctcaggcccctgcccctccaggcccacctccagctctgcagcagactatgcaagccatgctgcactttgggggccggctggcccagagccttcgggggacttccaaggaagctgcttcagacccctctgactctccaaaccttcccacaccagggagctggtgggagcagttgacccaggcctcccgggtctatgcctctgggggcactgagggctttcctctttcccgatgggcaccggggcgtcatgggactgcagctgaagaaggtgcacaggagagacccctgcccacagatgagatggcaccaggcaggggcctctggttgggaagactatttggagtgcctgggggccccgcagaaaatgagaatggagccctaaagtccaggagaccatctagctggctgcccccgacagtgagtgtgttggctcttgtgaagcggggggcacctcccgagatgccttctcctcaggagcttgaggcctcagcacccaggatggtgcaaacccatagggcagtgcgggctctctgtgatcacactgctgcaagacctgaccagttgagcttccggcgtggggaagtgctgcgtgtcatcaccacagtggatgaggactggctccgctgtgggcgggatggcatggagggtctggtgcctgtggggtatacctcccttgttctgtagccctgggaccctttcctgcgtatgtgtctccttcctgtcacctgggaatggaatggccagtgaacaccatcccagaagcattttccctctgcaaaatgacgtttcttcccacgtctgtttctgctaatatttaaaataaactttccttcttccctcctatacccacctgtaaggtgaaatctgctcttcttccaaatatataaaaaaggaattgccctccaggtaatccctttcctttttcccgtctatataagggaatgtcttccttcctatctatctgcaaaatggaaatctagacctccttcttcatccataagtggactgtgccagtacaatacatgcctcagcccccaagcctagaaggacctctagtctccttcctgtgtggaatcttccccactccatccctcccaagttgcctgtattgataatgtactcactcatgctgtactaggtgctgaagcctggacacccttggtgggtgggcctgtggtgatggtttgcatccttcctcctttgtcccaataaagtatgggagttgaa

SEQ ID NO: 357517 - DNA, 2509 bp, Homo sapiens
ggccgactccaagcaagtttgtcggccttggggagtctggccccgttcctagtgctggagggggaagttgttgcctttcctgctccgtgggccggccccctctccctccagacccacctgggcatagtggacgcgggcttacccagcctccatgccaagtctagggggtcccagcgagtctgttgttaggggctttgggtcacaccctctgtggaattccttggcctgtgcagctcgggcctgccccccgaccttgctagggaggggtggagggtgaagctcccgggagctcattggcactagaggttctggccacgccctctccgcgagtccagtcccacgcgggatgaagagggcaccctccgccaagaggctgctgcgggacccgggtttcccctttccggcgccttccagcctcccaatcctcgggtctcgcctccctccgtctcctccctttcccctgtctgtctttccattggtccatgccgcccacgtgctccccggggctccgcaggcaggactgggccccggggcggtgcgctgggctgcacctccctccccgcgccccgtcctctcccgccctacaggccctagcagggcaggcgggaggtgagcgcggccatcccgctcccggagttccgggatcctggagtccgtagttcgtggtccttcgccggtgtccccggagcccagcggctgtggatggcagaagcccagagtgggactggtcagctgcaggagcagaagaaaggtcttctgatagccgtcagcgtctccgttgataaaatcatctcgcatttcggggccgcccggaacttggtgcagaaggcccagttgggtgatagccggctgagcccggatgtggggcacctggtgctgaccaccctctgcccggccctccacgccctggtggcggacgggctgaagcctttccggaaggacctcatcaccgggcagcgcaggagcagcccctggagcgtggtggaggcgtcggtgaagccaggtcagccgtctagccccgctgagcagcagccgtagccgcttccatgcctttatcctgggcctcctcaacaccaagcagttggagctgtggttttccagtctccaggaagatgcaggcctgctctccctcctgtacctgccaacaggatttttctccctggcccgcggtggttgtccctccctgtccacagagctgctgctcctgctgcagccattgtcggtgctcactttccacctggacctgctctttgagcaccaccaccacctgcccctgggcccacctcaggcccctgcccctccaggcccacctccagctctgcagcagactatgcaagccatgctgcactttgggggccggctggcccagagccttcgggggacttccaaggaagctgcttcagacccctctgactctccaaaccttcccacaccagggagctggtgggagcagttgacccaggcctcccgggtctatgcctctgggggcactgagggctttcctctttcccgatgggcaccggggcgtcatgggactgcagctgaagaaggtgcacaggagagacccctgcccacagatgagatggcaccaggcaggggcctctggttgggaagactatttggagtgcctgggggccccgcagaaaatgagaatggagccctaaagtccaggagaccatctagctggctgcccccgacagtgagtgtgttggctcttgtgaagcggggggcacctcccgagatgccttctcctcaggagcttgaggcctcagcacccaggatggtgcaaacccatagggcagtgcgggctctctgtgatcacactgctgcaagacctgaccagttgagcttccggcgtggggaagtgctgcgtgtcatcaccacagtggatgaggactggctccgctgtgggcgggatggcatggagggtctggtgcctgtggggtatacctcccttgttctgtagccctgggaccctttcctgcgtatgtgtctccttcctgtcacctgggaatggaatggccagtgaacaccatcccagaagcattttccctctgcaaaatgacgtttcttcccacgtctgtttctgctaatatttaaaataaactttccttcttccctcctatacccacctgtaaggtgaaatctgctcttcttccaaatatataaaaaaggaattgccctccaggtaatccctttcctttttcccgtctatataagggaatgtcttccttcctatctatctgcaaaatggaaatctagacctccttcttcatccataagtggactgtgccagtacaatacatgcctcagcccccaagcctagaaggacctctagtctccttcctgtgtggaatcttccccactccatccctcccaagttgcctgtattgataatgtactcactcatgctgtactaggtgctgaagcctggacacccttggtgggtgggcctgtggtgatggtttgcatccttcctcctttgtcccaataaagtatgggagttgaa

SEQ ID NO: 357518 - DNA, 1641 bp, Homo sapiens
cctcctcctctgtagcctttgcactgtctctgttacttgtcaccacttgctgtgtgtgtcttcctatttgggctaggttccatgcaggcggggatgtcagtcctatagcccaccacatccttcctcctctctgccccagtgcccagcagagtgaggcctgggaagatgtgtgctgactggtgggctgctctggggggtcttctgggactaggtccagggcaggagctgatgttggcctgctcttttccaggcctgctctccctcctgtacctgccaacaggatttttctccctggcccgcggtggttgtccctccctgtccacagagctgctgctcctgctgcagccattgtcggtgctcactttccacctggacctgctctttgagcaccaccaccacctgcccctgggcccacctcaggcccctgcccctccaggcccacctccagctctgcagcagactatgcaagccatgctgcactttgggggccggctggcccagagccttcgggggacttccaaggaagctgcttcagacccctctgactctccaaaccttcccacaccagggagctggtgggagcagttgacccaggcctcccgggtctatgcctctgggggcactgagggctttcctctttcccgatgggcaccggggcgtcatgggactgcagctgaagaaggtgcacaggagagacccctgcccacagatgagatggcaccaggcaggggcctctggttgggaagactatttggagtgcctgggggccccgcagaaaatgagaatggagccctaaagtccaggagaccatctagctggctgcccccgacagtgagtgtgttggctcttgtgaagcggggggcacctcccgagatgccttctcctcaggagcttgaggcctcagcacccaggatggtgcaaacccatagggcagtgcgggctctctgtgatcacactgctgcaagacctgaccagttgagcttccggcgtggggaagtgctgcgtgtcatcaccacagtggatgaggactggctccgctgtgggcgggatggcatggagggtctggtgcctgtggggtatacctcccttgttctgtagccctgggaccctttcctgcgtatgtgtctccttcctgtcacctgggaatggaatggccagtgaacaccatcccagaagcattttccctctgcaaaatgacgtttcttcccacgtctgtttctgctaatatttaaaataaactttccttcttccctcctatacccacctgtaaggtgaaatctgctcttcttccaaatatataaaaaaggaattgccctccaggtaatccctttcctttttcccgtctatataagggaatgtcttccttcctatctatctgcaaaatggaaatctagacctccttcttcatccataagtggactgtgccagtacaatacatgcctcagcccccaagcctagaaggacctctagtctccttcctgtgtggaatcttccccactccatccctcccaagttgcctgtattgataatgtactcactcatgctgtactaggtgctgaagcctggacacccttggtgggtgggcctgtggtgatggtttgcatccttcctcctttgtcccaataaagtatgggagttgaa

SEQ ID NO: 357519 - DNA, 2481 bp, Homo sapiens
ggccgactccaagcaagtttgtcggccttggggagtctggccccgttcctagtgctggagggggaagttgttgcctttcctgctccgtgggccggccccctctccctccagacccacctgggcatagtggacgcgggcttacccagcctccatgccaagtctagggggtcccagcgagtctgttgttaggggctttgggtcacaccctctgtggaattccttggcctgtgcagctcgggcctgccccccgaccttgctagggaggggtggagggtgaagctcccgggagctcattggcactagaggttctggccacgccctctccgcgagtccagtcccacgcgggatgaagagggcaccctccgccaagaggctgctgcgggacccgggtttcccctttccggcgccttccagcctcccaatcctcgggtctcgcctccctccgtctcctccctttcccctgtctgtctttccattggtccatgccgcccacgtgctccccggggctccgcaggcaggactgggccccggggcggtgcgctgggctgcacctccctccccgcgccccgtcctctcccgccctacaggccctagcagggcaggcgggaggtgagcgcggccatcccgctcccggagttccgggatcctggagtccgtagttcgtggtccttcgccggtgtccccggagcccagcggctgtggatggcagaagcccagagtgggactggtcagctgcaggagcagaagaaaggtcttctgatagccgtcagcgtctccgttgataaaatcatctcgcatttcggggccgcccggaacttggtgcagaaggcccagttgggtgatagccggctgagcccggatgtggggcacctggtgctgaccaccctctgcccggccctccacgccctggtggcggacgggctgaagcctttccggaaggacctcatcaccgggcagcgcaggagcagcccctggagcgtggtggaggcgtcggtgaagccaggctccagcacccgctcccttggaaccctgtatagccaggtcagccgtctagccccgctgagcagcagccgtagccgcttccatgcctttatcctgggcctcctcaacaccaagcagttggagctgtggttttccagtctccaggaagatgcaggcctgctctccctcctgtacctgccaacaggatttttctccctggcccgcggtggttgtccctccctgtccacagagctgctgctcctgctgcagccattgtcggtgctcactttccacctggacctgctctttgagcaccaccaccacctgcccctgggcccacctcaggcccctgcccctccaggcccacctccagctctgcagcagactatgcaagccatgctgcactttgggggccggctggcccagagccttcgggggacttccaaggaagctgcttcagacccctctgactctccaaaccttcccacaccagggagctggtgggagcagttgacccaggcctcccgggtctatgcctctgggggcactgagggctttcctctttcccgatgggcaccggggcgtcatgggactgcagctgaagaaggtgcacaggagagacccctgcccgcagaaaatgagaatggagccctaaagtccaggagaccatctagctggctgcccccgacagtgagtgtgttggctcttgtgaagcggggggcacctcccgagatgccttctcctcaggagcttgaggcctcagcacccaggatggtgcaaacccatagggcagtgcgggctctctgtgatcacactgctgcaagacctgaccagttgagcttccggcgtggggaagtgctgcgtgtcatcaccacagtggatgaggactggctccgctgtgggcgggatggcatggagggtctggtgcctgtggggtatacctcccttgttctgtagccctgggaccctttcctgcgtatgtgtctccttcctgtcacctgggaatggaatggccagtgaacaccatcccagaagcattttccctctgcaaaatgacgtttcttcccacgtctgtttctgctaatatttaaaataaactttccttcttccctcctatacccacctgtaaggtgaaatctgctcttcttccaaatatataaaaaaggaattgccctccaggtaatccctttcctttttcccgtctatataagggaatgtcttccttcctatctatctgcaaaatggaaatctagacctccttcttcatccataagtggactgtgccagtacaatacatgcctcagcccccaagcctagaaggacctctagtctccttcctgtgtggaatcttccccactccatccctcccaagttgcctgtattgataatgtactcactcatgctgtactaggtgctgaagcctggacacccttggtgggtgggcctgtggtgatggtttgcatccttcctcctttgtcccaataaagtatgggagttgaa

SEQ ID NO: 357520 - DNA, 1740 bp, Homo sapiens
ccccggcccccacccccgcctgtccctccccgaaggaagaagaaccgacctggactgcagcccatagcggaggggcagtccgaggagggccgggctgtcagcccagcggctggcgaggaggccccagccgcgaaggagccgggcgcgcaggccggcctggaggtccgtagttcgtggtccttcgccggtgtccccggagcccagcggctgtggatggcagaagcccagagtgggactggtcagctgcaggagcagaagaaaggtcttctgatagccgtcagcgtctccgttgataaaatcatctcgcatttcggggccgcccggaacttggtgcagaaggcccagttgggtgatagccggctgagcccggatgtggggcacctggtgctgaccaccctctgcccggccctccacgccctggtggcggacgggctgaagcctttccggaaggacctcatcaccgggcagcgcaggagcagcccctggagcgtggtggaggcgtcggtgaagccaggctccagcacccgctcccttggaaccctgtatagccaggtcagccgtctagccccgctgagcagcagccgtagccgcttccatgcctttatcctgggcctcctcaacaccaagcagttggagctgtggttttccagtctccaggaagatgcagggagctggtgggagcagttgacccaggcctcccgggtctatgcctctgggggcactgagggctttcctctttcccgatgggcaccggggcgtcatgggactgcagctgaagaaggtgcacaggagagacccctgcccacagatgagatggcaccaggcaggggcctctggttgggaagactatttggagtgcctgggggccccgcagaaaatgagaatggagccctaaagtccaggagaccatctagctggctgcccccgacagtgagtgtgttggctcttgtgaagcggggggcacctcccgagatgccttctcctcaggagcttgaggcctcagcacccaggatggtgcaaacccatagggcagtgcgggctctctgtgatcacactgctgcaagacctgaccagttgagcttccggcgtggggaagtgctgcgtgtcatcaccacagtggatgaggactggctccgctgtgggcgggatggcatggagggtctggtgcctgtggggtatacctcccttgttctgtagccctgggaccctttcctgcgtatgtgtctccttcctgtcacctgggaatggaatggccagtgaacaccatcccagaagcattttccctctgcaaaatgacgtttcttcccacgtctgtttctgctaatatttaaaataaactttccttcttccctcctatacccacctgtaaggtgaaatctgctcttcttccaaatatataaaaaaggaattgccctccaggtaatccctttcctttttcccgtctatataagggaatgtcttccttcctatctatctgcaaaatggaaatctagacctccttcttcatccataagtggactgtgccagtacaatacatgcctcagcccccaagcctagaaggacctctagtctccttcctgtgtggaatcttccccactccatccctcccaagttgcctgtattgataatgtactcactcatgctgtactaggtgctgaagcctggacacccttggtgggtgggcctgtggtgatggtttgcatccttcctcctttgtcccaataaagtatgggagttgaa

SEQ ID NO: 357521 - DNA, 2123 bp, Homo sapiens
ggccgactccaagcaagtttgtcggccttggggagtctggccccgttcctagtgctggagggggaagttgttgcctttcctgctccgtgggccggccccctctccctccagacccacctgggcatagtggacgcgggcttacccagcctccatgccaagtctagggggtcccagcgagtctgttgttaggggctttgggtcacaccctctgtggaattccttggcctgtgcagctcgggcctgccccccgaccttgctagggaggggtggagggtgaagctcccgggagctcattggcactagaggttctggccacgccctctccgcgagtccagtcccacgcgggatgaagagggcaccctccgccaagaggctgctgcgggacccgggtttcccctttccggcgccttccagcctcccaatcctcgggtctcgcctccctccgtctcctccctttcccctgtctgtctttccattggtccatgccgcccacgtgctccccggggctccgcaggcaggactgggccccggggcggtgcgctgggctgcacctccctccccgcgccccgtcctctcccgccctacaggccctagcagggcaggcgggaggtgagcgcggccatcccgctcccggagttccgggatcctggagtccgtagttcgtggtccttcgccggtgtccccggagcccagcggctgtggatggcagaagcccagagtgggactggtcagctgcaggagcagaagaaaggtcttctgatagccgtcagcgtctccgttgataaaatcatctcgcatttcggggccgcccggaacttggtgcagaaggcccagttgggtgatagccggctgagcccggatgtggggcacctggtgctgaccaccctctgcccggccctccacgccctggtggcggacgggctgaagcctttccggaaggacctcatcaccgggcagcgcaggagcagcccctggagcgtggtggaggcgtcggtgaagccagcaccaagcagttggagctgtggttttccagtctccaggaagatgcagggagctggtgggagcagttgacccaggcctcccgggtctatgcctctgggggcactgagggctttcctctttcccgatgggcaccggggcgtcatgggactgcagctgaagaaggtgcacaggagagacccctgcccacagatgagatggcaccaggcaggggcctctggttgggaagactatttggagtgcctgggggccccgcagaaaatgagaatggagccctaaagtccaggagaccatctagctggctgcccccgacagtgagtgtgttggctcttgtgaagcggggggcacctcccgagatgccttctcctcaggagcttgaggcctcagcacccaggatggtgcaaacccatagggcagtgcgggctctctgtgatcacactgctgcaagacctgaccagttgagcttccggcgtggggaagtgctgcgtgtcatcaccacagtggatgaggactggctccgctgtgggcgggatggcatggagggtctggtgcctgtggggtatacctcccttgttctgtagccctgggaccctttcctgcgtatgtgtctccttcctgtcacctgggaatggaatggccagtgaacaccatcccagaagcattttccctctgcaaaatgacgtttcttcccacgtctgtttctgctaatatttaaaataaactttccttcttccctcctatacccacctgtaaggtgaaatctgctcttcttccaaatatataaaaaaggaattgccctccaggtaatccctttcctttttcccgtctatataagggaatgtcttccttcctatctatctgcaaaatggaaatctagacctccttcttcatccataagtggactgtgccagtacaatacatgcctcagcccccaagcctagaaggacctctagtctccttcctgtgtggaatcttccccactccatccctcccaagttgcctgtattgataatgtactcactcatgctgtactaggtgctgaagcctggacacccttggtgggtgggcctgtggtgatggtttgcatccttcctcctttgtcccaataaagtatgggagttgaa

SEQ ID NO: 357522 - DNA, 1908 bp, Homo sapiens
ggccgactccaagcaagtttgtcggccttggggagtctggccccgttcctagtgctggagggggaagttgttgcctttcctgctccgtgggccggccccctctccctccagacccacctgggcatagtggacgcgggcttacccagcctccatgccaagtctagggggtcccagcgagtctgttgttaggggctttgggtcacaccctctgtggaattccttggcctgtgcagctcgggcctgccccccgaccttgctagggaggggtggagggtgaagctcccgggagctcattggcactagaggttctggccacgccctctccgcgagtccagtcccacgcgggatgaagagggcaccctccgccaagaggctgctgcgggacccgggtttcccctttccggcgccttccagcctcccaatcctcgggtctcgcctccctccgtctcctccctttcccctgtctgtctttccattggtccatgccgcccacgtgctccccggggctccgcaggcaggactgggccccggggcggtgcgctgggctgcacctccctccccgcgccccgtcctctcccgccctacaggccctagcagggcaggcgggaggtgagcgcggccatcccgctcccggagttccgggatcctggagtccgtagttcgtggtccttcgccggtgtccccggagcccagcggctgtggatggcagaagcccagagtgggactggtcagctgcaggagcagaagaaaggtcttctgatagccgtcagcgtctccgttgataaaatcatctcgcatttcggggccgcccggaacttggtgcagaaggcccagttgggtgatagccggctgagcccggatgtggggcacctggtgctgaccaccctctgcccggccctccacgccctggtggcggacgggctgaagcctttccggaaggacctcatcaccgggcagcgcaggagcagcccctggagcgtggtggaggcgtcggtgaagccaggctccagcacccgctcccttggaaccctgtatagccaggtcagccgtctagccccgctgagcagcagccgtagccgcttccatgcctttatcctgggcctcctcaacaccaagcagttggagctgtggttttccagtctccaggaagatgcaggcctgctctccctcctgtacctgccaacaggatttttctccctggcccgcggtggttgtccctccctgtccacagagctgctgctcctgctgcagccattgtcggtgctcactttccacctggacctgctctttgagcaccaccaccacctgcccctgggcccacctcaggcccctgcccctccaggcccacctccagctctgcagcagactatgcaagccatgctgcactttgggggccggctggcccagagccttcgggggacttccaaggaagctgcttcagacccctctgactctccaaaccttcccacaccagggagctggtgggagcagttgacccaggcctcccgggtctatgcctctgggggcactgagggctttcctctttcccgatgggcaccggggcgtcatgggactgcagctgaagaaggtgcacaggagagacccctgcccacagatgagatggcaccaggcaggggcctctggttgggaagactatttggagtgcctgggggccccgcagaaaatgagaatggagccctaaagtccaggagaccatctagctggctgcccccgacagtgagtgtgttggctcttgtgaagcggggggcacctcccgagatgccttctcctcaggagcttgaggcctcagcacccaggatggtgcaaacccatagacccttggtgggtgggcctgtggtgatggtttgcatccttcctcctttgtcccaataaagtatgggagttgaa

SEQ ID NO: 357523 - DNA, 424 bp, Homo sapiens
tggatgggtcacacacacacacacacaccgggaagagcatgcctggatgggctctcacagtctgctcttcttccaaatatataaaaaaggaattgccctccaggtaatccctttcctttttcccgtctatataagggaatgtcttccttcctatctatctgcaaaatggaaatctagacctccttcttcatccataagtggactgtgccagtacaatacatgcctcagcccccaagcctagaaggacctctagtctccttcctgtgtggaatcttccccactccatccctcccaagttgcctgtattgataatgtactcactcatgctgtactaggtgctgaagcctggacacccttggtgggtgggcctgtggtgatggtttgcatccttcctcctttgtcccaataaagtatgggagttgaa

SEQ ID NO: 357524 - DNA, 284 bp, Homo sapiens
gggaatgtcttccttcctatctatctgcaaaatggaaatctagacctccttcttcatccataagtggactgtgccagtacaatacatgcctcagcccccaagcctagaaggacctctagtctccttcctgtgtggaatcttccccactccatccctcccaagttgcctgtattgataatgtactcactcatgctgtactaggtgctgaagcctggacacccttggtgggtgggcctgtggtgatggtttgcatccttcctcctttgtcccaataaagtatggga

SEQ ID NO: 357525 - DNA, 202 bp, Homo sapiens
agtgcctcacatccccagagaaggccccccctcttccaatctcatctcccatcctccacccagagaggactggagtcctccacctccctgaacttccattccctcttttctcccctagcaccaagcagttggagctgtggttttccagtctccaggaagatgcaggtcagaggttcagatggtagaggatggggctgatggg

SEQ ID NO: 357526 - DNA, 2504 bp, Homo sapiens
ggccgactccaagcaagtttgtcggccttggggagtctggccccgttcctagtgctggagggggaagttgttgcctttcctgctccgtgggccggccccctctccctccagacccacctgggcatagtggacgcgggcttacccagcctccatgccaagtctagggggtcccagcgagtctgttgttaggggctttgggtcacaccctctgtggaattccttggcctgtgcagctcgggcctgccccccgaccttgctagggaggggtggagggtgaagctcccgggagctcattggcactagaggttctggccacgccctctccgcgagtccagtcccacgcgggatgaagagggcaccctccgccaagaggctgctgcgggacccgggtttcccctttccggcgccttccagcctcccaatcctcgggtctcgcctccctccgtctcctccctttcccctgtctgtctttccattggtccatgccgcccacgtgctccccggggctccgcaggcaggactgggccccggggcggtgcgctgggctgcacctccctccccgcgccccgtcctctcccgccctacaggccctagcagggcaggcgggagtccgtagttcgtggtccttcgccggtgtccccggagcccagcggctgtggatggcagaagcccagagtgggactggtcagctgcaggagcagaagaaaggtcttctgatagccgtcagcgtctccgttgataaaatcatctcgcatttcggggccgcccggaacttggtgcagaaggcccagttgggtgatagccggctgagcccggatgtggggcacctggtgctgaccaccctctgcccggccctccacgccctggtggcggacgggctgaagcctttccggaaggacctcatcaccgggcagcgcaggagcagcccctggagcgtggtggaggcgtcggtgaagccaggctccagcacccgctcccttggaaccctgtatagccaggtcagccgtctagccccgctgagcagcagccgtagccgcttccatgcctttatcctgggcctcctcaacaccaagcagttggagctgtggttttccagtctccaggaagatgcaggcctgctctccctcctgtacctgccaacaggatttttctccctggcccgcggtggttgtccctccctgtccacagagctgctgctcctgctgcagccattgtcggtgctcactttccacctggacctgctctttgagcaccaccaccacctgcccctgggcccacctcaggcccctgcccctccaggcccacctccagctctgcagcagactatgcaagccatgctgcactttgggggccggctggcccagagccttcgggggacttccaaggaagctgcttcagacccctctgactctccaaaccttcccacaccagggagctggtgggagcagttgacccaggcctcccgggtctatgcctctgggggcactgagggctttcctctttcccgatgggcaccggggcgtcatgggactgcagctgaagaaggtgcacaggagagacccctgcccacagatgagatggcaccaggcaggggcctctggttgggaagactatttggagtgcctgggggccccgcagaaaatgagaatggagccctaaagtccaggagaccatctagctggctgcccccgacagtgagtgtgttggctcttgtgaagcggggggcacctcccgagatgccttctcctcaggagcttgaggcctcagcacccaggatggtgcaaacccatagggcagtgcgggctctctgtgatcacactgctgcaagacctgaccagttgagcttccggcgtggggaagtgctgcgtgtcatcaccacagtggatgaggactggctccgctgtgggcgggatggcatggagggtctggtgcctgtggggtatacctcccttgttctgtagccctgggaccctttcctgcgtatgtgtctccttcctgtcacctgggaatggaatggccagtgaacaccatcccagaagcattttccctctgcaaaatgacgtttcttcccacgtctgtttctgctaatatttaaaataaactttccttcttccctcctatacccacctgtaaggtgaaatctgctcttcttccaaatatataaaaaaggaattgccctccaggtaatccctttcctttttcccgtctatataagggaatgtcttccttcctatctatctgcaaaatggaaatctagacctccttcttcatccataagtggactgtgccagtacaatacatgcctcagcccccaagcctagaaggacctctagtctccttcctgtgtggaatcttccccactccatccctcccaagttgcctgtattgataatgtactcactcatgctgtactaggtgctgaagcctggacacccttggtgggtgggcctgtggtgatggtttgcatccttcctcctttgtcccaataaagtatgggagttgaa

SEQ ID NO: 357527 - DNA, 2804 bp, Homo sapiens
ggccgactccaagcaagtttgtcggccttggggagtctggccccgttcctagtgctggagggggaagttgttgcctttcctgctccgtgggccggccccctctccctccagacccacctgggcatagtggacgcgggcttacccagcctccatgccaagtctagggggtcccagcgagtctgttgttaggggctttgggtcacaccctctgtggaattccttggcctgtgcagctcgggcctgccccccgaccttgctagggaggggtggagggtgaagctcccgggagctcattggcactagaggttctggccacgccctctccgcgagtccagtcccacgcgggatgaagagggcaccctccgccaagaggctgctgcgggacccgggtttcccctttccggcgccttccagcctcccaatcctcgggtctcgcctccctccgtctcctccctttcccctgtctgtctttccattggtccatgccgcccacgtgctccccggggctccgcaggcaggactgggccccggggcggtgcgctgggctgcacctccctccccgcgccccgtcctctcccgccctacaggccctagcagggcaggcgggaggtgagcgcggccatcccgctcccggagttccgggatcctggaggtgggggctgtgccctgagggagggcacagggaaccgggatggggctgggggacagcgagtgctgggaagtgtgcgagatttcactccggggctcgggtcgagctaccccgtgcttcaggcggtcctgcgcctcctctccccaagacccttcggggacacagcactgcagacccgccggagacaacttgtgcgggagcccggagtcctcggaataacacttggtaagtgttaccgcgcccttcttcccttacgccagtccgtagttcgtggtccttcgccggtgtccccggagcccagcggctgtggatggcagaagcccagagtgggactggtcagctgcaggagcagaagaaaggtcttctgatagccgtcagcgtctccgttgataaaatcatctcgcatttcggggccgcccggaacttggtgcagaaggcccagttgggtgatagccggctgagcccggatgtggggcacctggtgctgaccaccctctgcccggccctccacgccctggtggcggacgggctgaagcctttccggaaggacctcatcaccgggcagcgcaggagcagcccctggagcgtggtggaggcgtcggtgaagccaggctccagcacccgctcccttggaaccctgtatagccaggtcagccgtctagccccgctgagcagcagccgtagccgcttccatgcctttatcctgggcctcctcaacaccaagcagttggagctgtggttttccagtctccaggaagatgcaggcctgctctccctcctgtacctgccaacaggatttttctccctggcccgcggtggttgtccctccctgtccacagagctgctgctcctgctgcagccattgtcggtgctcactttccacctggacctgctctttgagcaccaccaccacctgcccctgggcccacctcaggcccctgcccctccaggcccacctccagctctgcagcagactatgcaagccatgctgcactttgggggccggctggcccagagccttcgggggacttccaaggaagctgcttcagacccctctgactctccaaaccttcccacaccagggagctggtgggagcagttgacccaggcctcccgggtctatgcctctgggggcactgagggctttcctctttcccgatgggcaccggggcgtcatgggactgcagctgaagaaggtgcacaggagagacccctgcccacagatgagatggcaccaggcaggggcctctggttgggaagactatttggagtgcctgggggccccgcagaaaatgagaatggagccctaaagtccaggagaccatctagctggctgcccccgacagtgagtgtgttggctcttgtgaagcggggggcacctcccgagatgccttctcctcaggagcttgaggcctcagcacccaggatggtgcaaacccatagggcagtgcgggctctctgtgatcacactgctgcaagacctgaccagttgagcttccggcgtggggaagtgctgcgtgtcatcaccacagtggatgaggactggctccgctgtgggcgggatggcatggagggtctggtgcctgtggggtatacctcccttgttctgtagccctgggaccctttcctgcgtatgtgtctccttcctgtcacctgggaatggaatggccagtgaacaccatcccagaagcattttccctctgcaaaatgacgtttcttcccacgtctgtttctgctaatatttaaaataaactttccttcttccctcctatacccacctgtaaggtgaaatctgctcttcttccaaatatataaaaaaggaattgccctccaggtaatccctttcctttttcccgtctatataagggaatgtcttccttcctatctatctgcaaaatggaaatctagacctccttcttcatccataagtggactgtgccagtacaatacatgcctcagcccccaagcctagaaggacctctagtctccttcctgtgtggaatcttccccactccatccctcccaagttgcctgtattgataatgtactcactcatgctgtactaggtgctgaagcctggacacccttggtgggtgggcctgtggtgatggtttgcatccttcctcctttgtcccaataaagtatgggagttgaa

SEQ ID NO: 357528 - DNA, 2941 bp, Homo sapiens
ggccgactccaagcaagtttgtcggccttggggagtctggccccgttcctagtgctggagggggaagttgttgcctttcctgctccgtgggccggccccctctccctccagacccacctgggcatagtggacgcgggcttacccagcctccatgccaagtctagggggtcccagcgagtctgttgttaggggctttgggtcacaccctctgtggaattccttggcctgtgcagctcgggcctgccccccgaccttgctagggaggggtggagggtgaagctcccgggagctcattggcactagaggttctggccacgccctctccgcgagtccagtcccacgcgggatgaagagggcaccctccgccaagaggctgctgcgggacccgggtttcccctttccggcgccttccagcctcccaatcctcgggtctcgcctccctccgtctcctccctttcccctgtctgtctttccattggtccatgccgcccacgtgctccccggggctccgcaggcaggactgggccccggggcggtgcgctgggctgcacctccctccccgcgccccgtcctctcccgccctacaggccctagcagggcaggcgggaggtgagcgcggccatcccgctcccggagttccgggatcctggaggtgggggctgtgccctgagggagggcacagggaaccgggatggggctgggggacagcgagtgctgggaagtgtgcgagatttcactccggggctcgggtcgagctaccccgtgcttcaggcggtcctgcgcctcctctccccaagacccttcggggacacagcactgcagacccgccggagacaacttgtgcgggagcccggagtcctcggaataacacttggtaagtgttaccgcgcccttcttcccttacgccagtccgtagttcgtggtccttcgccggtgtccccggagcccagcggctgtggatggcagaagcccagagtgggactggtcagctgcaggagcagaagaaaggtcttctgatagccgtcagcgtctccgttgataaaatcatctcgcatttcggggccgcccggaacttggtgcagaaggtgaaggtggctggggggaggctgttgggatgaggagagtaatggagctccgcggggggtgcgggaatggttggcgggaggtggctgggaggtgtctggagggatctctggagccatcggcatcgcgccacctccaggcccagttgggtgatagccggctgagcccggatgtggggcacctggtgctgaccaccctctgcccggccctccacgccctggtggcggacgggctgaagcctttccggaaggacctcatcaccgggcagcgcaggagcagcccctggagcgtggtggaggcgtcggtgaagccaggctccagcacccgctcccttggaaccctgtatagccaggtcagccgtctagccccgctgagcagcagccgtagccgcttccatgcctttatcctgggcctcctcaacaccaagcagttggagctgtggttttccagtctccaggaagatgcaggcctgctctccctcctgtacctgccaacaggatttttctccctggcccgcggtggttgtccctccctgtccacagagctgctgctcctgctgcagccattgtcggtgctcactttccacctggacctgctctttgagcaccaccaccacctgcccctgggcccacctcaggcccctgcccctccaggcccacctccagctctgcagcagactatgcaagccatgctgcactttgggggccggctggcccagagccttcgggggacttccaaggaagctgcttcagacccctctgactctccaaaccttcccacaccagggagctggtgggagcagttgacccaggcctcccgggtctatgcctctgggggcactgagggctttcctctttcccgatgggcaccggggcgtcatgggactgcagctgaagaaggtgcacaggagagacccctgcccacagatgagatggcaccaggcaggggcctctggttgggaagactatttggagtgcctgggggccccgcagaaaatgagaatggagccctaaagtccaggagaccatctagctggctgcccccgacagtgagtgtgttggctcttgtgaagcggggggcacctcccgagatgccttctcctcaggagcttgaggcctcagcacccaggatggtgcaaacccatagggcagtgcgggctctctgtgatcacactgctgcaagacctgaccagttgagcttccggcgtggggaagtgctgcgtgtcatcaccacagtggatgaggactggctccgctgtgggcgggatggcatggagggtctggtgcctgtggggtatacctcccttgttctgtagccctgggaccctttcctgcgtatgtgtctccttcctgtcacctgggaatggaatggccagtgaacaccatcccagaagcattttccctctgcaaaatgacgtttcttcccacgtctgtttctgctaatatttaaaataaactttccttcttccctcctatacccacctgtaaggtgaaatctgctcttcttccaaatatataaaaaaggaattgccctccaggtaatccctttcctttttcccgtctatataagggaatgtcttccttcctatctatctgcaaaatggaaatctagacctccttcttcatccataagtggactgtgccagtacaatacatgcctcagcccccaagcctagaaggacctctagtctccttcctgtgtggaatcttccccactccatccctcccaagttgcctgtattgataatgtactcactcatgctgtactaggtgctgaagcctggacacccttggtgggtgggcctgtggtgatggtttgcatccttcctcctttgtcccaataaagtatgggagttgaa

SEQ ID NO: 357529 - DNA, 2195 bp, Homo sapiens
ccccggcccccacccccgcctgtccctccccgaaggaagaagaaccgacctggactgcagcccatagcggaggggcagtccgaggagggccgggctgtcagcccagcggctggcgaggaggccccagccgcgaaggagccgggcgcgcaggccggcctggaggtccgtagttcgtggtccttcgccggtgtccccggagcccagcggctgtggatggcagaagcccagagtgggactggtcagctgcaggagcagaagaaaggtcttctgatagccgtcagcgtctccgttgataaaatcatctcgcatttcggggccgcccggaacttggtgcagaaggtgaaggtggctggggggaggctgttgggatgaggagagtaatggagctccgcggggggtgcgggaatggttggcgggaggtggctgggaggtgtctggagggatctctggagccatcggcatcgcgccacctccaggcccagttgggtgatagccggctgagcccggatgtggggcacctggtgctgaccaccctctgcccggccctccacgccctggtggcggacgggctgaagcctttccggaaggacctcatcaccgggcagcgcaggagcagcccctggagcgtggtggaggcgtcggtgaagccaggctccagcacccgctcccttggaaccctgtatagccaggtcagccgtctagccccgctgagcagcagccgtagccgcttccatgcctttatcctgggcctcctcaacaccaagcagttggagctgtggttttccagtctccaggaagatgcaggcctgctctccctcctgtacctgccaacaggatttttctccctggcccgcggtggttgtccctccctgtccacagagctgctgctcctgctgcagccattgtcggtgctcactttccacctggacctgctctttgagcaccaccaccacctgcccctgggcccacctcaggcccctgcccctccaggcccacctccagctctgcagcagactatgcaagccatgctgcactttgggggccggctggcccagagccttcgggggacttccaaggaagctgcttcagacccctctgactctccaaaccttcccacaccagggagctggtgggagcagttgacccaggcctcccgggtctatgcctctgggggcactgagggctttcctctttcccgatgggcaccggggcgtcatgggactgcagctgaagaaggtgcacaggagagacccctgcccacagatgagatggcaccaggcaggggcctctggttgggaagactatttggagtgcctgggggccccgcagaaaatgagaatggagccctaaagtccaggagaccatctagctggctgcccccgacagtgagtgtgttggctcttgtgaagcggggggcacctcccgagatgccttctcctcaggagcttgaggcctcagcacccaggatggtgcaaacccatagggcagtgcgggctctctgtgatcacactgctgcaagacctgaccagttgagcttccggcgtggggaagtgctgcgtgtcatcaccacagtggatgaggactggctccgctgtgggcgggatggcatggagggtctggtgcctgtggggtatacctcccttgttctgtagccctgggaccctttcctgcgtatgtgtctccttcctgtcacctgggaatggaatggccagtgaacaccatcccagaagcattttccctctgcaaaatgacgtttcttcccacgtctgtttctgctaatatttaaaataaactttccttcttccctcctatacccacctgtaaggtgaaatctgctcttcttccaaatatataaaaaaggaattgccctccaggtaatccctttcctttttcccgtctatataagggaatgtcttccttcctatctatctgcaaaatggaaatctagacctccttcttcatccataagtggactgtgccagtacaatacatgcctcagcccccaagcctagaaggacctctagtctccttcctgtgtggaatcttccccactccatccctcccaagttgcctgtattgataatgtactcactcatgctgtactaggtgctgaagcctggacacccttggtgggtgggcctgtggtgatggtttgcatccttcctcctttgtcccaataaagtatgggagttgaa

SEQ ID NO: 357530 - DNA, 2398 bp, Homo sapiens
ggccgactccaagcaagtttgtcggccttggggagtctggccccgttcctagtgctggagggggaagttgttgcctttcctgctccgtgggccggccccctctccctccagacccacctgggcatagtggacgcgggcttacccagcctccatgccaagtctagggggtcccagcgagtctgttgttaggggctttgggtcacaccctctgtggaattccttggcctgtgcagctcgggcctgccccccgaccttgctagggaggggtggagggtgaagctcccgggagctcattggcactagaggttctggccacgccctctccgcgagtccagtcccacgcgggatgaagagggcaccctccgccaagaggctgctgcgggacccgggtttcccctttccggcgccttccagcctcccaatcctcgggtctcgcctccctccgtctcctccctttcccctgtctgtctttccattggtccatgccgcccacgtgctccccggggctccgcaggcaggactgggccccggggcggtgcgctgggctgcacctccctccccgcgccccgtcctctcccgccctacaggccctagcagggcaggcgggagtccgtagttcgtggtccttcgccggtgtccccggagcccagcggctgtggatggcagaagcccagagtgggactggtcagctgcaggagcagaagaaaggtcttctgatagccgtcagcgtctccgttgataaaatcatctcgcatttcggggccgcccggaacttggtgcagaaggcccagttgggtgatagccggctgagcccggatgtggggcacctggtgctgaccaccctctgcccggccctccacgccctggtggcggacgggctgaagcctttccggaaggacctcatcaccgggcagcgcaggagcagcccctggagcgtggtggaggcgtcggtgaagccagcaccaagcagttggagctgtggttttccagtctccaggaagatgcaggcctgctctccctcctgtacctgccaacaggatttttctccctggcccgcggtggttgtccctccctgtccacagagctgctgctcctgctgcagccattgtcggtgctcactttccacctggacctgctctttgagcaccaccaccacctgcccctgggcccacctcaggcccctgcccctccaggcccacctccagctctgcagcagactatgcaagccatgctgcactttgggggccggctggcccagagccttcgggggacttccaaggaagctgcttcagacccctctgactctccaaaccttcccacaccagggagctggtgggagcagttgacccaggcctcccgggtctatgcctctgggggcactgagggctttcctctttcccgatgggcaccggggcgtcatgggactgcagctgaagaaggtgcacaggagagacccctgcccacagatgagatggcaccaggcaggggcctctggttgggaagactatttggagtgcctgggggccccgcagaaaatgagaatggagccctaaagtccaggagaccatctagctggctgcccccgacagtgagtgtgttggctcttgtgaagcggggggcacctcccgagatgccttctcctcaggagcttgaggcctcagcacccaggatggtgcaaacccatagggcagtgcgggctctctgtgatcacactgctgcaagacctgaccagttgagcttccggcgtggggaagtgctgcgtgtcatcaccacagtggatgaggactggctccgctgtgggcgggatggcatggagggtctggtgcctgtggggtatacctcccttgttctgtagccctgggaccctttcctgcgtatgtgtctccttcctgtcacctgggaatggaatggccagtgaacaccatcccagaagcattttccctctgcaaaatgacgtttcttcccacgtctgtttctgctaatatttaaaataaactttccttcttccctcctatacccacctgtaaggtgaaatctgctcttcttccaaatatataaaaaaggaattgccctccaggtaatccctttcctttttcccgtctatataagggaatgtcttccttcctatctatctgcaaaatggaaatctagacctccttcttcatccataagtggactgtgccagtacaatacatgcctcagcccccaagcctagaaggacctctagtctccttcctgtgtggaatcttccccactccatccctcccaagttgcctgtattgataatgtactcactcatgctgtactaggtgctgaagcctggacacccttggtgggtgggcctgtggtgatggtttgcatccttcctcctttgtcccaataaagtatgggagttgaa

SEQ ID NO: 357531 - DNA, 1596 bp, Homo sapiens
tgtcacctcgggacctaccgtttgaggatagtattttggagatctacggtgcgttggcccaacacggtgcgttggccgttgggccacgcagtcagccgtctagccccgctgagcagcagccgtagccgcttccatgcctttatcctgggcctcctcaacaccaagcagttggagctgtggttttccagtctccaggaagatgcaggcctgctctccctcctgtacctgccaacaggatttttctccctggcccgcggtggttgtccctccctgtccacagagctgctgctcctgctgcagccattgtcggtgctcactttccacctggacctgctctttgagcaccaccaccacctgcccctgggcccacctcaggcccctgcccctccaggcccacctccagctctgcagcagactatgcaagccatgctgcactttgggggccggctggcccagagccttcgggggacttccaaggaagctgcttcagacccctctgactctccaaaccttcccacaccagggagctggtgggagcagttgacccaggcctcccgggtctatgcctctgggggcactgagggctttcctctttcccgatgggcaccggggcgtcatgggactgcagctgaagaaggtgcacaggagagacccctgcccacagatgagatggcaccaggcaggggcctctggttgggaagactatttggagtgcctgggggccccgcagaaaatgagaatggagccctaaagtccaggagaccatctagctggctgcccccgacagtgagtgtgttggctcttgtgaagcggggggcacctcccgagatgccttctcctcaggagcttgaggcctcagcacccaggatggtgcaaacccatagggcagtgcgggctctctgtgatcacactgctgcaagacctgaccagttgagcttccggcgtggggaagtgctgcgtgtcatcaccacagtggatgaggactggctccgctgtgggcgggatggcatggagggtctggtgcctgtggggtatacctcccttgttctgtagccctgggaccctttcctgcgtatgtgtctccttcctgtcacctgggaatggaatggccagtgaacaccatcccagaagcattttccctctgcaaaatgacgtttcttcccacgtctgtttctgctaatatttaaaataaactttccttcttccctcctatacccacctgtaaggtgaaatctgctcttcttccaaatatataaaaaaggaattgccctccaggtaatccctttcctttttcccgtctatataagggaatgtcttccttcctatctatctgcaaaatggaaatctagacctccttcttcatccataagtggactgtgccagtacaatacatgcctcagcccccaagcctagaaggacctctagtctccttcctgtgtggaatcttccccactccatccctcccaagttgcctgtattgataatgtactcactcatgctgtactaggtgctgaagcctggacacccttggtgggtgggcctgtggtgatggtttgcatccttcctcctttgtcccaataaagtatgggagttgaa

SEQ ID NO: 357532 - DNA, 2899 bp, Homo sapiens
ggccgactccaagcaagtttgtcggccttggggagtctggccccgttcctagtgctggagggggaagttgttgcctttcctgctccgtgggccggccccctctccctccagacccacctgggcatagtggacgcgggcttacccagcctccatgccaagtctagggggtcccagcgagtctgttgttaggggctttgggtcacaccctctgtggaattccttggcctgtgcagctcgggcctgccccccgaccttgctagggaggggtggagggtgaagctcccgggagctcattggcactagaggttctggccacgccctctccgcgagtccagtcccacgcgggatgaagagggcaccctccgccaagaggctgctgcgggacccgggtttcccctttccggcgccttccagcctcccaatcctcgggtctcgcctccctccgtctcctccctttcccctgtctgtctttccattggtccatgccgcccacgtgctccccggggctccgcaggcaggactgggccccggggcggtgcgctgggctgcacctccctccccgcgccccgtcctctcccgccctacaggccctagcagggcaggcgggaggtgagcgcggccatcccgctcccggagttccgggatcctggagtccgtagttcgtggtccttcgccggtgtccccggagcccagcggctgtggatggcagaagcccagagtgggactggtcagctgcaggagcagaagaaaggtcttctgatagccgtcagcgtctccgttgataaaatcatctcgcatttcggggccgcccggaacttggtgcagaaggcccagttgggtgatagccggctgagcccggatgtggggcacctggtgctgaccaccctctgcccggccctccacgccctggtggcggacgggctgaagcctttccggaaggacctcatcaccgggcagcgcaggagcagcccctggagcgtggtggaggcgtcggtgaagccaggctccagcacccgctcccttggaaccctgtatagccaggtcagccgtctagccccgctgagcagcagccgtagccgcttccatgcctttatcctgggcctcctcaacaccaagcagttggagctgtggttttccagtctccaggaagatgcaggcctgctctccctcctgtacctgccaacaggatttttctccctggcccgcggtggttgtccctccctgtccacagagctgctgctcctgctgcagccattgtcggtgctcactttccacctggacctgctctttgagcaccaccaccacctgcccctgggcccacctcaggcccctgcccctccaggcccacctccagctctgcagcagactatgcaagccatgctgcactttgggggccggctggcccagagccttcgggggacttccaaggaagctgcttcagacccctctgactctccaaaccttcccacaccagggagctggtgggagcagttgacccaggcctcccgggtctatgcctctgggggcactgagggctttcctctttcccgatgggcaccggggcgtcatgggactgcagctgaagaaggtgcacaggagagacccctgcccacagatgagatggcaccaggcaggggcctctggttgggaagactatttggagtgcctgggggccccgcagaaaatgagaatggagccctaaagtccaggagaccatctagctggctgcccccgacagtgagtgtgttggctcttgtgaagcggggggcacctcccgagatgccttctcctcaggagcttgaggcctcagcacccaggatggtgcaaacccatagggcagtgcgggctctctgtgatcacactgctgcaagacctgaccagttgagcttccggcgtggggaagtgctgcgtgtcatcaccacagtggatgaggactggctccgctgtgggcgggatggcatggagggtctggtgcctgtggggtatacctcccttgttctgtagccctgggaccctttcctgcgtatgtgtctccttcctgtcacctgggaatggaatggccagtgaacaccatcccagaagcattttccctctgcaaaatgacgtttcttcccacgtctgtttctgctaatatttaaaataaactttccttcttccctcctatacccacctgtaaggtgaaatctgctcttcttccaaatatataaaaaaggaattgccctccaggtaatccctttcctttttcccgtctatataagggaatgtcttccttcctatctatctgcaaaatggaaatctagacctccttcttcatccataagtggactgtgccagtacaatacatgcctcagcccccaagcctagaaggacctctagtctccttcctgtgtggaatcttccccactccatccctcccaagttgcctgtattgataatgtactcactcatgctgtactaggtgctgaagcctggacacccttggtgggtgggcctgtggtgatggtttgcatccttcctcctttgtcccaataaagtatgggagttgaaaaaaaaaaaacaaaaaacacacaaccgaacacaaacacaaaaaacaaaacaactccagaacacaacatacacacacaaggacacaaaaaagaattgcgggcggcgcggcgccgccgcggccccgaggaaagagttttctacaacacacactgggggggggggcgcggggcggccccaaagggagaatcacaacacgcgcgacacacatggctgtccgccaagagaacaccggggcacacaacaggggggggggtgctccccaaaaaaaacacagcggggggcccacgcggtgtcgaaaaaccccgggggggcgggggccacagggcctccccaggggccagaggggggaaag

SEQ ID NO: 357533 - DNA, 2186 bp, Homo sapiens
ggccgactccaagcaagtttgtcggccttggggagtctggccccgttcctagtgctggagggggaagttgttgcctttcctgctccgtgggccggccccctctccctccagacccacctgggcatagtggacgcgggcttacccagcctccatgccaagtctagggggtcccagcgagtctgttgttaggggctttgggtcacaccctctgtggaattccttggcctgtgcagctcgggcctgccccccgaccttgctagggaggggtggagggtgaagctcccgggagctcattggcactagaggttctggccacgccctctccgcgagtccagtcccacgcgggatgaagagggcaccctccgccaagaggctgctgcgggacccgggtttcccctttccggcgccttccagcctcccaatcctcgggtctcgcctccctccgtctcctccctttcccctgtctgtctttccattggtccatgccgcccacgtgctccccggggctccgcaggcaggactgggccccggggcggtgcgctgggctgcacctccctccccgcgccccgtcctctcccgccctacaggccctagcagggcaggcgggagtccgtagttcgtggtccttcgccggtgtccccggagcccagcggctgtggatggcagaagcccagagtgggactggtcagctgcaggagcagaagaaaggtcttctgatagccgtcagcgtctccgttgataaaatcatctcgcatttcggggccgcccggaacttggtgcagaaggcccagttgggtgatagccggctgagcccggatgtggggcacctggtgctgaccaccctctgcccggccctccacgccctggtggcggacgggctgaagcctttccggaaggacctcatcaccgggcagcgcaggagcagcccctggagcgtggtggaggcgtcggtgaagccaggctccagcacccgctcccttggaaccctgtatagccaggtcagccgtctagccccgctgagcagcagccgtagccgcttccatgcctttatcctgggcctcctcaacaccaagcagttggagctgtggttttccagtctccaggaagatgcagggagctggtgggagcagttgacccaggcctcccgggtctatgcctctgggggcactgagggctttcctctttcccgatgggcaccggggcgtcatgggactgcagctgaagaaggtgcacaggagagacccctgcccacagatgagatggcaccaggcaggggcctctggttgggaagactatttggagtgcctgggggccccgcagaaaatgagaatggagccctaaagtccaggagaccatctagctggctgcccccgacagtgagtgtgttggctcttgtgaagcggggggcacctcccgagatgccttctcctcaggagcttgaggcctcagcacccaggatggtgcaaacccatagggcagtgcgggctctctgtgatcacactgctgcaagacctgaccagttgagcttccggcgtggggaagtgctgcgtgtcatcaccacagtggatgaggactggctccgctgtgggcgggatggcatggagggtctggtgcctgtggggtatacctcccttgttctgtagccctgggaccctttcctgcgtatgtgtctccttcctgtcacctgggaatggaatggccagtgaacaccatcccagaagcattttccctctgcaaaatgacgtttcttcccacgtctgtttctgctaatatttaaaataaactttccttcttccctcctatacccacctgtaaggtgaaatctgctcttcttccaaatatataaaaaaggaattgccctccaggtaatccctttcctttttcccgtctatataagggaatgtcttccttcctatctatctgcaaaatggaaatctagacctccttcttcatccataagtggactgtgccagtacaatacatgcctcagcccccaagcctagaaggacctctagtctccttcctgtgtggaatcttccccactccatccctcccaagttgcctgtattgataatgtactcactcatgctgtactaggtgctgaagcctggacacccttggtgggtgggcctgtggtgatggtttgcatccttcctcctttgtcccaataaagtatgggagttgaa

SEQ ID NO: 357534 - DNA, 817 bp, Homo sapiens
ggcacaggacatctctttgaggtgaccgtctgcggcctgtagtcctgaccacaggctctgagctgcactggccccggtgctggcatctggtggagcggacccactcccctcacattccacaggcccatgcgtggattgccagctggcaatccacgcatggcggcgtggggaagtgctgcgtgtcatcaccacagtggatgaggactggctccgctgtgggcgggatggcatggagggtctggtgcctgtggggtatacctcccttgttctgtagccctgggaccctttcctgcgtatgtgtctccttcctgtcacctgggaatggaatggccagtgaacaccatcccagaagcattttccctctgcaaaatgacgtttcttcccacgtctgtttctgctaatatttaaaataaactttccttcttccctcctatacccacctgtaaggtgaaatctgctcttcttccaaatatataaaaaaggaattgccctccaggtaatccctttcctttttcccgtctatataagggaatgtcttccttcctatctatctgcaaaatggaaatctagacctccttcttcatccataagtggactgtgccagtacaatacatgcctcagcccccaagcctagaaggacctctagtctccttcctgtgtggaatcttccccactccatccctcccaagttgcctgtattgataatgtactcactcatgctgtactaggtgctgaagcctggacacccttggtgggtgggcctgtggtgatggtttgcatccttcctcctttgtcccaataaagtatgggagttgaa

SEQ ID NO: 357535 - DNA, 386 bp, Homo sapiens
cacgccctggtggcggacgggctgaagcctttccggaaggacctcatcaccgggcagcgcaggagcagcccctggagcgtggtggaggcgtcggtgaagccaggtgagccaggagggcgtgggacccggcagtgcgcagggcagggccgggcttggctgactgcaccccacgttctcaggctccagcacccgctcccttggaaccctgtatagccaggtcagccgtctagccccgctgagcagcagccgtagccgcttccatgcctttatcctgggcctcctcaagtgagttgccttctttccagtgcccttcccacgacctgggactgcaggagcgtcatgggtgggacacagtagtagtgcctcacatccccagagaaggcccc

SEQ ID NO: 357536 - DNA, 1515 bp, Homo sapiens
tctgtctcaaaaaaaaaaaaaaaaaaaagaaacttcagttaacagcctccttggtgctttaagcattcagcttccttcaggctggtaatttatataatccctgaaacgggcttcaggtcaaacccttaagacatctgaagctgcaacctggcctttggtgttgaaataggaaggtttaaggagaatctaagcattttagacttttttttataaatagacttattttcctttgtaatgtattggccttttagtgagtaaggctgggcagagggtgcttacaaccttgactccctttctccctggacttgatctgctgtttcagaggctaggttgtttctgtgggtgccttatcagggctgggatacttctgattctggcttccttcctgccccaccctcccgaccccagtccccctgatcctgctagaggcatgtctccttgcgtgtctaaaggtccctcatcctgtttgttttaggaatcctggtctcaggacctcatggaagaagagggggagagagttacaggttggacatgatgcacactatggggccccagcgacgtgtctggttgagctcagggaatatggttcttagccagtttcttggtgatatccagtggcacttgtaatggcgtcttcattcagttcatgcagggcaaaggcttactgataaacttgagtctgccctcgtatgagggtgtatacctggcctccctctgaggctggtgactcctccctgctggggccccacaggtgaggcagaacagctagagggcctccccgcctgcccgccttggctggctagcttgcctctcctgtgcgtatgggaacacctagcacgtgctggatgggctgcctctgactcagaggcatggccggatttggcaactcaacaaattagctggtctctgaattaagggggagacgaccttctctaagatgaacagggttcgccccagtcctcctgcctggagacagttgatgtgtcatgcagagctcttacttctccagcaacactcttcagtacataataagcttaactgataaacagaatatttagaaaggtgagacttgggcttaccattgggtttaaatcatagggacctagggcgagggttcagggcttctctggagcagatattgtcaagttcatggccttaggtagcatgtatctggtcttaactctgattgtagcaaaagttctgagaggagctgagccctgttgtggcccattaaagaacagggtcctcaggccctgcccgcttcctgtccactgccccctccccatccccagcccagccgagggaatcccgtgggttgcttacctacctataaggtggtttataagctgctgtcctggccactgcattcaaattccaatgtgtacttcatagtgtaaaaatttatattattgtgaggttttttgtctttttttttttttttttttttggtatattgctgtatctactttaacttccagaaataaacgttatataggaaccgtcaaaaaaaaaaca

SEQ ID NO: 357537 - DNA, 742 bp, Homo sapiens
tatcggattgcagtggtgcgatctcagctcactgcaacctctgcctcctaggttcaagcgattctcaaccaccttgcctcagctgatcagagtttctgtggaattctgtttgttaaatcaaattagctggtctctgaattaagggggagacgaccttctctaagatgaacagggttcgccccagtcctcctgcctggagacagttgatgtgtcatgcagagctcttacttctccagcaacactcttcagtacataataagcttaactgataaacagaatatttagaaaggtgagacttgggcttaccattgggtttaaatcatagggacctagggcgagggttcagggcttctctggagcagatattgtcaagttcatggccttaggtagcatgtatctggtcttaactctgattgtagcaaaagttctgagaggagctgagccctgttgtggcccattaaagaacagggtcctcaggccctgcccgcttcctgtccactgccccctccccatccccagcccagccgagggaatcccgtgggttgcttacctacctataaggtggtttataagctgctgtcctggccactgcattcaaattccaatgtgtacttcatagtgtaaaaatttatattattgtgaggttttttgtctttttttttttttttttttttggtatattgctgtatctactttaacttccagaaataaacgttatataggaaccgtcaaaaaaaaaaca

SEQ ID NO: 357538 - DNA, 1161 bp, Homo sapiens
tctgtctcaaaaaaaaaaaaaaaaaaaagaaacttcagttaacagcctccttggtgctttaagcattcagcttccttcaggctggtaatttatataatccctgaaacgggcttcaggtcaaacccttaagacatctgaagctgcaacctggcctttggtgttgaaataggaaggtttaaggagaatctaagcattttagacttttttttataaatagacttattttcctttgtaatgtattggccttttagtgagtaaggctgggcagagggtgcttacaaccttgactccctttctccctggacttgatctgctgtttcagaggctaggttgtttctgtgggtgccttatcagggctgggatacttctgattctggcttccttcctgccccaccaggtgaggcagaacagctagagggcctccccgcctgcccgccttggctggctagcttgcctctcctgtgcgtatgggaacacctagcacgtgctggatgggctgcctctgactcagaggcatggccggatttggcaactcaacaaattagctggtctctgaattaagggggagacgaccttctctaagatgaacagggttcgccccagtcctcctgcctggagacagttgatgtgtcatgcagagctcttacttctccagcaacactcttcagtacataataagcttaactgataaacagaatatttagaaaggtgagacttgggcttaccattgggtttaaatcatagggacctagggcgagggttcagggcttctctggagcagatattgtcaagttcatggccttaggtagcatgtatctggtcttaactctgattgtagcaaaagttctgagaggagctgagccctgttgtggcccattaaagaacagggtcctcaggccctgcccgcttcctgtccactgccccctccccatccccagcccagccgagggaatcccgtgggttgcttacctacctataaggtggtttataagctgctgtcctggccactgcattcaaattccaatgtgtacttcatagtgtaaaaatttatattattgtgaggttttttgtctttttttttttttttttttttggtatattgctgtatctactttaacttccagaaataaacgttatataggaaccgtcaaaaaaaaaaca

SEQ ID NO: 357539 - DNA, 1567 bp, Homo sapiens
tctgtctcaaaaaaaaaaaaaaaaaaaagaaacttcagttaacagcctccttggtgctttaagcattcagcttccttcaggctggtaatttatataatccctgaaacgggcttcaggtcaaacccttaagacatctgaagctgcaacctggcctttggtgttgaaataggaaggtttaaggagaatctaagcattttagacttttttttataaatagacttattttcctttgtaatgtattggccttttagtgagtaaggctgggcagagggtgcttacaaccttgactccctttctccctggacttgatctgctgtttcagaggctaggttgtttctgtgggtgccttatcagggctgggatacttctgattctggcttccttcctgccccaccctcccgaccccagtccccctgatcctgctagaggcatgtctccttgcgtgtctaaaggtccctcatcctgtttgttttaggaatcctggtctcaggacctcatggaagaagagggggagagagttacaggttggacatgatgcacactatggggccccagcgacgtgtctggttgagctcagggaatatggttcttagccagtttcttggtgatatccagtggcacttgtaatggcgtcttcattcagttcatgcagggcaaaggcttactgataaacttgagtctgccctcgtatgagggtgtatacctggcctccctctgaggctggtgactcctccctgctggggccccacaggtgaggcagaacagctagagggcctccccgcctgcccgccttggctggctagcttgcctctcctgtgcgtatgggaacacctagcacgtgctggatgggctgcctctgactcagaggcatggccggatttggcaactcaaaaccaccttgcctcagctgatcagagtttctgtggaattctgtttgttaaatcaaattagctggtctctgaattaagggggagacgaccttctctaagatgaacagggttcgccccagtcctcctgcctggagacagttgatgtgtcatgcagagctcttacttctccagcaacactcttcagtacataataagcttaactgataaacagaatatttagaaaggtgagacttgggcttaccattgggtttaaatcatagggacctagggcgagggttcagggcttctctggagcagatattgtcaagttcatggccttaggtagcatgtatctggtcttaactctgattgtagcaaaagttctgagaggagctgagccctgttgtggcccattaaagaacagggtcctcaggccctgcccgcttcctgtccactgccccctccccatccccagcccagccgagggaatcccgtgggttgcttacctacctataaggtggtttataagctgctgtcctggccactgcattcaaattccaatgtgtacttcatagtgtaaaaatttatattattgtgaggttttttgtctttttttttttttttttttttggtatattgctgtatctactttaacttccagaaataaacgttatataggaaccgtcaaaaaaaaaaca

SEQ ID NO: 357540 - DNA, 441 bp, Homo sapiens
tactactaagttcgcggccgtcagactcgccaaacaccccccacttagggacccacaaggacactcgatcacactgacttggtatcatcaccctcagcttcccaaggggagtcatggcttaggcaggatgccagagatatcctaaatcaaggtgaccgtggggcaactggcaccctttggggacagagggggcagccaagcctccaaagcactgtccctcccccagccctgtctgccctaaagagcccaccaaggtcagaatctcagccaagatttccccagtcggcccttactgagaagctcagccctgtcagtccccaccaggtcccctggaatgggtagccaccggacctggggaccggggcacctctgccagatggacttctagggacatcctcccccttgtacttgctaaataaagtgtcctcaagtttcacagag

SEQ ID NO: 357541 - DNA, 517 bp, Homo sapiens
aaggtttcatccaggcaggcgatgagcaaagcaacccaacccaggccctgcagcctcagtgcctagttctgctccgagagccaaacaagggatctgtctcccaagactcgccaaacaccccccacttagggacccacaaggacactcgatcacactgacttggtatcatcaccctcagcttcccaaggggagtcatggcttaggcaggatgccagagatatcctaaatcaaggtgaccgtggggcaactggcaccctttggggacagagggggcagccaagcctccaaagcactgtccctcccccagccctgtctgccctaaagagcccaccaaggtcagaatctcagccaagatttccccagtcggcccttactgagaagctcagccctgtcagtccccaccaggtcccctggaatgggtagccaccggacctggggaccggggcacctctgccagatggacttctagggacatcctcccccttgtacttgctaaataaagtgtcctcaagtttca

SEQ ID NO: 357542 - DNA, 619 bp, Homo sapiens
taactttttgataggttaaaaacttacaaaaaacgtggatagagggggtctgtcttgcccactagaccgatatggttaggttaggttaggttaggttaggttaggttagaacccgacattgtgctctgtacttcctagccattcattcgcttcaagtgctctgaaatttaatttaaaaaatcatagttggaatcctttcggtcactttctctttctcccttcgttcctccctttccctcttgattcttccttgaggcgcaaacacctgagagaggcttctgtccctcggcggtctccgtaagtaagtgaaccgttattggctggagggcgctgacgtctgattgttgcgcggtcgcatttttccggggagcgcggattcgcattcccaattttaggtggcagtcgcaacccatactattcggacagatggcacagaaaccgctgcgcctgtgagtgaccgtgaatggaagcctctctccctgtgtctctttcgtgtgtgtaggtgacgacacgggcgggagtctttcccatgacgggaagggagaaggaaaaggcggagagacacggggctgctggggagcttaggtgatgtctttgcctggccggggctgacctcttt

SEQ ID NO: 357543 - DNA, 2360 bp, Homo sapiens
taactttttgataggttaaaaacttacaaaaaacgtggatagagggggtctgtcttgcccactagaccgatatggttaggttaggttaggttaggttaggttaggttagaacccgacattgtgctctgtacttcctagccattcattcgcttcaagtgctctgaaatttaatttaaaaaatcatagttggaatcctttcggtcactttctctttctcccttcgttcctccctttccctcttgattcttccttgaggcgcaaacacctgagagaggcttctgtccctcggcggtctccgtaagtaagtgaaccgttattggctggagggcgctgacgtctgattgttgcgcggtcgcatttttccggggagcgcggattcgcattcccaattttaggtggcagtcgcaacccatactattcggacagatggcacagaaaccgctgcgcctcttggcttgtggagatgttgaaggaaagtttgatattttattcaatagagttcaagcaattcagaagaaaagtggaaactttgatctgctgttgtgtgtaggaaatttctttggctccacccaagatgctgaatgggaggagtataagactggcatcaagaaagctcctattcagacatatgtgcttggtgctaataaccaggaaacagtaaaatatttccaggatgctgatggatgtgaattagctgaaaacattacttatctgggtcgtaaaggtatcttcactggaagctcggggctgcagattgtgtacctcagtgggacagaatccttaaatgagccagtaccaggttatagttttagtcccaaggatgtgtcttctctgagaatgatgctgtgtacaacctcccagtttaagggtgttgatatcttgctcacatccccatggcccaagtgtgtggggaactttgggaattcttctggagaagtggataccaaaaaatgtggttctgctttggtttccagtcttgccacgggcttgaaaccaagataccattttgctgctttggaaaagacctattatgagaggcttccatatcgaaaccatatcattctacaggaaaatgcacagcatgccacccggtttatagctctggcaaatgttggaaatccagaaaagaaaaagtatctttacgcgttcagtattgttcccatgaagctaatggatgcagcagaactggtaaaacagcctccggatgtcactgaaaacccttacagaaaatctgggcaggaagcatccataggaaagcaaattcttgcccctgtggaagaatcagcctgtcagtttttctttgatttaaatgaaaagcagggaaggaagcgttcatccacaggtagagatagcaaatcttctcctcatccaaagcagcctcgcaaacctcctcagcctccaggaccctgctggttttgccttgctagccctgaagtggaaaaacatttggtggtcaacatcggcacacattgctaccttgccctggccaaaggaggcttatctgatgaccatgtcctcatcctgcctattggacactaccagtcagtggtggagctttcagcagaggtggtagaagaggtggagaagtataaggccactctgagacggttctttaagagtcgagggaaatggtgtgttgtatttgagagaaattataagagccatcacctccagctacaggtcattcctgtcccaatcagctgctctactactgatgacattaaagatgccttcattacccaggcacaggagcagcagatagagctgttggaaatcccagagcactctgacatcaagcagattgcacagccaggagcagcatatttttatgttgaacttgacacaggagaaaagcttttccacagaattaaaaagaattttcctttgcagtttggaagggaggtcctggccagtgaagccatccttaatgttcctgataagtctgactggaggcagtgtcagatcagcaaggaagacgaggagaccctggctcgccgcttccggaaagactttgagccctatgactttactctggatgactaaaacaaagggaagaactttttatgaactccacaggaagtagtaaagcttttttttttttttaattaaaagaattttttttgagacaaagtctcgctctgtcacccaagcaggattgcagtgagccaagatcgctccattgcactccagcctgggtgacagtgaaactccatctcaaaaataaaagaataaaagtatgtctgtcatccagctcctatgtctgttatccagctccaagtacagcttgtgtatatcaacattttcaaaaacctttaaactaccaaatgaaatccagatgtttttccatggttaaaaaaaaa

SEQ ID NO: 357544 - DNA, 2880 bp, Homo sapiens
taactttttgataggttaaaaacttacaaaaaacgtggatagagggggtctgtcttgcccactagaccgatatggttaggttaggttaggttaggttaggttaggttagaacccgacattgtgctctgtacttcctagccattcattcgcttcaagtgctctgaaatttaatttaaaaaatcatagttggaatcctttcggtcactttctctttctcccttcgttcctccctttccctcttgattcttccttgaggcgcaaacacctgagagaggcttctgtccctcggcggtctccgtaagtaagtgaaccgttattggctggagggcgctgacgtctgattgttgcgcggtcgcatttttccggggagcgcggattcgcattcccaattttaggtggcagtcgcaacccatactattcggacagatggcacagaaaccgctgcgcctcttggcttgtggagatgttgaaggaaagtttgatattttattcaatagagttcaagcaattcagaagaaaagtggaaactttgatctgctgttgtgtgtaggaaatttctttggctccacccaagatgctgaatgggaggagtataagactggcatcaagaaaggtcgtaaaggtatcttcactggaagctcggggctgcagattgtgtacctcagtgggacagaatccttaaatgagccagtaccaggttatagttttagtcccaaggatgtgtcttctctgagaatgatgctgtgtacaacctcccagtttaagggtgttgatatcttgctcacatccccatggcccaagtgtgtggggaactttgggaattcttctggagaagtggataccaaaaaatgtggttctgctttggtttccagtcttgccacgggcttgaaaccaagataccattttgctgctttggaaaagacctattatgagaggcttccatatcgaaaccatatcattctacaggaaaatgcacagcatgccacccggtttatagctctggcaaatgttggaaatccagaaaagaaaaagtatctttacgcgttcagtattgttcccatgaagctaatggatgcagcagaactggtaaaacagcctccggatgtcactgaaaacccttacagaaaatctgggcaggaagcatccataggaaagcaaattcttgcccctgtggaagaatcagcctgtcagtttttctttgatttaaatgaaaagcagggaaggaagcgttcatccacaggtagagatagcaaatcttctcctcatccaaagcagcctcgcaaacctcctcagcctccaggaccctgctggttttgccttgctagccctgaagtggaaaaacatttggtggtcaacatcggcacacattgctaccttgccctggccaaaggaggcttatctgatgaccatgtcctcatcctgcctattggacactaccagtcagtggtggagctttcagcagaggtggtagaagaggtggagaagtataaggccactctgagacggttctttaagagtcgagggaaatggtgtgttgtatttgagagaaattataagagccatcacctccagctacaggtcattcctgtcccaatcagctgctctactactgatgacattaaagatgccttcattacccaggcacaggagcagcagatagagctgttggaaatcccagagcactctgacatcaagcagattgcacagccaggagcagcatatttttatgttgaacttgacacaggagaaaagcttttccacagaattaaaaagaattttcctttgcagtttggaagggaggtcctggccagtgaagccatccttaatgttcctgataagtctgactggaggcagtgtcagatcagcaaggaagacgaggagaccctggctcgccgcttccggaaagactttgagccctatgactttactctggatgactaaaacaaagggaagaactttttatgaactccacaggaagtagtaaagcttttttttttttttaattaaaagaattttttttgagacaaagtctcgctctgtcacccaagcaggattgcagtggcataactgtggctcactgtagcctcaacctcctgggctctagagttcctcccacctcagcctcatgagtagctgggaccacaggcgcatgctaccatgcctggcaaacttttttgattttttatagagacaggagggtctccctgtgttgcccaggctggtctgtaatgcctaggctcaagggatcctctgccttggcttcttaacctgctgggattacaagcatgagacaccattcctggcctagaagcctatttttaaagaaactacaatctcccatggggactgtttccctgcctcttttgtgcagtcccatggaacttgcctacagcaagaggcctaagattgaatctttttggggaaaagtcattctaggatgaaaatcctatgttaaggccgggcgcagtggctcacgcctgtaatcccagtactttgggaagccgaggcaggtggatcacctgaggtgaggagtttgagaccagcctggccaacatggtgaaaccccgtctttactaaagctacaaaaattagctgggcgtggtgccaggcacttgtggtcccagctactcaggaggctgaggcaggagaattgcttgagcctgggaggtggaggttgcaggtgagccaagatcgctccattgcactccagcctgggtgacagtgaaactccatctcaaaaataaaagaataaaagtatgtctgtcatccagctcctatgtctgttatccagctccaagtacagcttgtgtatatcaacattttcaaaaacctttaaactaccaaatgaaatccagatgtttttccatggttaaaaaaaaa

SEQ ID NO: 357545 - DNA, 2665 bp, Homo sapiens
taactttttgataggttaaaaacttacaaaaaacgtggatagagggggtctgtcttgcccactagaccgatatggttaggttaggttaggttaggttaggttaggttagaacccgacattgtgctctgtacttcctagccattcattcgcttcaagtgctctgaaatttaatttaaaaaatcatagttggaatcctttcggtcactttctctttctcccttcgttcctccctttccctcttgattcttccttgaggcgcaaacacctgagagaggcttctgtccctcggcggtctccgtaagtaagtgaaccgttattggctggagggcgctgacgtctgattgttgcgcggtcgcatttttccggggagcgcggattcgcattcccaattttaggtggcagtcgcaacccatactattcggacagatggcacagaaaccgctgcgcctcttggcttgtggagatgttgaaggaaagtttgatattttattcaatagagttcaagcaattcagaagaaaagtggaaactttgatctgctgttgtgtgtaggaaatttctttggctccacccaagatgctgaatgggaggagtataagactggcatcaagaaagggagaagtggataccaaaaaatgtggttctgctttggtttccagtcttgccacgggcttgaaaccaagataccattttgctgctttggaaaagacctattatgagaggcttccatatcgaaaccatatcattctacaggaaaatgcacagcatgccacccggtttatagctctggcaaatgttggaaatccagaaaagaaaaagtatctttacgcgttcagtattgttcccatgaagctaatggatgcagcagaactggtaaaacagcctccggatgtcactgaaaacccttacagaaaatctgggcaggaagcatccataggaaagcaaattcttgcccctgtggaagaatcagcctgtcagtttttctttgatttaaatgaaaagcagggaaggaagcgttcatccacaggtagagatagcaaatcttctcctcatccaaagcagcctcgcaaacctcctcagcctccaggaccctgctggttttgccttgctagccctgaagtggaaaaacatttggtggtcaacatcggcacacattgctaccttgccctggccaaaggaggcttatctgatgaccatgtcctcatcctgcctattggacactaccagtcagtggtggagctttcagcagaggtggtagaagaggtggagaagtataaggccactctgagacggttctttaagagtcgagggaaatggtgtgttgtatttgagagaaattataagagccatcacctccagctacaggtcattcctgtcccaatcagctgctctactactgatgacattaaagatgccttcattacccaggcacaggagcagcagatagagctgttggaaatcccagagcactctgacatcaagcagattgcacagccaggagcagcatatttttatgttgaacttgacacaggagaaaagcttttccacagaattaaaaagaattttcctttgcagtttggaagggaggtcctggccagtgaagccatccttaatgttcctgataagtctgactggaggcagtgtcagatcagcaaggaagacgaggagaccctggctcgccgcttccggaaagactttgagccctatgactttactctggatgactaaaacaaagggaagaactttttatgaactccacaggaagtagtaaagcttttttttttttttaattaaaagaattttttttgagacaaagtctcgctctgtcacccaagcaggattgcagtggcataactgtggctcactgtagcctcaacctcctgggctctagagttcctcccacctcagcctcatgagtagctgggaccacaggcgcatgctaccatgcctggcaaacttttttgattttttatagagacaggagggtctccctgtgttgcccaggctggtctgtaatgcctaggctcaagggatcctctgccttggcttcttaacctgctgggattacaagcatgagacaccattcctggcctagaagcctatttttaaagaaactacaatctcccatggggactgtttccctgcctcttttgtgcagtcccatggaacttgcctacagcaagaggcctaagattgaatctttttggggaaaagtcattctaggatgaaaatcctatgttaaggccgggcgcagtggctcacgcctgtaatcccagtactttgggaagccgaggcaggtggatcacctgaggtgaggagtttgagaccagcctggccaacatggtgaaaccccgtctttactaaagctacaaaaattagctgggcgtggtgccaggcacttgtggtcccagctactcaggaggctgaggcaggagaattgcttgagcctgggaggtggaggttgcaggtgagccaagatcgctccattgcactccagcctgggtgacagtgaaactccatctcaaaaataaaagaataaaagtatgtctgtcatccagctcctatgtctgttatccagctccaagtacagcttgtgtatatcaacattttcaaaaacctttaaactaccaaatgaaatccagatgtttttccatggttaaaaaaaaa

SEQ ID NO: 357546 - DNA, 2043 bp, Homo sapiens
taactttttgataggttaaaaacttacaaaaaacgtggatagagggggtctgtcttgcccactagaccgatatggttaggttaggttaggttaggttaggttaggttagaacccgacattgtgctctgtacttcctagccattcattcgcttcaagtgctctgaaatttaatttaaaaaatcatagttggaatcctttcggtcactttctctttctcccttcgttcctccctttccctcttgattcttccttgaggcgcaaacacctgagagaggcttctgtccctcggcggtctccgtaagtaagtgaaccgttattggctggagggcgctgacgtctgattgttgcgcggtcgcatttttccggggagcgcggattcgcattcccaattttaggtggcagtcgcaacccatactattcggacagatggcacagaaaccgctgcgcctcttggcttgtggagatgttgaaggaaagtttgatattttattcaatagagttcaagcaattcagaagaaaagtggaaactttgatctgctgttgtgtgtaggaaatttctttggctccacccaagatgctgaatgggaggagtataagactggcatcaagaaagggagaagtggataccaaaaaatgtggttctgctttggtttccagtcttgccacgggcttgaaaccaagataccattttgctgctttggaaaagacctattatgagaggcttccatatcgaaaccatatcattctacaggaaaatgcacagcatgccacccggtttatagctctggcaaatgttggaaatccagaaaagaaaaagtatctttacgcgttcagtattgttcccatgaagctaatggatgcagcagaactggtaaaacagcctccggatgtcactgaaaacccttacagaaaatctgggcaggaagcatccataggaaagcaaattcttgcccctgtggaagaatcagcctgtcagtttttctttgatttaaatgaaaagcagggaaggaagcgttcatccacaggtagagatagcaaatcttctcctcatccaaagcagcctcgcaaacctcctcagcctccaggaccctgctggttttgccttgctagccctgaagtggaaaaacatttggtggtcaacatcggcacacattgctaccttgccctggccaaaggaggcttatctgatgaccatgtcctcatcctgcctattggacactaccagtcagtggtggagctttcagcagaggtggtagaagaggtggagaagtataaggccactctgagacggttctttaagagtcgagggaaatggtgtgttgtatttgagagaaattataagagccatcacctccagctacaggtcattcctgtcccaatcagctgctctactactgatgacattaaagatgccttcattacccaggcacaggagcagcagatagagctgttggaaatcccagagcactctgacatcaagcagattgcacagccaggagcagcatatttttatgttgaacttgacacaggagaaaagcttttccacagaattaaaaagaattttcctttgcagtttggaagggaggtcctggccagtgaagccatccttaatgttcctgataagtctgactggaggcagtgtcagatcagcaaggaagacgaggagaccctggctcgccgcttccggaaagactttgagccctatgactttactctggatgactaaaacaaagggaagaactttttatgaactccacaggaagtagtaaagcttttttttttttttaattaaaagaattttttttgagacaaagtctcgctctgtcacccaagcaggattgcagtgagccaagatcgctccattgcactccagcctgggtgacagtgaaactccatctcaaaaataaaagaataaaagtatgtctgtcatccagctcctatgtctgttatccagctccaagtacagcttgtgtatatcaacattttcaaaaacctttaaactaccaaatgaaatccagatgtttttccatggttaaaaaaaaa

SEQ ID NO: 357547 - DNA, 1925 bp, Homo sapiens
agatgaacctggcatgtagtgaggacaagtgttgatgtatgactgagacttcaggcatcagaactgggaagatattttgcttccctagagtgtgcagaaaggactgagaagaaagataggtatggcatggcaggaatgttcccttgtatgtgagtggtcggctacttatctaaaggttagttgaataacatttaatcttctgcttttggccattccaggaagaatcagcctgtcagtttttctttgatttaaatgaaaagcagggaaggaagcgttcatccacaggtagagatagcaaatcttctcctcatccaaagcagcctcgcaaacctcctcagcctccaggaccctgctggttttgccttgctagccctgaagtggaaaaacatttggtggtcaacatcggcacacattgctaccttgccctggccaaaggaggcttatctgatgaccatgtcctcatcctgcctattggacactaccagtcagtggtggagctttcagcagaggtggtagaagaggtggagaagtataaggccactctgagacggttctttaagagtcgagggaaatggtgtgttgtatttgagagaaattataagagccatcacctccagctacaggtcattcctgtcccaatcagctgctctactactgatgacattaaagatgccttcattacccaggcacaggagcagcagatagagctgttggaaatcccagagcactctgacatcaagcagattgcacagccaggagcagcatatttttatgttgaacttgacacaggagaaaagcttttccacagaattaaaaagaattttcctttgcagtttggaagggaggtcctggccagtgaagccatccttaatgttcctgataagtctgactggaggcagtgtcagatcagcaaggaagacgaggagaccctggctcgccgcttccggaaagactttgagccctatgactttactctggatgactaaaacaaagggaagaactttttatgaactccacaggaagtagtaaagcttttttttttttttaattaaaagaattttttttgagacaaagtctcgctctgtcacccaagcaggattgcagtggcataactgtggctcactgtagcctcaacctcctgggctctagagttcctcccacctcagcctcatgagtagctgggaccacaggcgcatgctaccatgcctggcaaacttttttgattttttatagagacaggagggtctccctgtgttgcccaggctggtctgtaatgcctaggctcaagggatcctctgccttggcttcttaacctgctgggattacaagcatgagacaccattcctggcctagaagcctatttttaaagaaactacaatctcccatggggactgtttccctgcctcttttgtgcagtcccatggaacttgcctacagcaagaggcctaagattgaatctttttggggaaaagtcattctaggatgaaaatcctatgttaaggccgggcgcagtggctcacgcctgtaatcccagtactttgggaagccgaggcaggtggatcacctgaggtgaggagtttgagaccagcctggccaacatggtgaaaccccgtctttactaaagctacaaaaattagctgggcgtggtgccaggcacttgtggtcccagctactcaggaggctgaggcaggagaattgcttgagcctgggaggtggaggttgcaggtgagccaagatcgctccattgcactccagcctgggtgacagtgaaactccatctcaaaaataaaagaataaaagtatgtctgtcatccagctcctatgtctgttatccagctccaagtacagcttgtgtatatcaacattttcaaaaacctttaaactaccaaatgaaatccagatgtttttccatggttaaaaaaaaa

SEQ ID NO: 357548 - DNA, 2479 bp, Homo sapiens
taactttttgataggttaaaaacttacaaaaaacgtggatagagggggtctgtcttgcccactagaccgatatggttaggttaggttaggttaggttaggttaggttagaacccgacattgtgctctgtacttcctagccattcattcgcttcaagtgctctgaaatttaatttaaaaaatcatagttggaatcctttcggtcactttctctttctcccttcgttcctccctttccctcttgattcttccttgaggcgcaaacacctgagagaggcttctgtccctcggcggtctccgtaagtaagtgaaccgttattggctggagggcgctgacgtctgattgttgcgcggtcgcatttttccggggagcgcggattcgcattcccaattttaggtggcagtcgcaacccatactattcggacagatggcacagaaaccgctgcgcctcttggcttgtggagatgttgaaggaaagtttgatattttattcaatagagttcaagcaattcagaagaaaagtggaaactttgatctgctgttgtgtgtaggaaatttctttggctccacccaagatgctgaatgggaggagtataagactggcatcaagaaagctcctattcagacatatgtgcttggtgctaataaccaggaaacagtaaaatatttccaggatgctgatggatgtgaattagctgaaaacattacttatctgggtcgtaaaggtatcttcactggaagctcggggctgcagattgtgtacctcagtgggacagaatccttaaatgagccagtaccaggttatagttttagtcccaaggatgtgtcttctctgagaatgatgctgtgtacaacctcccagtttaagggtgttgatatcttgctcacatccccatggcccaagtgtgtggggaactttgggaattcttctggagaagtggataccaaaaaatgtggttctgctttggtttccagtcttgccacgggcttgaaaccaagataccattttgctgctttggaaaagacctattatgagaggcttccatatcgaaaccatatcattctacaggaaaatgcacagcatgccacccggtttatagctctggcaaatgttggaaatccagaaaagaaaaagtatctttacgcgttcagtattgttcccatgaagctaatggatgcagcagaactggtaaaacagcctccggatgtcactgaaaacccttacagaaaatctgggcaggaagcatccataggaaagcaaattcttgcccctgtggaagaatcagcctgtcagtttttctttgatttaaatgaaaagcagggaaggaagcgttcatccacaggtagagatagcaaatcttctcctcatccaaagcagcctcgcaaacctcctcagcctccaggaccctgctggttttgccttgctagccctgaagtggaaaaacatttggtggtcaacatcggcacacattgctaccttgccctggccaaaggaggcttatctgatgaccatgtcctcatcctgcctattggacactaccagtcagtggtggagctttcagcagaggtggtagaagaggtggagaagtataaggccactctgagacggttctttaagagtcgagggaaatggtgtgttgtatttgagagaaattataagagccatcacctccagctacaggtcattcctgtcccaatcagctgctctactactgatgacattaaagatgccttcattacccaggcacaggagcagcagatagagctgttggaaatcccagagcactctgacatcaagcagattgcacagccaggagcagcatatttttatgttgaacttgacacaggagaaaagcttttccacagaattaaaaagaattttcctttgcagtttggaagggaggtcctggccagtgaagccatccttaatgttcctgataagtctgactggaggcagtgtcagatcagcaaggaagacgaggagaccctggctcgccgcttccggaaagactttgagccctatgactttactctggatgactaaaacaaagggaagaactttttatgaactccacaggaagtagtaaagcttttttttttttttaattaaaagaattttttttgagacaaagtctcgctctgtcacccaagcaggattgcagtggcataactgtggctcactgtagcctcaacctcctgggctctagagttcctcccacctcagctactcaggaggctgaggcaggagaattgcttgagcctgggaggtggaggttgcaggtgagccaagatcgctccattgcactccagcctgggtgacagtgaaactccatctcaaaaataaaagaataaaagtatgtctgtcatccagctcctatgtctgttatccagctccaagtacagcttgtgtatatcaacattttcaaaaacctttaaactaccaaatgaaatccagatgtttttccatggttaaaaaaaaa

SEQ ID NO: 357549 - DNA, 1634 bp, Homo sapiens
gttgtggtggttttctttttggcacatttgttaagttttcaaatgggcctaactctgccacatatataatatcggagatggcaaaggcttgtgacggagatatctctcttaagcctttcctgcatcagagaatggctcccacatgtgtcaggctatctcataagtttaagtccttacagacaggctgacacaggcttgtctggcctgaggatattctgtgctgaggggtgtttctccacccctgtgatggatttgctacttctcagagactgtgcaggcacaacttctctgggacctgcacaaggaatttctcctgtctccccaacccccaggtcattcctgtcccaatcagctgctctactactgatgacattaaagatgccttcattacccaggcacaggagcagcagatagagctgttggaaatcccagagcactctgacatcaagcagattgcacagccaggagcagcatatttttatgttgaacttgacacaggagaaaagcttttccacagaattaaaaagaattttcctttgcagtttggaagggaggtcctggccagtgaagccatccttaatgttcctgataagtctgactggaggcagtgtcagatcagcaaggaagacgaggagaccctggctcgccgcttccggaaagactttgagccctatgactttactctggatgactaaaacaaagggaagaactttttatgaactccacaggaagtagtaaagcttttttttttttttaattaaaagaattttttttgagacaaagtctcgctctgtcacccaagcaggattgcagtggcataactgtggctcactgtagcctcaacctcctgggctctagagttcctcccacctcagcctcatgagtagctgggaccacaggcgcatgctaccatgcctggcaaacttttttgattttttatagagacaggagggtctccctgtgttgcccaggctggtctgtaatgcctaggctcaagggatcctctgccttggcttcttaacctgctgggattacaagcatgagacaccattcctggcctagaagcctatttttaaagaaactacaatctcccatggggactgtttccctgcctcttttgtgcagtcccatggaacttgcctacagcaagaggcctaagattgaatctttttggggaaaagtcattctaggatgaaaatcctatgttaaggccgggcgcagtggctcacgcctgtaatcccagtactttgggaagccgaggcaggtggatcacctgaggtgaggagtttgagaccagcctggccaacatggtgaaaccccgtctttactaaagctacaaaaattagctgggcgtggtgccaggcacttgtggtcccagctactcaggaggctgaggcaggagaattgcttgagcctgggaggtggaggttgcaggtgagccaagatcgctccattgcactccagcctgggtgacagtgaaactccatctcaaaaataaaagaataaaagtatgtctgtcatccagctcctatgtctgttatccagctccaagtacagcttgtgtatatcaacattttcaaaaacctttaaactaccaaatgaaatccagatgtttttccatggttaaaaaaaaa

SEQ ID NO: 357550 - DNA, 959 bp, Homo sapiens
taactttttgataggttaaaaacttacaaaaaacgtggatagagggggtctgtcttgcccactagaccgatatggttaggttaggttaggttaggttaggttaggttagaacccgacattgtgctctgtacttcctagccattcattcgcttcaagtgctctgaaatttaatttaaaaaatcatagttggaatcctttcggtcactttctctttctcccttcgttcctccctttccctcttgattcttccttgaggcgcaaacacctgagagaggcttctgtccctcggcggtctccgtaagtaagtgaaccgttattggctggagggcgctgacgtctgattgttgcgcggtcgcatttttccggggagcgcggattcgcattcccaattttaggtggcagtcgcaacccatactattcggacagatggcacagaaaccgctgcgcctcttggcttgtggagatgttgaaggaaagtttgatattttattcaatagagttcaagcaattcagaagaaaagtggaaactttgatctgctgttgtgtgtaggaaatttctttggctccacccaagatgctgaatgggaggagtataagactggcatcaagaaagctcctattcagacatatgtgcttggtgctaataaccaggaaacagtaaaatatttccaggatgctgatggatgtgaattagctgaaaacattacttatctgggtcgtaaaggtatcttcactggaagctcggggctgcagattgtgtacctcagtgggacagaatccttaaatgagccagtaccaggttatagttttagtcccaaggatgtgtcttctctgagaatgatgctgtgtacaacctcccagtttaagggtgttgatatcttgctcacatccccatggcccaagtgtgtggggaactttgggaattcttctgtgagtagtgtttgtttagttggaatttc

SEQ ID NO: 357551 - DNA, 1241 bp, Homo sapiens
taactttttgataggttaaaaacttacaaaaaacgtggatagagggggtctgtcttgcccactagaccgatatggttaggttaggttaggttaggttaggttaggttagaacccgacattgtgctctgtacttcctagccattcattcgcttcaagtgctctgaaatttaatttaaaaaatcatagttggaatcctttcggtcactttctctttctcccttcgttcctccctttccctcttgattcttccttgaggcgcaaacacctgagagaggcttctgtccctcggcggtctccgtaagtaagtgaaccgttattggctggagggcgctgacgtctgattgttgcgcggtcgcatttttccggggagcgcggattcgcattcccaattttaggtggcagtcgcaacccatactattcggacagatggcacagaaaccgctgcgcctggagaagtggataccaaaaaatgtggttctgctttggtttccagtcttgccacgggcttgaaaccaagataccattttgctgctttggaaaagacctattatgagaggcttccatatcgaaaccatatcattctacaggaaaatgcacagcatgccacccggtttatagctctggcaaatgttggaaatccagaaaagaaaaagatggagtctctgtctattgcccaggctggagtgtagtggcacgatctcggcttactgcaacctccacctcccatgttcaagcgattctcctgcctcagcctcctgagtagctggaactatagtatctttacgcgttcagtattgttcccatgaagctaatggatgcagcagaactggtaaaacagcctccggatgtcactgaaaacccttacagaaaatctgggcaggaagcatccataggaaagcaaattcttgcccctgtggaagaatcagcctgtcagtttttctttgatttaaatgaaaagcagggaaggaagcgttcatccacaggtagagatagcaaatcttctcctcatccaaagcagcctcgcaaacctcctcagcctccaggaccctgctggttttgccttgactccagcctgggtgacagtgaaactccatctcaaaaataaaagaataaaagtatgtctgtcatccagctcctatgtctgttatccagctccaagtacagcttgtgtatatcaacattttcaaaaacctttaaactaccaaatgaaatccagatgtttttccatggttaaaaaaaaa

SEQ ID NO: 357552 - DNA, 2982 bp, Homo sapiens
taactttttgataggttaaaaacttacaaaaaacgtggatagagggggtctgtcttgcccactagaccgatatggttaggttaggttaggttaggttaggttaggttagaacccgacattgtgctctgtacttcctagccattcattcgcttcaagtgctctgaaatttaatttaaaaaatcatagttggaatcctttcggtcactttctctttctcccttcgttcctccctttccctcttgattcttccttgaggcgcaaacacctgagagaggcttctgtccctcggcggtctccgtaagtaagtgaaccgttattggctggagggcgctgacgtctgattgttgcgcggtcgcatttttccggggagcgcggattcgcattcccaattttaggtggcagtcgcaacccatactattcggacagatggcacagaaaccgctgcgcctcttggcttgtggagatgttgaaggaaagtttgatattttattcaatagagttcaagcaattcagaagaaaagtggaaactttgatctgctgttgtgtgtaggaaatttctttggctccacccaagatgctgaatgggaggagtataagactggcatcaagaaagctcctattcagacatatgtgcttggtgctaataaccaggaaacagtaaaatatttccaggatgctgatggatgtgaattagctgaaaacattacttatctgggtcgtaaaggtatcttcactggaagctcggggctgcagattgtgtacctcagtgggacagaatccttaaatgagccagtaccaggttatagttttagtcccaaggatgtgtcttctctgagaatgatgctgtgtacaacctcccagtttaagggtgttgatatcttgctcacatccccatggcccaagtgtgtggggaactttgggaattcttctggagaagtggataccaaaaaatgtggttctgctttggtttccagtcttgccacgggcttgaaaccaagataccattttgctgctttggaaaagacctattatgagaggcttccatatcgaaaccatatcattctacaggaaaatgcacagcatgccacccggtttatagctctggcaaatgttggaaatccagaaaagaaaaagtatctttacgcgttcagtattgttcccatgaagctaatggatgcagcagaactggtaaaacagcctccggatgtcactgaaaacccttacagaaaatctgggcaggaagcatccataggaaagcaaattcttgcccctgtggaagaatcagcctgtcagtttttctttgatttaaatgaaaagcagggaaggaagcgttcatccacaggtagagatagcaaatcttctcctcatccaaagcagcctcgcaaacctcctcagcctccaggaccctgctggttttgccttgctagccctgaagtggaaaaacatttggtggtcaacatcggcacacattgctaccttgccctggccaaaggaggcttatctgatgaccatgtcctcatcctgcctattggacactaccagtcagtggtggagctttcagcagaggtggtagaagaggtggagaagtataaggccactctgagacggttctttaagagtcgagggaaatggtgtgttgtatttgagagaaattataagagccatcacctccagctacaggtcattcctgtcccaatcagctgctctactactgatgacattaaagatgccttcattacccaggcacaggagcagcagatagagctgttggaaatcccagagcactctgacatcaagcagattgcacagccaggagcagcatatttttatgttgaacttgacacaggagaaaagcttttccacagaattaaaaagaattttcctttgcagtttggaagggaggtcctggccagtgaagccatccttaatgttcctgataagtctgactggaggcagtgtcagatcagcaaggaagacgaggagaccctggctcgccgcttccggaaagactttgagccctatgactttactctggatgactaaaacaaagggaagaactttttatgaactccacaggaagtagtaaagcttttttttttttttaattaaaagaattttttttgagacaaagtctcgctctgtcacccaagcaggattgcagtggcataactgtggctcactgtagcctcaacctcctgggctctagagttcctcccacctcagcctcatgagtagctgggaccacaggcgcatgctaccatgcctggcaaacttttttgattttttatagagacaggagggtctccctgtgttgcccaggctggtctgtaatgcctaggctcaagggatcctctgccttggcttcttaacctgctgggattacaagcatgagacaccattcctggcctagaagcctatttttaaagaaactacaatctcccatggggactgtttccctgcctcttttgtgcagtcccatggaacttgcctacagcaagaggcctaagattgaatctttttggggaaaagtcattctaggatgaaaatcctatgttaaggccgggcgcagtggctcacgcctgtaatcccagtactttgggaagccgaggcaggtggatcacctgaggtgaggagtttgagaccagcctggccaacatggtgaaaccccgtctttactaaagctacaaaaattagctgggcgtggtgccaggcacttgtggtcccagctactcaggaggctgaggcaggagaattgcttgagcctgggaggtggaggttgcaggtgagccaagatcgctccattgcactccagcctgggtgacagtgaaactccatctcaaaaataaaagaataaaagtatgtctgtcatccagctcctatgtctgttatccagctccaagtacagcttgtgtatatcaacattttcaaaaacctttaaactaccaaatgaaatccagatgtttttccatggttaaaaaaaaa

SEQ ID NO: 357553 - DNA, 2485 bp, Homo sapiens
taactttttgataggttaaaaacttacaaaaaacgtggatagagggggtctgtcttgcccactagaccgatatggttaggttaggttaggttaggttaggttaggttagaacccgacattgtgctctgtacttcctagccattcattcgcttcaagtgctctgaaatttaatttaaaaaatcatagttggaatcctttcggtcactttctctttctcccttcgttcctccctttccctcttgattcttccttgaggcgcaaacacctgagagaggcttctgtccctcggcggtctccgtaagtaagtgaaccgttattggctggagggcgctgacgtctgattgttgcgcggtcgcatttttccggggagcgcggattcgcattcccaattttaggtggcagtcgcaacccatactattcggacagatggcacagaaaccgctgcgcctggagaagtggataccaaaaaatgtggttctgctttggtttccagtcttgccacgggcttgaaaccaagataccattttgctgctttggaaaagacctattatgagaggcttccatatcgtttagcattcagatcttctcttctccctgactgcaaggtctcagcagtttcggagactcctttgtaaagtatctttacgcgttcagtattgttcccatgaagctaatggatgcagcagaactggtaaaacagcctccggatgtcactgaaaacccttacagaaaatctgggcaggaagcatccataggaaagcaaattcttgcccctgtggaagaatcagcctgtcagtttttctttgatttaaatgaaaagcagggaaggaagcgttcatccacaggtagagatagcaaatcttctcctcatccaaagcagcctcgcaaacctcctcagcctccaggaccctgctggttttgccttgctagccctgaagtggaaaaacatttggtggtcaacatcggcacacattgctaccttgccctggccaaaggaggcttatctgatgaccatgtcctcatcctgcctattggacactaccagtcagtggtggagctttcagcagaggtggtagaagaggtggagaagtataaggccactctgagacggttctttaagagtcgagggaaatggtgtgttgtatttgagagaaattataagagccatcacctccagctacaggtcattcctgtcccaatcagctgctctactactgatgacattaaagatgccttcattacccaggcacaggagcagcagatagagctgttggaaatcccagagcactctgacatcaagcagattgcacagccaggagcagcatatttttatgttgaacttgacacaggagaaaagcttttccacagaattaaaaagaattttcctttgcagtttggaagggaggtcctggccagtgaagccatccttaatgttcctgataagtctgactggaggcagtgtcagatcagcaaggaagacgaggagaccctggctcgccgcttccggaaagactttgagccctatgactttactctggatgactaaaacaaagggaagaactttttatgaactccacaggaagtagtaaagcttttttttttttttaattaaaagaattttttttgagacaaagtctcgctctgtcacccaagcaggattgcagtggcataactgtggctcactgtagcctcaacctcctgggctctagagttcctcccacctcagcctcatgagtagctgggaccacaggcgcatgctaccatgcctggcaaacttttttgattttttatagagacaggagggtctccctgtgttgcccaggctggtctgtaatgcctaggctcaagggatcctctgccttggcttcttaacctgctgggattacaagcatgagacaccattcctggcctagaagcctatttttaaagaaactacaatctcccatggggactgtttccctgcctcttttgtgcagtcccatggaacttgcctacagcaagaggcctaagattgaatctttttggggaaaagtcattctaggatgaaaatcctatgttaaggccgggcgcagtggctcacgcctgtaatcccagtactttgggaagccgaggcaggtggatcacctgaggtgaggagtttgagaccagcctggccaacatggtgaaaccccgtctttactaaagctacaaaaattagctgggcgtggtgccaggcacttgtggtcccagctactcaggaggctgaggcaggagaattgcttgagcctgggaggtggaggttgcaggtgagccaagatcgctccattgcactccagcctgggtgacagtgaaactccatctcaaaaataaaagaataaaagtatgtctgtcatccagctcctatgtctgttatccagctccaagtacagcttgtgtatatcaacattttcaaaaacctttaaactaccaaatgaaatccagatgtttttccatggttaaaaaaaaa

SEQ ID NO: 357554 - DNA, 2862 bp, Homo sapiens
taactttttgataggttaaaaacttacaaaaaacgtggatagagggggtctgtcttgcccactagaccgatatggttaggttaggttaggttaggttaggttaggttagaacccgacattgtgctctgtacttcctagccattcattcgcttcaagtgctctgaaatttaatttaaaaaatcatagttggaatcctttcggtcactttctctttctcccttcgttcctccctttccctcttgattcttccttgaggcgcaaacacctgagagaggcttctgtccctcggcggtctccgtaagtaagtgaaccgttattggctggagggcgctgacgtctgattgttgcgcggtcgcatttttccggggagcgcggattcgcattcccaattttaggtggcagtcgcaacccatactattcggacagatggcacagaaaccgctgcgcctcttggcttgtggagatgttgaaggaaagtttgatattttattcaatagagttcaagcaattcagaagaaaagtggaaactttgatctgctgttgtgtgtaggaaatttctttggctccacccaagatgctgaatgggaggagtataagactggcatcaagaaagctcctattcagacatatgtgcttggtgctaataaccaggaaacagtaaaatatttccaggatgctgatggatgtgaattagctgaaaacattacttatctgggtcgtaaaggtatcttcactggaagctcggggctgcagattgtgtacctcagtgggacagaatccttaaatgagccagtaccaggttatagttttagtcccaaggatgtgtcttctctgagaatgatgctgtgtacaacctcccagtttaagggtgttgatatcttgctcacatccccatggcccaagtgtgtggggaactttgggaattcttctggagaagtggataccaaaaaatgtggttctgctttggtttccagtcttgccacgggcttgaaaccaagataccattttgctgctttggaaaagacctattatgagaggcttccatatcgaaaccatatcattctacaggaaaatgcacagcatgccacccggtttatagctctggcaaatgttggaaatccagaaaagaaaaagtatctttacgcgttcagtattgttcccatgaagctaatggatgcagcagaactggtaaaacagcctccggatgtcactgaaaacccttacagaaaatctgggcaggaagcatccataggaaagcaaattcttgcccctgtggaagaatcagcctgtcagtttttctttgatttaaatgaaaagcagggaaggaagcgttcatccacaggtagagatagcaaatcttctcctcatccaaagcagcctcgcaaacctcctcagcctccaggaccctgctggttttgccttgctagccctgaagtggaaaaacatttggtggtcaacatcggcacacattgctaccttgccctggccaaaggaggcttatctgatgaccatgtcctcatcctgcctattggacactaccagtcagtggtggagctttcagcagaggtggtagaagaggtggagaagtataaggccactctgagacggttctttaagagtcgagggaaatggtgtgttgtatttgagagaaattataagagccatcacctccagctacagattgcacagccaggagcagcatatttttatgttgaacttgacacaggagaaaagcttttccacagaattaaaaagaattttcctttgcagtttggaagggaggtcctggccagtgaagccatccttaatgttcctgataagtctgactggaggcagtgtcagatcagcaaggaagacgaggagaccctggctcgccgcttccggaaagactttgagccctatgactttactctggatgactaaaacaaagggaagaactttttatgaactccacaggaagtagtaaagcttttttttttttttaattaaaagaattttttttgagacaaagtctcgctctgtcacccaagcaggattgcagtggcataactgtggctcactgtagcctcaacctcctgggctctagagttcctcccacctcagcctcatgagtagctgggaccacaggcgcatgctaccatgcctggcaaacttttttgattttttatagagacaggagggtctccctgtgttgcccaggctggtctgtaatgcctaggctcaagggatcctctgccttggcttcttaacctgctgggattacaagcatgagacaccattcctggcctagaagcctatttttaaagaaactacaatctcccatggggactgtttccctgcctcttttgtgcagtcccatggaacttgcctacagcaagaggcctaagattgaatctttttggggaaaagtcattctaggatgaaaatcctatgttaaggccgggcgcagtggctcacgcctgtaatcccagtactttgggaagccgaggcaggtggatcacctgaggtgaggagtttgagaccagcctggccaacatggtgaaaccccgtctttactaaagctacaaaaattagctgggcgtggtgccaggcacttgtggtcccagctactcaggaggctgaggcaggagaattgcttgagcctgggaggtggaggttgcaggtgagccaagatcgctccattgcactccagcctgggtgacagtgaaactccatctcaaaaataaaagaataaaagtatgtctgtcatccagctcctatgtctgttatccagctccaagtacagcttgtgtatatcaacattttcaaaaacctttaaactaccaaatgaaatccagatgtttttccatggttaaaaaaaaa

SEQ ID NO: 357555 - DNA, 1600 bp, Homo sapiens
taactttttgataggttaaaaacttacaaaaaacgtggatagagggggtctgtcttgcccactagaccgatatggttaggttaggttaggttaggttaggttaggttagaacccgacattgtgctctgtacttcctagccattcattcgcttcaagtgctctgaaatttaatttaaaaaatcatagttggaatcctttcggtcactttctctttctcccttcgttcctccctttccctcttgattcttccttgaggcgcaaacacctgagagaggcttctgtccctcggcggtctccgtaagtaagtgaaccgttattggctggagggcgctgacgtctgattgttgcgcggtcgcatttttccggggagcgcggattcgcattcccaattttaggtggcagtcgcaacccatactattcggacagatggcacagaaaccgctgcgcctcttggcttgtggagatgttgaaggaaagtttgatattttattcaatagagttcaagcaattcagaagaaaagtggaaactttgatctgctgttgtgtgtaggaaatttctttggctccacccaagatgctgaatgggaggagtataagactggcatcaagaaagctcctattcagacatatgtgcttggtgctaataaccaggaaacagtaaaatatttccaggatgctgatggatgtgaattagctgaaaacattacttatctgggtcgtaaaggtatcttcactggaagctcggggctgcagattgtgtacctcagtgggacagaatccttaaatgagccagtaccaggttatagttttagtcccaaggatgtgtcttctctgagaatgatgctgtgtacaacctcccagtttaagggtgttgatatcttgctcacatccccatggcccaagtgtgtggggaactttgggaattcttctggagaagtggataccaaaaaatgtggttctgctttggtttccagtcttgccacgggcttgaaaccaagataccattttgctgctttggaaaagacctattatgagaggcttccatatcgaaaccatatcattctacaggaaaatgcacagcatgccacccggtttatagctctggcaaatgttggaaatccagaaaagaaaaagtatctttacgcgttcagtattgttcccatgaagctaatggatgcagcagaactggtaaaacagcctccggatgtcactgaaaacccttacagaaaatctgggcaggaagcatccataggaaagcaaattcttgcccctgtggaagaatcagcctgtcagtttttctttgatttaaatgaaaagcagggaaggaagcgttcatccacaggtagagatagcaaatcttctcctcatccaaagcagcctcgcaaacctcctcagcctccaggaccctgctggttttgccttgactccagcctgggtgacagtgaaactccatctcaaaaataaaagaataaaagtatgtctgtcatccagctcctatgtctgttatccagctccaagtacagcttgtgtatatcaacattttcaaaaacctttaaactaccaaatgaaatccagatgtttttccatggttaaaaaaaaa

SEQ ID NO: 357556 - DNA, 403 bp, Homo sapiens
cacaaccagttccagtgttttctctttcttttatcaatgctgaatattgaaaaagggcatgctgcctgtttcaacttagcgtgactccatgcttatgggtttcctcttccaggcaagggtataaagtgggccctgcaaattatgtagccagccctgctcagacccagctaaggcatcagagcaccagaagtctgcccagcggagaatttccaggagactgctgggcaacagacaacaagccagaggtcctaatttcagggttcatgttcatgaggtcaaagaactctgtggactgtaggaagccaagagaatgaattcacacatttccgggatgatgtaaatttatcggcttaaaacagttttttctattactcccataaataaacataacagccattgaacg

SEQ ID NO: 357557 - DNA, 2000 bp, Homo sapiens
  misc_feature (3)..(3): n is a, c, g, or t
  misc_feature (11)..(12): n is a, c, g, or t
  misc_feature (16)..(16): n is a, c, g, or t
tcncgctggcnngagncgggggtgcaaccctttgaagtgtcccctcctacttcttgctgcctcacggttgctgttgcagacccaggagtctctgaaggcttccgcggctttggggccggttgtgagatgccaggcagaggccgctgcccggactgcggctccacggagctggtggaagactcgcactattcgcagagccagctggtgtgctccgactgcggctgcgtggtcaccgagggggtccttaccactaccttcagcgacgagggcaatctccgagaggtaacatattcccgaagcacaggggaaaacgaacaagttagtcgcagccagcaacgaggtctccggcgagtgagagacctttgtcgagttctgcagttgccaccaacatttgaggataccgcggttgcctactaccaacaggcatatcggcactctggcatccgagcggccaggctgcaaaagaaggaggtgttggttgggtgctgcgtcttaatcacctgccgacagcataactggcccctaacaatgggggccatctgcacgctgttgtatgcagatttggatgtgttttctagcacttacatgcagatagtgaagctcctgggactggatgtgccatctctgtgcttggcagaactggtgaagacctattgcagcagcttcaaactgttccaagcttcaccttctgtgccagccaaatacgtggaagacaaagagaagatgctgtctcgaacaatgcagttggtggagctggcaaatgagacgtggctggtgaccgggaggcatcccttgcccgtcatcactgctgcgactttcctggcttggcagtcgctgcagcctgcagatcggctttcatgttcccttgcccgattttgtaaattggcaaatgtggacctgccctacccggcgtcctcccgcctgcaggagctgctggctgtgctgctgcggatggctgagcagctggcctggttacgagttctgagacttgacaaacggtctgtggtgaagcacatcggtgaccttctccagcaccgccagtcactggtccgctctgcctttcgggatgggacagcagaagtggagacccgagagaaggagccaccggggtggggacaggggcaaggagaaggggaggtgggaaataattccttaggtttaccccaggggaagcggccggccagtcctgcccttctcttgccaccctgcatgttgaagtccccgaagcggatctgccctgtaccccctgtctccactgtcactggagatgagaacatttctgatagtgaaatagaacagtatttgcgtacccctcaggaagttagggactttcagagagcccaggctgctagacaggctgccacgagtgtccctaaccctccctgatggatatccactgggagcacttcatcctgttctgacagcttgataacattcctgttataaccaaggatggaagtgtacaccagtccgtaggtattgcttttcttgtttgaaggaaccaagaggggctctgccattagttggaccctgggtcctggagtaaagtcaggagtgcagggatgactataggtaggagagattcccatcccttggtgtgggagagcaagttgcctatgtccatgttctgtgagatggctttcctcatagatggatgggaaaatgtcaggctctttgctgctggtttgaattggacacactgctgcggctcctcctgcaggcctgagggggcttccctctgcttgtggagtggttggcattcccagcagtatcaaccctcagaggagcgggaactggggaattctggccctacgtgcattcacaggcaatgatgggtttgtgtgtatggtgtcatgagatcctctacctcataacaaaaggacagtgggtagactaaggcagtagctcaaagggctttgcaaaattttaatatattaaaacaagaggcatctgctagaaaacattctattgtataaaacccgagttcttaaaaacatgtt

SEQ ID NO: 357558 - DNA, 2089 bp, Homo sapiens
  misc_feature (3)..(3): n is a, c, g, or t
  misc_feature (11)..(12): n is a, c, g, or t
  misc_feature (16)..(16): n is a, c, g, or t
tcncgctggcnngagncgggggtgcaaccctttgaagtgtcccctcctacttcttgctgcctcacggttgctgttgcagacccaggagtctctgaaggcttccgcggctttggggccggttgtgagatgccaggcagaggccgctgcccggactgcggctccacggagctggtggaagactcgcactattcgcagagccagctggtgtgctccgactgcggctgcgtggtcaccgagggggtccttaccactaccttcagcgacgagggcaatctccgagaggtaacatattcccgaagcacaggggaaaacgaacaagttagtcgcagccagcaacgaggtctccggcgagtgagagacctttgtcgagttctgcagttgccaccaacatttgaggataccgcggttgcctactaccaacaggcatatcggcactctggcatccgagcggccaggctgcaaaagaaggaggtgttggttgggtgctgcgtcttaatcacctgccgacagcataactggcccctaacaatgggggccatctgcacgctgttgtatgcagatttggatgtgttttctagcacttacatgcagatagtgaagctcctgggactggatgtgccatctctgtgcttggcagaactggtgaagacctattgcagcagcctggagtgcagtggcaccatcatagctcactgcagcctggaactcatgggctcaagcgatctgcccacctgatcctcccaaaatgcagcttcaaactgttccaagcttcaccttctgtgccagccaaatacgtggaagacaaagagaagatgctgtctcgaacaatgcagttggtggagctggcaaatgagacgtggctggtgaccgggaggcatcccttgcccgtcatcactgctgcgactttcctggcttggcagtcgctgcagcctgcagatcggctttcatgttcccttgcccgattttgtaaattggcaaatgtggacctgccctacccggcgtcctcccgcctgcaggagctgctggctgtgctgctgcggatggctgagcagctggcctggttacgagttctgagacttgacaaacggtctgtggtgaagcacatcggtgaccttctccagcaccgccagtcactggtccgctctgcctttcgggatgggacagcagaagtggagacccgagagaaggagccaccggggtggggacaggggcaaggagaaggggaggtgggaaataattccttaggtttaccccaggggaagcggccggccagtcctgcccttctcttgccaccctgcatgttgaagtccccgaagcggatctgccctgtaccccctgtctccactgtcactggagatgagaacatttctgatagtgaaatagaacagtatttgcgtacccctcaggaagttagggactttcagagagcccaggctgctagacaggctgccacgagtgtccctaaccctccctgatggatatccactgggagcacttcatcctgttctgacagcttgataacattcctgttataaccaaggatggaagtgtacaccagtccgtaggtattgcttttcttgtttgaaggaaccaagaggggctctgccattagttggaccctgggtcctggagtaaagtcaggagtgcagggatgactataggtaggagagattcccatcccttggtgtgggagagcaagttgcctatgtccatgttctgtgagatggctttcctcatagatggatgggaaaatgtcaggctctttgctgctggtttgaattggacacactgctgcggctcctcctgcaggcctgagggggcttccctctgcttgtggagtggttggcattcccagcagtatcaaccctcagaggagcgggaactggggaattctggccctacgtgcattcacaggcaatgatgggtttgtgtgtatggtgtcatgagatcctctacctcataacaaaaggacagtgggtagactaaggcagtagctcaaagggctttgcaaaattttaatatattaaaacaagaggcatctgctagaaaacattctattgtataaaacccgagttcttaaaaacatgtt

SEQ ID NO: 357559 - DNA, 898 bp, Homo sapiens
  misc_feature (3)..(3): n is a, c, g, or t
  misc_feature (11)..(12): n is a, c, g, or t
  misc_feature (16)..(16): n is a, c, g, or t
  misc_feature (812)..(812): n is a, c, g, or t
  misc_feature (815)..(815): n is a, c, g, or t
  misc_feature (857)..(857): n is a, c, g, or t
  misc_feature (863)..(863): n is a, c, g, or t
  misc_feature (891)..(891): n is a, c, g, or t
tcncgctggcnngagncgggggtgcaaccctttgaagtgtcccctcctacttcttgctgcctcacggttgctgttgcagacccaggagtctctgaaggcttccgcggctttggggccggttgtgagatgccaggcagaggccgctgcccggactgcggctccacggagctggtggaagactcgcactattcgcagagccagctggtgtgctccgactgcggctgcgtggtcaccgagggggtccttaccactaccttcagcgacgagggcaatctccgagaggtaacatattcccgaagcacaggggaaaacgaacaagttagtcgcagccagcaacgaggtctccggcgagtgagagacctttgtcgagttctgcagttgccaccaacatttgaggataccgcggttgcctactaccaacaggcatatcggcactctggcatccgagcggccaggctgcaaaagaaggaggtgttggttgggtgctgcgtcttaatcacctgccgacagcataactggcccctaacaatgggggccatctgcacgctgttgtatgcagatttggatgtgttttctagcacttacatgcagatagtgaagctcctgggactggatgtgccatctctgtgcttggcagaactggtgaagacctattgcagcagcttcaaactgttccaagcttcaccttctgtgccagccaaatacgtggaagacaaagagaagatgctgtctcgaacaatgcagttggtggagctggcaaatgagacgtggctggtgaccgggaggcatcccttgcccgttaatcaacggcntgngaacttttccctggccttgggaaattcccctgcaaaccttgnaaaatnggggtttcaaaggttccccctttgcccnaattttt

SEQ ID NO: 357560 - DNA, 1660 bp, Homo sapiens
  misc_feature (3)..(3): n is a, c, g, or t
  misc_feature (11)..(12): n is a, c, g, or t
  misc_feature (16)..(16): n is a, c, g, or t
tcncgctggcnngagncgggggtgcaaccctttgaagtgtcccctcctacttcttgctgcctcacggttgctgttgcagacccaggagtctctgaaggcttccgcggctttggggccggttgtgagatgccaggcagaggccgctgcccggactgcggctccacggagctggtggaagactcgcactattcgcagagccagctggtgtgctccgactgcggctgcgtggtcaccgagggggtccttaccactaccttcagcgacgagggcaatctccgagaggtaacatattcccgaagcacaggggaaaacgaacaagttagtcgcagccagcaacgaggtctccggcgagtgagagacctttgtcgagttctgcagttgccaccaacatttgaggataccgcggttgcctactaccaacaggcatatcggcactctggcatccgagcggccaggctgcaaaagaaggaggtgttggttgggtgctgcgtcttaatcacctgccgacagcataactggcccctaacaatgggggccatctgcacgctgttgtatgcagatttggatgtgttttctagcacttacatgcagatagtgaagctcctgggactggatgtgccatctctgtgcttggcagaactggtgaagacctattgcagcagcttcaaactgttccaagcttcaccttctgtgccagccaaatacgtggaagacaaagagaagatgctgtctcgaacaatgcagttggtggagctggcaaatgagacgtggctggtgaccgggaggcatcccttgcccgtcatcactgctgcgactttcctggcttggcagtcgctgcagcctgcagatcggctttcatgttcccttgcccgattttgtaaattggcaaatgtggacctgccctacccggcgtcctcccgcctgcaggagctgctggctgtgctgctgcggatggctgagcagctggcctggttacgagttctgagacttgacaaacggtctgtggtgaagcacatcggtgaccttctccagcaccgccagtcactggtccgctctgcctttcgggatgggacagcagaagtggagacccgagagaaggagccaccggggtggggacaggggcaaggagaaggggaggtgggaaataattccttaggtttaccccaggggaagcggccggccagtcctgcccttctcttgccaccctgcatgttgaagtccccgaagcggatctgccctgtaccccctgtctccactgtcactggagatgagaacatttctgatagtgaaatagaacagtatttgcgtacccctcaggaagttagggactttcagagagcccaggctgctagacaggctgccacgagtgtccctaaccctccctgagggggcttccctctgcttgtggagtggttggcattcccagcagtatcaaccctcagaggagcgggaactggggaattctggccctacgtgcattcacaggcaatgatgggtttgtgtgtatggtgtcatgagatcctctacctcataacaaaaggacagtgggtagactaaggcagtagctcaaagggctttgcaaaattttaatatattaaaacaagaggcatctgctagaaaacattctattgtataaaacccgagttcttaaaaacatgtt

SEQ ID NO: 357561 - DNA, 1742 bp, Homo sapiens
ctgataaataacgttgaaagtagaggctgttggtgtcaaatagccttgtatttgaagcttggttactgcctggctggatgactatgggaaagttttttaactatacatgcacataagatggtgcacgtgcacgtagattaaatgagaacgttgtaaagcactcagaataatggtgattgggaggcgcccaataaatgttcgtgctctcctccatccctccaccttcccctaacaagcggaagacgccctgttttctctcactacctttattaacttgctgcccagtgagcttgagtattcctgagggcagaatagcttccccatcttgagtgggctgtctttcctcactgtgggagagcagcccctatatcattaagatccaaccctcattttggttatttcagcttcaaactgttccaagcttcaccttctgtgccagccaaatacgtggaagacaaagagaagatgctgtctcgaacaatgcagttggtggagctggcaaatgagacgtggctggtgaccgggaggcatcccttgcccgtcatcactgctgcgactttcctggcttggcagtcgctgcagcctgcagatcggctttcatgttcccttgcccgattttgtaaattggcaaatgtggacctgccctacccggcgtcctcccgcctgcaggagctgctggctgtgctgctgcggatggctgagcagctggcctggttacgagttctgagacttgacaaacggtctgtggtgaagcacatcggtgaccttctccagcaccgccagtcactggtccgctctgcctttcgggatgggacagcagaagtggagacccgagagaaggagccaccggggtggggacaggggcaaggagaaggggaggtgggaaataattccttaggtttaccccaggggaagcggccggccagtcctgcccttctcttgccaccctgcatgttgaagtccccgaagcggatctgccctgtaccccctgtctccactgtcactggagatgagaacatttctgatagtgaaatagaacagtatttgcgtacccctcaggaagttagggactttcagagagcccaggctgctagacaggctgccacgagtgtccctaaccctccctgatggatatccactgggagcacttcatcctgttctgacagcttgataacattcctgttataaccaaggatggaagtgtacaccagtccgtaggtattgcttttcttgtttgaaggaaccaagaggggctctgccattagttggaccctgggtcctggagtaaagtcaggagtgcagggatgactataggtaggagagattcccatcccttggtgtgggagagcaagttgcctatgtccatgttctgtgagatggctttcctcatagatggatgggaaaatgtcaggctctttgctgctggtttgaattggacacactgctgcggctcctcctgcaggcctgagggggcttccctctgcttgtggagtggttggcattcccagcagtatcaaccctcagaggagcgggaactggggaattctggccctacgtgcattcacaggcaatgatgggtttgtgtgtatggtgtcatgagatcctctacctcataacaaaaggacagtgggtagactaaggcagtagctcaaagggctttgcaaaattttaatatattaaaacaagaggcatctgctagaaaacattctattgtataaaacccgagttcttaaaaacatgtt

SEQ ID NO: 357562 - DNA, 2756 bp, Homo sapiens
agggacagcccagaggaggcgtggccacgctgccggcggaagtggagccctccgcgagcgcgcgaggccgccggggaggcggggaaaccggacagtaggggcggggcgggccggcgatggggatgcgggagcactacgcggagctgcacccgtgcccgccggaattggggatgcagagcagcggcagcgggtatggcaggcaccggcgggccggcctccagcgcaggtgcccgagaggcaggggctggcctgggatgcgcgcgcacctgccctcgccccgccccgcccgcacgaggggtggtggccgaggccccgccccgcacgcctcgcctgaggcgggtccgctcagcccaggcgcccgcccccgcccccgccgattaaatgggccggcggggctcagcccccggaaacggtcgtacacttcggggctgcgagcgcggagggcgacgacgacgaagcgcagcagacagcgtcatggcagagcaggtggccctgagccggacccaggtgtgcgggatcctgcgggaagagcttttccagggcgatgccttccatcagtcggatacacacatattcatcatcatgggtgcatcgggtgacctggccaagaagaagatctaccccaccatctggtggctgttccgggatggccttctgcccgaaaacaccttcatcgtgggctatgcccgttcccgcctcacagtggctgacatccgcaaacagagtgagcccttcttcaaggccaccccagaggagaagctcaagctggaggacttctttgcccgcaactcctatgtggctggccagtacgatgatgcagcctcctaccagcgcctcaacagccacatgaatgccctccacctggggtcacaggccaaccgcctcttctacctggccttgcccccgaccgtctacgaggccgtcaccaagaacattcacgagtcctgcatgagccagataggctggaaccgcatcatcgtggagaagcccttcgggagggacctgcagagctctgaccggctgtccaaccacatctcctccctgttccgtgaggaccagatctaccgcatcgaccactacctgggcaaggagatggtgcagaacctcatggtgctgagatttgccaacaggatcttcggccccatctggaaccgggacaacatcgcctgcgttatcctcaccttcaaggagccctttggcactgagggtcgcgggggctatttcgatgaatttgggatcatccgggacgtgatgcagaaccacctactgcagatgctgtgtctggtggccatggagaagcccgcctccaccaactcagatgacgtccgtgatgagaaggtcaaggtgttgaaatgcatctcagaggtgcaggccaacaatgtggtcctgggccagtacgtggggaaccccgatggagagggcgaggccaccaaagggtacctggacgaccccacggtgccccgcgggtccaccaccgccacttttgcagccgtcgtcctctatgtggagaatgagaggtgggatggggtgcccttcatcctgcgctgcggcaaggccctgaacgagcgcaaggccgaggtgaggctgcagttccatgatgtggccggcgacatcttccaccagcagtgcaagcgcaacgagctggtgatccgcgtgcagcccaacgaggccgtgtacaccaagatgatgaccaagaagccgggcatgttcttcaaccccgaggagtcggagctggacctgacctacggcaacagatacaagaacgtgaagctccctgacgcctacgagcgcctcatcctggacgtcttctgcgggagccagatgcacttcgtgcgcagcgacgagctccgtgaggcctggcgtattttcaccccactgctgcaccagattgagctggagaagcccaagcccatcccctatatttatggcagccgaggccccacggaggcagacgagctgatgaagagagtgggtttccagtatgagggcacctacaagtgggtgaacccccacaagctctgagccctgggcacccacctccacccccgccacggccaccctccttcccgccgcccgaccccgagtcgggaggactccgggaccattgacctcagctgcacattcctggccccgggctctggccaccctggcccgcccctcgctgctgctactacccgagcccagctacattcctcagctgccaagcactcgagaccatcctggcccctccagaccctgcctgagcccaggagctgagtcacctcctccactcactccagcccaacagaaggaaggaggagggcgcccattcgtctgtcccagagcttattggccactgggtctcactcctgagtggggccagggtgggagggagggacaagggggaggaaaggggcgagcacccacgtgagagaatctgcctgtggccttgcccgccagcctcagtgccacttgacattccttgtcaccagcaacatctcgagccccctggatgtcccctgtcccaccaactctgcactccatggccaccccgtgccacccgtaggcagcctctctgctataagaaaagcagacgcagcagctgggacccctcccaacctcaatgccctgccattaaatccgcaaacagcccctcctgtccccttgtcatttgcttccctgaggacccacttccttgtcccactccccaagtcacccgggtgcttcctctgtggccactgaggagcctcctcacttctggttctgaccccatgtcc

SEQ ID NO: 357563 - DNA, 2368 bp, Homo sapiens
gagggatgaaaacgataggctaggtacgaggccggtggttaggctgcgagcgcggagggcgacgacgacgaagcgcagacagcgtcatggcagagcaggtggccctgagccggacccaggtgtgcgggatcctgcgggaagagcttttccagggcgatgccttccatcagtcggatacacacatattcatcatcatgggtgcatcgggtgacctggccaagaagaagatctaccccaccatctggtggctgttccgggatggccttctgcccgaaaacaccttcatcgtgggctatgcccgttcccgcctcacagtggctgacatccgcaaacagagtgagcccttcttcaaggccaccccagaggagaagctcaagctggaggacttctttgcccgcaactcctatgtggctggccagtacgatgatgcagcctcctaccagcgcctcaacagccacatgaatgccctccacctggggtcacaggccaaccgcctcttctacctggccttgcccccgaccgtctacgaggccgtcaccaagaacattcacgagtcctgcatgagccagataggctggaaccgcatcatcgtggagaagcccttcgggagggacctgcagagctctgaccggctgtccaaccacatctcctccctgttccgtgaggaccagatctaccgcatcgaccactacctgggcaaggagatggtgcagaacctcatggtgctgagatttgccaacaggatcttcggccccatctggaaccgggacaacatcgcctgcgttatcctcaccttcaaggagccctttggcactgagggtcgcgggggctatttcgatgaatttgggatcatccgggacgtgatgcagaaccacctactgcagatgctgtgtctggtggccatggagaagcccgcctccaccaactcagatgacgtccgtgatgagaaggtcaaggtgttgaaatgcatctcagaggtgcaggccaacaatgtggtcctgggccagtacgtggggaaccccgatggagagggcgaggccaccaaagggtacctggacgaccccacggtgccccgcgggtccaccaccgccacttttgcagccgtcgtcctctatgtggagaatgagaggtgggatggggtgcccttcatcctgcgctgcggcaaggccctgaacgagcgcaaggccgaggtgaggctgcagttccatgatgtggccggcgacatcttccaccagcagtgcaagcgcaacgagctggtgatccgcgtgcagcccaacgaggccgtgtacaccaagatgatgaccaagaagccgggcatgttcttcaaccccgaggagtcggagctggacctgacctacggcaacagatacaagaacgtgaagctccctgacgcctacgagcgcctcatcctggacgtcttctgcgggagccagatgcacttcgtgcgcagcgacgagctccgtgaggcctggcgtattttcaccccactgctgcaccagattgagctggagaagcccaagcccatcccctatatttatggcagccgaggccccacggaggcagacgagctgatgaagagagtgggtttccagtatgagggcacctacaagtgggtgaacccccacaagctctgagccctgggcacccacctccacccccgccacggccaccctccttcccgccgcccgaccccgagtcgggaggactccgggaccattgacctcagctgcacattcctggccccgggctctggccaccctggcccgcccctcgctgctgctactacccgagcccagctacattcctcagctgccaagcactcgagaccatcctggcccctccagaccctgcctgagcccaggagctgagtcacctcctccactcactccagcccaacagaaggaaggaggagggcgcccattcgtctgtcccagagcttattggccactgggtctcactcctgagtggggccagggtgggagggagggacaagggggaggaaaggggcgagcacccacgtgagagaatctgcctgtggccttgcccgccagcctcagtgccacttgacattccttgtcaccagcaacatctcgagccccctggatgtcccctgtcccaccaactctgcactccatggccaccccgtgccacccgtaggcagcctctctgctataagaaaagcagacgcagcagctgggacccctcccaacctcaatgccctgccattaaatccgcaaacagcccctcctgtccccttgtcatttgcttccctgaggacccacttccttgtcccactccccaagtcacccgggtgcttcctctgtggccactgaggagcctcctcacttctggttctgaccccatgtcc

SEQ ID NO: 357564 - DNA, 2997 bp, Homo sapiens
gagggatgaaaacgataggctaggtacgaggccggtggttaggctgcgagcgcggagggcgacgacgacgaagcgcagacagcgtcatggcagagcaggtggccctgagccggacccaggtgtgcgggatcctgcgggaagagcttttccagggcgatgccttccatcagtcggatacacacatattcatcatcatgggtgcatcgggtgacctggccaagaagaagatctaccccaccatctggtggctgttccgggatggccttctgcccgaaaacaccttcatcgtgggctatgcccgttcccgcctcacagtggctgacatccgcaaacagagtgagcccttcttcaaggccaccccagaggagaagctcaagctggaggacttctttgcccgcaactcctatgtggctggccagtacgatgatgcagcctcctaccagcgcctcaacagccacatgaatgccctccacctggggtcacaggccaaccgcctcttctacctggccttgcccccgaccgtctacgaggccgtcaccaagaacattcacgagtcctgcatgagccagataggctggaaccgcatcatcgtggagaagcccttcgggagggacctgcagagctctgaccggctgtccaaccacatctcctccctgttccgtgaggaccagatctaccgcatcgaccactacctgggcaaggagatggtgcagaacctcatggtgctgagatttgccaacaggatcttcggccccatctggaaccgggacaacatcgcctgcgttatcctcaccttcaaggagccctttggcactgagggtcgcgggggctatttcgatgaatttgggatcatccgggacgtgatgcagaaccacctactgcagatgctgtgtctggtggccatggagaagcccgcctccaccaactcagatgacgtccgtgatgagaaggtcaaggtgttgaaatgcatctcagaggtgcaggccaacaatgtggtcctgggccagtacgtggggaaccccgatggagagggcgaggccaccaaagggtacctggacgaccccacggtgccccgcgggtccaccaccgccacttttgcagccgtcgtcctctatgtggagaatgagaggtgggatggggtgcccttcatcctgcgctgcggcaaggccctgaacgagcgcaaggccgaggtgaggctgcagttccatgatgtggccggcgacatcttccaccagcagtgcaagcgcaacgagctggtgatccgcgtgcagcccaacgaggccgtgtacaccaagatgatgaccaagaagccgggcatgttcttcaaccccgaggagtcggagctggacctgacctacggcaacagatacaagaacgtgaagctccctgacgcctacgagcgcctcatcctggacgtcttctgcgggagccagatgcacttcgtgcgcagcgacgagctccgtgaggcctggcgtattttcaccccactgctgcaccagattgagctggagaagcccaagcccatcccctatatttatggcagccgaggccccacggaggcagacgagctgatgaagagagtgggtttccagtatgagggcacctacaagtgggtgaacccccacaagctctgagccctgggcacccacctccacccccgccacggccaccctccttcccgccgcccgaccccgagtcgggaggactccgggaccattgacctcagctgcacattcctggccccgggctctggccaccctggcccgcccctcgctgctgctactacccgagcccagctacattcctcagctgccaagcactcgagaccatcctggcccctccagaccctgcctgagcccaggagctgagtcacctcctccactcactccagcccaacagaaggaaggaggagggcgcccattcgtctgtcccagagcttattggccactgggtctcactcctgagtggggccagggtgggagggagggacaagggggaggaaaggggcgagcacccacgtgagagaatctgcctgtggccttgcccgccagcctcagtgccacttgacattccttgtcaccagcaacatctcgagccccctggatgtcccctgtcccaccaactctgcactccatggccaccccgtgccacccgtaggcagcctctctgctataagaaaagcagacgcagcagctgggacccctcccaacctcaatgccctgtaaggattttgcccactgggcaactcagaaatacttcgatctcccaagatataagaggcagcagcaaacgtgcctattgacgtctgtttcatagttaccacttacgcgagtagacagaactcggcttttcagaaaataggtgtcaagtccactttataagaacctttttttctaaaataagataaaaggtggctttgcattttctgattaaacgactgtgtctttgtcacctctgcttaactttaggagtatccattcctgtgattgtagacttttgttgatattcttcctggaagaatatcattcttttcttgaagggttggtttactagaatattcaaaatcaatcatgaaggcagttactattttgagtctaaaggttttctaaaaattaacctcacatcccttctgttagggtctttcagaatatcttttataaacagaagcatttgaagtcattgcttttgctacatgatttgtgtgtgtgaaggacataccacgtttaaatcattaattgaaaaacatcatataagccccaactttgtttggaggaagagacggaggttgaggtttttccttctgtataagcacctactgacaaaatgtagaggccattcaaccgtcaaacaccatttggttatatcgcagaggagacggatgtgtaaattactgcattgctttttttttcagtttgtataacctctaatctccgtttgcatgatacgctttgttagaaacattaattgtagtttggaagcaagtgtgtatgggaattc

SEQ ID NO: 357565 - DNA, 2226 bp, Homo sapiens
gagggatgaaaacgataggctaggtacgaggccggtggttaggctgcgagcgcggagggcgacgacgacgaagcgcagacagcgtcatggcagagcaggtggccctgagccggacccaggtgtgcgggatcctgcgggaagagcttttccagggcgatgccttccatcagtcggatacacacatattcatcatcatgggtgcatcgggtgacctggccaagaagaagatctaccccaccatctggtggctgttccgggatggccttctgcccgaaaacaccttcatcgtgggctatgcccgttcccgcctcacagtggctgacatccgcaaacagagtgagcccttcttcaaggccaccccagaggagaagctcaagctggaggacttctttgcccgcaactcctatgtggctggccagtacgatgatgcagcctcctaccagcgcctcaacagccacatgaatgccctccacctggggtcacaggccaaccgcctcttctacctggccttgcccccgaccgtctacgaggccgtcaccaagaacattcacgagtcctgcatgagccagataggctggaaccgcatcatcgtggagaagcccttcgggagggacctgcagagctctgaccggctgtccaaccacatctcctccctgttccgtgaggaccagatctaccgcatcgaccactacctgggcaaggagatggtgcagaacctcatggtgctgagatttgccaacaggatcttcggccccatctggaaccgggacaacatcgcctgcgttatcctcaccttcaaggagccctttggcactgagggtcgcgggggctatttcgatgaatttgggatcatccgggacgtgatgcagaaccacctactgcagatgctgtgtctggtggccatggagaagcccgcctccaccaactcagatgacgtccgtgatgagaaggtcaaggtgttgaaatgcatctcagaggtgcaggccaacaatgtggtcctgggccagtacgtggggaaccccgatggagagggcgaggccaccaaagggtacctggacgaccccacggtgccccgcgggtccaccaccgccagcagtgcaagcgcaacgagctggtgatccgcgtgcagcccaacgaggccgtgtacaccaagatgatgaccaagaagccgggcatgttcttcaaccccgaggagtcggagctggacctgacctacggcaacagatacaagaacgtgaagctccctgacgcctacgagcgcctcatcctggacgtcttctgcgggagccagatgcacttcgtgcgcagcgacgagctccgtgaggcctggcgtattttcaccccactgctgcaccagattgagctggagaagcccaagcccatcccctatatttatggcagccgaggccccacggaggcagacgagctgatgaagagagtgggtttccagtatgagggcacctacaagtgggtgaacccccacaagctctgagccctgggcacccacctccacccccgccacggccaccctccttcccgccgcccgaccccgagtcgggaggactccgggaccattgacctcagctgcacattcctggccccgggctctggccaccctggcccgcccctcgctgctgctactacccgagcccagctacattcctcagctgccaagcactcgagaccatcctggcccctccagaccctgcctgagcccaggagctgagtcacctcctccactcactccagcccaacagaaggaaggaggagggcgcccattcgtctgtcccagagcttattggccactgggtctcactcctgagtggggccagggtgggagggagggacaagggggaggaaaggggcgagcacccacgtgagagaatctgcctgtggccttgcccgccagcctcagtgccacttgacattccttgtcaccagcaacatctcgagccccctggatgtcccctgtcccaccaactctgcactccatggccaccccgtgccacccgtaggcagcctctctgctataagaaaagcagacgcagcagctgggacccctcccaacctcaatgccctgccattaaatccgcaaacagcccctcctgtccccttgtcatttgcttccctgaggacccacttccttgtcccactccccaagtcacccgggtgcttcctctgtggccactgaggagcctcctcacttctggttctgaccccatgtcc

SEQ ID NO: 357566 - DNA, 2604 bp, Homo sapiens
gagggatgaaaacgataggctaggtacgaggccggtggttaggctgcgagcgcggagggcgacgacgacgaagcgcagacagcgtcatggcagagcaggtggccctgagccggacccaggtgtgcgggatcctgcgggaagagcttttccagggcgatgccttccatcagtcggatacacacatattcatcatcatgggtgcatcgggtgacctggccaagaagaagatctaccccaccatctggtggctgttccgggatggccttctgcccgaaaacaccttcatcgtgggctatgcccgttcccgcctcacagtggctgacatccgcaaacagagtgagcccttcttcaaggccaccccagaggagaagctcaagctggaggacttctttgcccgcaactcctatgtggctggccagtacgatgatgcagcctcctaccagcgcctcaacagccacatgaatgccctccacctggggtcacaggccaaccgcctcttctacctggccttgcccccgaccgtctacgaggccgtcaccaagaacattcacgagtcctgcatgagccagataggctggaaccgcatcatcgtggagaagcccttcgggagggacctgcagagctctgaccggctgtccaaccacatctcctccctgttccgtgaggaccagatctaccgcatcgaccactacctgggcaaggagatggtgcagaacctcatggtgctgagatttgccaacaggatcttcggccccatctggaaccgggacaacatcgcctgcgttatcctcaccttcaaggagccctttggcactgagggtcgcgggggctatttcgatgaatttgggatcatccgggacgtgatgcagaaccacctactgcagatgctgtgtctggtggccatggagaagcccgcctccaccaactcagatgacgtccgtgatgagaaggtcaaggtgttgaaatgcatctcagaggtgcaggccaacaatgtggtcctgggccagtacgtggggaaccccgatggagagggcgaggccaccaaagggtacctggacgaccccacggtgccccgcgggtccaccaccgccacttttgcagccgtcgtcctctatgtggagaatgagaggtgggatggtaggtgatgccttcgaggcccagcaaggcagaactgggcatgccctgtgtgcgggcactggagctcccactgagacactcacgcactggtccacaccctgagagagctggtgctgaggctgccctttccgccacgtaggggtgcccttcatcctgcgctgcggcaaggccctgaacgagcgcaaggccgaggtgaggctgcagttccatgatgtggccggcgacatcttccaccagcagtgcaagcgcaacgagctggtgatccgcgtgcagcccaacgaggccgtgtacaccaagatgatgaccaagaagccgggcatgttcttcaaccccgaggagtcggagctggacctgacctacggcaacagatacaagaacgtgaagctccctgacgcctacgagcgcctcatcctggacgtcttctgcgggagccagatgcacttcgtgcgcagcgacgagctccgtgaggcctggcgtattttcaccccactgctgcaccagattgagctggagaagcccaagcccatcccctatatttatggcaggtgaggaaagggtgggggctggggacagagcccagcgggcaggggcggggtgagggtggagctacctcatgcctctcctccacccgtcactctccagccgaggccccacggaggcagacgagctgatgaagagagtgggtttccagtatgagggcacctacaagtgggtgaacccccacaagctctgagccctgggcacccacctccacccccgccacggccaccctccttcccgccgcccgaccccgagtcgggaggactccgggaccattgacctcagctgcacattcctggccccgggctctggccaccctggcccgcccctcgctgctgctactacccgagcccagctacattcctcagctgccaagcactcgagaccatcctggcccctccagaccctgcctgagcccaggagctgagtcacctcctccactcactccagcccaacagaaggaaggaggagggcgcccattcgtctgtcccagagcttattggccactgggtctcactcctgagtggggccagggtgggagggagggacaagggggaggaaaggggcgagcacccacgtgagagaatctgcctgtggccttgcccgccagcctcagtgccacttgacattccttgtcaccagcaacatctcgagccccctggatgtcccctgtcccaccaactctgcactccatggccaccccgtgccacccgtaggcagcctctctgctataagaaaagcagacgcagcagctgggacccctcccaacctcaatgccctgccattaaatccgcaaacagcccctcctgtccccttgtcatttgcttccctgaggacccacttccttgtcccactccccaagtcacccgggtgcttcctctgtggccactgaggagcctcctcacttctggttctgaccccatgtcc

SEQ ID NO: 357567 - DNA, 1627 bp, Homo sapiens
gagggatgaaaacgataggctaggtacgaggccggtggttaggctgcgagcgcggagggcgacgacgacgaagcgcagacagcgtcatggcagagcaggtggccctgagccggacccaggtgtgcgggatcctgcgggaagagcttttccagggcgatgccttccatcagtcggatacacacatattcatcatcatgggtgcatcgggtgacctggccaagaagaagatctaccccaccatctggtggctgttccgggatggccttctgcccgaaaacaccttcatcgtgggctatgcccgttcccgcctcacagtggctgacatccgcaaacagagtgagcccttcttcaaggccaccccagaggagaagctcaagctggaggacttctttgcccgcaactcctatgtggctggccagtacgatgatgcagcctcctaccagcgcctcaacagccacatgaatgccctccacctggggtcacaggccaaccgcctcttctacctggccttgcccccgaccgtctacgaggccgtcaccaagaacattcacgagtcctgcatgagccagataggctggaaccgcatcatcgtggagaagcccttcgggagggacctgcagagctctgaccggctgtccaaccacatctcctccctgttccgtgaggaccagatctaccgcatcgaccactacctgggcaaggagatggtgcagaacctcatggtgctgagatttgccaacaggatcttcggccccatctggaaccgggacaacatcgcctgcgttatcctcaccttcaaggagccctttggcactgagggtcgcgggggctatttcgatgaatttgggatcatccgggacgtgatgcagaaccacctactgcagatgctgtgtctggtggccatggagaagcccgcctccaccaactcagatgacgtccgtgatgagaaggtcaaggtgttgaaatgcatctcagaggtgcaggccaacaatgtggtcctgggccagtacgtggggaaccccgatggagagggcgaggccaccaaagggtacctggacgaccccacggtgccccgcgggtccaccaccgccacttttgcagccgtcgtcctctatgtggagaatgagaggtgggatggggtgcccttcatcctgcgctgcggcaaggccctgaacgagcgcaaggccgaggtgaggctgcagttccatgatgtggccggcgacatcttccaccagcagtgcaagcgcaacgagctggtgatccgcgtgcagcccaacgaggccgtgtacaccaagatgatgaccaagaagccgggcatgttcttcaaccccgaggagtcggagctggacctgacctacggcaacagatacaagaacgtgaagctccctgacgcctacgagcgcctcatcctggacgtcttctgcgggagccagatgcacttcgtgcgcagcgacgagctccgtgaggcctggcgtattttcacccccccttgtccaggtgaggtgagcacatttacagatattgtgcgtcatagccccatgccctctgcccagctcagtttagacagtaaacgttccttgtttcttttctcccatgacactgacaagaggtattaccacctcagctt

SEQ ID NO: 357568 - DNA, 1623 bp, Homo sapiens
gagggatgaaaacgataggctaggtacgaggccggtggttaggctgcgagcgcggagggcgacgacgacgaagcgcagacagcgtcatggcagagcaggtggccctgagccggacccaggtgtgcgggatcctgcgggaagagcttttccagggcgatgccttccatcagtcggatacacacatattcatcatcatgggtgcatcgggtgacctggccaagaagaagatctaccccaccatctggtggctgttccgggatggccttctgcccgaaaacaccttcatcgtgggctatgcccgttcccgcctcacagtggctgacatccgcaaacagagtgagcccttcttcaaggccaccccagaggagaagctcaagctggaggacttctttgcccgcaactcctatgtggctggccagtacgatgatgcagcctcctaccagcgcctcaacagccacatgaatgccctccacctggggtcacaggccaaccgcctcttctacctggccttgcccccgaccgtctacgaggccgtcaccaagaacattcacgagtcctgcatgagccagataggctggaaccgcatcatcgtggagaagcccttcgggagggacctgcagagctctgaccggctgtccaaccacatctcctccctgttccgtgaggaccagatctaccgcatcgaccactacctgggcaaggagatggtgcagaacctcatggtgctgagatttgccaacaggatcttcggccccatctggaaccgggacaacatcgcctgcgttatcctcaccttcaaggagccctttggcactgagggtcgcgggggctatttcgatgaatttgggatcatccgggacgtgatgcagaaccacctactgcagatgctgtgtctggtggccatggagaagcccgcctccaccaactcagatgacgtccgtgatgagaaggtcaaggtgttgaaatgcatctcagaggtgcaggccaacaatgtggtcctgggccagtacgtggggaaccccgatggagagggcgaggccaccaaagggtacctggacgaccccacggtgccccgcgggtccaccaccgccacttttgcagccgtcgtcctctatgtggagaatgagaggtgggatggggtgcccttcatcctgcgctgcggcaaggccctgaacgagcgcaaggccgaggtgaggctgcagttccatgatgtggccggcgacatcttccaccagcagtgcaagcgcaacgagctggtgatccgcgtgcagcccaacgaggccgtgtacaccaagatgatgaccagcctcagtgccacttgacattccttgtcaccagcaacatctcgagccccctggatgtcccctgtcccaccaactctgcactccatggccaccccgtgccacccgtaggcagcctctctgctataagaaaagcagacgcagcagctgggacccctcccaacctcaatgccctgccattaaatccgcaaacagcccctcctgtccccttgtcatttgcttccctgaggacccacttccttgtcccactccccaagtcacccgggtgcttcctctgtggccactgaggagcctcctcacttctggttctgaccccatgtcc

SEQ ID NO: 357569 - DNA, 1213 bp, Homo sapiens
gagggatgaaaacgataggctaggtacgaggccggtggttaggctgcgagcgcggagggcgacgacgacgaagcgcagacagcgtcatggcagagcaggtggccctgagccggacccaggtgtgcgggatcctgcgggaagagcttttccagggcgatgccttccatcagtcggatacacacatattcatcatcatgggtgcatcgggtgacctggccaagaagaagatctaccccaccatctggtggctgttccgggatggccttctgcccgaaaacaccttcatcgtgggctatgcccgttcccgcctcacagtggctgacatccgcaaacagagtgagcccttcttcaaggccaccccagaggagaagctcaagctggaggacttctttgcccgcaactcctatgtggctggccagtacgatgatgcagcctcctaccagcgcctcaacagccacatgaatgccctccacctggggtcacaggccaaccgcctcttctacctggccttgcccccgaccgtctacgaggccgtcaccaagaacattcacgagtcctgcatgagccagataggctggaaccgcatcatcgtggagaagcccttcgggagggacctgcagagctctgaccggctgtccaaccacatctcctccctgttccgtgaggaccagatctaccgcatcgaccactacctgggcaaggagatggtgcagaacctcatggtgctgagatttgccaacaggatcttcggccccatctggaaccgggacaacatcgcctgcgttatcctcaccttcaaggagccctttggcactgagggtcgcgggggctatttcgatgaatttgggatcatccgggacgtgatgcagaaccacctactgcagatgctgtgtctggtggccatggagaagcccgcctccaccaactcagatgacgtccgtgatgagaagacggagctcggtcgtcatgcgcacgaagggcgtgtggctcccgccatcaagacgttcaggatgagggcgctcgtgtatgccgtcaggtagcgttcccgctctggtattctgtggccggaggtccggttcccgctccgatcgcctcgtgggtttggagagcctgcgcggcttctgggtcctcatcgtggtgtacacggcctcgctgggctggacgcggaataccagtctcgtggcgcttgctgtgctgggtggagatgtcggcg

SEQ ID NO: 357570 - DNA, 1094 bp, Homo sapiens
gagggatgaaaacgataggctaggtacgaggccggtggttaggctgcgagcgcggagggcgacgacgacgaagcgcagacagcgtcatggcagagcaggtggccctgagccggacccaggtgtgcgggatcctgcgggaagagcttttccagggcgatgccttccatcagtcggatacacacatattcatcatcatgggtgcatcgggtgacctggccaagaagaagatctaccccaccatctggtggctgttccgggatggccttctgcccgaaaacaccttcatcgtgggctatgcccgttcccgcctcacagtggctgacatccgcaaacagagtgagcccttcttcaaggccaccccagaggagaagctcaagctggaggacttctttgcccgcaactcctatgtggctggccagtacgatgatgcagcctcctaccagcgcctcaacagccacatgaatgccctccacctggggtcacaggccaaccgcctcttctacctggccttgcccccgaccgtctacgaggccgtcaccaagaacattcacgagtcctgcatgagccagataggctggaaccgcatcatcgtggagaagcccttcgggagggacctgcagagctctgaccggctgtccaaccacatctcctccctgttccgtgaggaccagatctaccgcatcgaccactacctgggcaaggagatggtgcagaacctcatggtgctgagatttgccaacaggatcttcggccccatctggaaccgggacaacatcgcctgcgttatcctcaccttcaaggagccctttggcactgagggtcgcgggggctatttcgatgaatttgggatcatccgggacgtgatgcagaaccacctactgcagatgctgtgtctggtggccatggagaagcccgcctccaccaactcagatgacgtccgtgatgagaagacggctgcaaaagtggcggtggtggacccgcggggcaccgtggggtcgtccaggtaccctttggtggcctcgccctctccatcggggttccccacgtactgtcctacgaccacagttgttgcctgcacctctgagatcactcag

SEQ ID NO: 357571 - DNA, 714 bp, Homo sapiens
  misc_feature (584)..(584): n is a, c, g, or t
  misc_feature (587)..(587): n is a, c, g, or t
  misc_feature (608)..(608): n is a, c, g, or t
  misc_feature (620)..(620): n is a, c, g, or t
  misc_feature (660)..(660): n is a, c, g, or t
  misc_feature (701)..(701): n is a, c, g, or t
cgagaactcgggaagccggcgagaagtgtgaggccgcggtagggccgcatcccgctccggagagaagtctgagtccgccaggctctgcaggcccgcggaagctcgcagacagcgtcatggcagagcaggtggccctgagccggacccaggtgtgcgggatcctgcgggaagagcttttccagggcgatgccttccatcagtcggatacacacatattcatcatcatgggtgcatcgggtgacctggccaagaagaagatctaccccaccatctggtggctgttccgggatggccttctgcccgaaaacaccttcatcgtgggctatgcccgttcccgcctcacagtggctgacatccgcaaacagagtgagcccttcttcaaggccaccccagaggagaagctcaagctggaggacttctttgcccgcaactcctatgtggctggccagtacgatgatgcagcctcctaccagcgcctcaacagccacatgaatgccctccacctggggtcacaggccaaccgcctcttctacctggccttgcccccgaccgtctacgaggccgtcaccaagaacattcacaanacnacattaacacagaagggctgnaacgcatcaacnagggaaaccttcgggaaggaactgtagaagagctggaacnggtgtgccaacacaattcctctctgtttcctggaagaaccnaaataccgcatat

SEQ ID NO: 357572 - DNA, 2453 bp, Homo sapiens
  misc_feature (28)..(29): n is a, c, g, or t
  misc_feature (40)..(40): n is a, c, g, or t
tagagagagaaacagagagacatacggnnaggtacaggcnggtgttcccaggcgcccgcccccgcccccgccgattaaatgggccggcggggctcagcccccggaaacggtcgtacacttcggggctgcgagcgcggagggcgacgacgacgaagcgcagcagacagcgtcatggcagagcaggtggccctgagccggacccaggtgtgcgggatcctgcgggaagagcttttccagggcgatgccttccatcagtcggatacacacatattcatcatcatgggtgcatcgggtgacctggccaagaagaagatctaccccaccatctggtggctgttccgggatggccttctgcccgaaaacaccttcatcgtgggctatgcccgttcccgcctcacagtggctgacatccgcaaacagagtgagcccttcttcaaggccaccccagaggagaagctcaagctggaggacttctttgcccgcaactcctatgtggctggccagtacgatgatgcagcctcctaccagcgcctcaacagccacatgaatgccctccacctggggtcacaggccaaccgcctcttctacctggccttgcccccgaccgtctacgaggccgtcaccaagaacattcacgagtcctgcatgagccagataggctggaaccgcatcatcgtggagaagcccttcgggagggacctgcagagctctgaccggctgtccaaccacatctcctccctgttccgtgaggaccagatctaccgcatcgaccactacctgggcaaggagatggtgcagaacctcatggtgctgagatttgccaacaggatcttcggccccatctggaaccgggacaacatcgcctgcgttatcctcaccttcaaggagccctttggcactgagggtcgcgggggctatttcgatgaatttgggatcatccgggacgtgatgcagaaccacctactgcagatgctgtgtctggtggccatggagaagcccgcctccaccaactcagatgacgtccgtgatgagaaggtcaaggtgttgaaatgcatctcagaggtgcaggccaacaatgtggtcctgggccagtacgtggggaaccccgatggagagggcgaggccaccaaagggtacctggacgaccccacggtgccccgcgggtccaccaccgccacttttgcagccgtcgtcctctatgtggagaatgagaggtgggatggggtgcccttcatcctgcgctgcggcaaggccctgaacgagcgcaaggccgaggtgaggctgcagttccatgatgtggccggcgacatcttccaccagcagtgcaagcgcaacgagctggtgatccgcgtgcagcccaacgaggccgtgtacaccaagatgatgaccaagaagccgggcatgttcttcaaccccgaggagtcggagctggacctgacctacggcaacagatacaagaacgtgaagctccctgacgcctacgagcgcctcatcctggacgtcttctgcgggagccagatgcacttcgtgcgcagcgacgagctccgtgaggcctggcgtattttcaccccactgctgcaccagattgagctggagaagcccaagcccatcccctatatttatggcagccgaggccccacggaggcagacgagctgatgaagagagtgggtttccagtatgagggcacctacaagtgggtgaacccccacaagctctgagccctgggcacccacctccacccccgccacggccaccctccttcccgccgcccgaccccgagtcgggaggactccgggaccattgacctcagctgcacattcctggccccgggctctggccaccctggcccgcccctcgctgctgctactacccgagcccagctacattcctcagctgccaagcactcgagaccatcctggcccctccagaccctgcctgagcccaggagctgagtcacctcctccactcactccagcccaacagaaggaaggaggagggcgcccattcgtctgtcccagagcttattggccactgggtctcactcctgagtggggccagggtgggagggagggacaagggggaggaaaggggcgagcacccacgtgagagaatctgcctgtggccttgcccgccagcctcagtgccacttgacattccttgtcaccagcaacatctcgagccccctggatgtcccctgtcccaccaactctgcactccatggccaccccgtgccacccgtaggcagcctctctgctataagaaaagcagacgcagcagctgggacccctcccaacctcaatgccctgccattaaatccgcaaacagcccctcctgtccccttgtcatttgcttccctgaggacccacttccttgtcccactccccaagtcacccgggtgcttcctctgtggccactgaggagcctcctcacttctggttctgaccccatgtcc

SEQ ID NO: 357573 - DNA, 2398 bp, Homo sapiens
cgagaactcgggaagccggcgagaagtgtgaggccgcggtagggccgcatcccgctccggagagaagtctgagtccgccaggctctgcaggcccgcggaagctcgcagacagcgtcatggcagagcaggtggccctgagccggacccaggtgtgcgggatcctgcgggaagagcttttccagggcgatgccttccatcagtcggatacacacatattcatcatcatgggtgcatcgggtgacctggccaagaagaagatctaccccaccatctggtggctgttccgggatggccttctgcccgaaaacaccttcatcgtgggctatgcccgttcccgcctcacagtggctgacatccgcaaacagagtgagcccttcttcaaggccaccccagaggagaagctcaagctggaggacttctttgcccgcaactcctatgtggctggccagtacgatgatgcagcctcctaccagcgcctcaacagccacatgaatgccctccacctggggtcacaggccaaccgcctcttctacctggccttgcccccgaccgtctacgaggccgtcaccaagaacattcacgagtcctgcatgagccagataggctggaaccgcatcatcgtggagaagcccttcgggagggacctgcagagctctgaccggctgtccaaccacatctcctccctgttccgtgaggaccagatctaccgcatcgaccactacctgggcaaggagatggtgcagaacctcatggtgctgagatttgccaacaggatcttcggccccatctggaaccgggacaacatcgcctgcgttatcctcaccttcaaggagccctttggcactgagggtcgcgggggctatttcgatgaatttgggatcatccgggacgtgatgcagaaccacctactgcagatgctgtgtctggtggccatggagaagcccgcctccaccaactcagatgacgtccgtgatgagaaggtcaaggtgttgaaatgcatctcagaggtgcaggccaacaatgtggtcctgggccagtacgtggggaaccccgatggagagggcgaggccaccaaagggtacctggacgaccccacggtgccccgcgggtccaccaccgccacttttgcagccgtcgtcctctatgtggagaatgagaggtgggatggggtgcccttcatcctgcgctgcggcaaggccctgaacgagcgcaaggccgaggtgaggctgcagttccatgatgtggccggcgacatcttccaccagcagtgcaagcgcaacgagctggtgatccgcgtgcagcccaacgaggccgtgtacaccaagatgatgaccaagaagccgggcatgttcttcaaccccgaggagtcggagctggacctgacctacggcaacagatacaagaacgtgaagctccctgacgcctacgagcgcctcatcctggacgtcttctgcgggagccagatgcacttcgtgcgcagcgacgagctccgtgaggcctggcgtattttcaccccactgctgcaccagattgagctggagaagcccaagcccatcccctatatttatggcagccgaggccccacggaggcagacgagctgatgaagagagtgggtttccagtatgagggcacctacaagtgggtgaacccccacaagctctgagccctgggcacccacctccacccccgccacggccaccctccttcccgccgcccgaccccgagtcgggaggactccgggaccattgacctcagctgcacattcctggccccgggctctggccaccctggcccgcccctcgctgctgctactacccgagcccagctacattcctcagctgccaagcactcgagaccatcctggcccctccagaccctgcctgagcccaggagctgagtcacctcctccactcactccagcccaacagaaggaaggaggagggcgcccattcgtctgtcccagagcttattggccactgggtctcactcctgagtggggccagggtgggagggagggacaagggggaggaaaggggcgagcacccacgtgagagaatctgcctgtggccttgcccgccagcctcagtgccacttgacattccttgtcaccagcaacatctcgagccccctggatgtcccctgtcccaccaactctgcactccatggccaccccgtgccacccgtaggcagcctctctgctataagaaaagcagacgcagcagctgggacccctcccaacctcaatgccctgccattaaatccgcaaacagcccctcctgtccccttgtcatttgcttccctgaggacccacttccttgtcccactccccaagtcacccgggtgcttcctctgtggccactgaggagcctcctcacttctggttctgaccccatgtcc

SEQ ID NO: 357574 - DNA, 1669 bp, Homo sapiens
  misc_feature (1642)..(1642): n is a, c, g, or t
  misc_feature (1655)..(1655): n is a, c, g, or t
gagggatgaaaacgataggctaggtacgaggccggtggttaggctgcgagcgcggagggcgacgacgacgaagcgcagacagcgtcatggcagagcaggtggccctgagccggacccaggtgtgcgggatcctgcgggaagagcttttccagggcgatgccttccatcagtcggatacacacatattcatcatcatgggtgcatcgggtgacctggccaagaagaagatctaccccaccatctggtggctgttccgggatggccttctgcccgaaaacaccttcatcgtgggctatgcccgttcccgcctcacagtggctgacatccgcaaacagagtgagcccttcttcaaggccaccccagaggagaagctcaagctggaggacttctttgcccgcaactcctatgtggctggccagtacgatgatgcagcctcctaccagcgcctcaacagccacatgaatgccctccacctggggtcacaggccaaccgcctcttctacctggccttgcccccgaccgtctacgaggccgtcaccaagaacattcacgagtcctgcatgagccagataggctggaaccgcatcatcgtggagaagcccttcgggagggacctgcagagctctgaccggctgtccaaccacatctcctccctgttccgtgaggaccagatctaccgcatcgaccactacctgggcaaggagatggtgcagaacctcatggtgctgagatttgccaacaggatcttcggccccatctggaaccgggacaacatcgcctgcgttatcctcaccttcaaggagccctttggcactgagggtcgcgggggctatttcgatgaatttgggatcatccgggacgtgatgcagaaccacctactgcagatgctgtgtctggtggccatggagaagcccgcctccaccaactcagatgacgtccgtgatgagaaggtcaaggtgttgaaatgcatctcagaggtgcaggccaacaatgtggtcctgggccagtacgtggggaaccccgatggagagggcgaggccaccaaagggtacctggacgaccccacggtgccccgcgggtccaccaccgccacttttgcagccgtcgtcctctatgtggagaatgagaggtgggatggggtgcccttcatcctgcgctgcggcaaggccctgaacgagcgcaaggccgaggtgaggctgcagttccatgatgtggccggcgacatcttccaccagcagtgcaagcgcaacgagctggtgatccgcgtgcagcccaacgaggccgtgtacaccaagatgatgaccaagaagccgggcatgttcttcaaccccgaggagtcggagctggacctgacctacggcaacagatacaagaacgtgaagctccctgacgcctacgagcgcctcatcctggacgtcttctgcgggagccagatgcacttcgtgcgcagcgacgagctccgtgaggcctggcgtattttcaccccactgctgcaccagattgagctggagaagcccaagcccatcccctatatttatggcagccgaggccccacggaggcagacgagctgatgaagagagtgggtttccagtatgagggcacctacaagtgggtgaacccccacaagctctgagccctggncatcgaagggatnctcaagagcagctc

SEQ ID NO: 357575 - DNA, 1790 bp, Homo sapiens
gagggatgaaaacgataggctaggtacgaggccggtggttaggctgcgagcgcggagggcgacgacgacgaagcgcagacagcgtcatggcagagcaggtggccctgagccggacccaggtgtgcgggatcctgcgggaagagcttttccagggcgatgccttccatcagtcggatacacacatattcatcatcatgggtgcatcgggtgacctggccaagaagaagatctaccccaccatctggtggctgttccgggatggccttctgcccgaaaacaccttcatcgtgggctatgcccgttcccgcctcacagtggctgacatccgcaaacagagtgagcccttcttcaaggccaccccagaggagaagctcaagctggaggacttctttgcccgcaactcctatgtggctggccagtacgatgatgcagcctcctaccagcgcctcaacagccacatgaatgccctccacctggggtcacaggccaaccgcctcttctacctggccttgcccccgaccgtctacgaggccgtcaccaagaacattcacgagtcctgcatgagccagataggctggaaccgcatcatcgtggagaagcccttcgggagggacctgcagagctctgaccggctgtccaaccacatctcctccctgttccgtgaggaccagatctaccgcatcgaccactacctgggcaaggagatggtgcagaacctcatggtgctgagatttgccaacaggatcttcggccccatctggaaccgggacaacatcgcctgcgttatcctcaccttcaaggagccctttggcactgagggtcgcgggggctatttcgatgaatttgggatcatccgggacgtgatgcagaaccacctactgcagatgctgtgtctggtggccatggagaagcccgcctccaccaactcagatgacgtccgtgatgagaaggtcaaggtgttgaaatgcatctcagaggtgcaggccaacaatgtggtcctgggccagtacgtggggaaccccgatggagagggcgaggccaccaaagggtacctggacgaccccacggtgccccgcgggtccaccaccgccacttttgcagccgtcgtcctctatgtggagaatgagaggtgggatggggtgcccttcatcctgcgctgcggcaaggccctgaacgagcgcaaggccgaggtgaggctgcagttccatgatgtggccggcgacatcttccaccagcagtgcaagcgcaacgagctggtgatccgcgtgcagcccaacgaggccgtgtacaccaagatgatgaccaagaagccgggcatgttcttcaaccccgaggagtcggagctggacctgacctacggcaacagatacaagaacgtgaagctccctgacgccagggtgggagggagggacaagggggaggaaaggggcgagcacccacgtgagagaatctgcctgtggccttgcccgccagcctcagtgccacttgacattccttgtcaccagcaacatctcgagccccctggatgtcccctgtcccaccaactctgcactccatggccaccccgtgccacccgtaggcagcctctctgctataagaaaagcagacgcagcagctgggacccctcccaacctcaatgccctgccattaaatccgcaaacagcccctcctgtccccttgtcatttgcttccctgaggacccacttccttgtcccactccccaagtcacccgggtgcttcctctgtggccactgaggagcctcctcacttctggttctgaccccatgtcc

SEQ ID NO: 357576 - DNA, 1301 bp, Homo sapiens
gagggatgaaaacgataggctaggtacgaggccggtggttaggctgcgagcgcggagggcgacgacgacgaagcgcagacagcgtcatggcagagcaggtggccctgagccggacccaggtgtgcgggatcctgcgggaagagcttttccagggcgatgccttccatcagtcggatacacacatattcatcatcatgggtgcatcgggtgacctggccaagaagaagatctaccccaccatctggtggctgttccgggatggccttctgcccgaaaacaccttcatcgtgggctatgcccgttcccgcctcacagtggctgacatccgcaaacagagtgagcccttcttcaaggccaccccagaggagaagctcaagctggaggacttctttgcccgcaactcctatgtggctggccagtacgatgatgcagcctcctaccagcgcctcaacagccacatgaatgccctccacctggggtcacaggccaaccgcctcttctacctggccttgcccccgaccgtctacgaggccgtcaccaagaacattcacgagtcctgcatgagccagataggctggaaccgcatcatcgtggagaagcccttcgggagggacctgcagagctctgaccggctgtccaaccacatctcctccctgttccgtgaggaccagatctaccgcatcgaccactacctgggcaaggagatggtgcagaacctcatggtgctgagatttgccaacaggatcttcggccccatctggaaccgggacaacatcgcctgcgttatcctcaccttcaaggagccctttggcactgagggtcgcgggggctatttcgatgaatttgggatcatccgggacgtgatgcagaaccacctactgcagatgctgtgtctggtggccatggagaagcccgcctccaccaactcagatgacgtccgtgatgagaaggtcaaggtgttgaaatgcatctcagaggtgcaggccaacaatgtggtcctgggccagtacgtggggaaccccgatggagagggcgaggccaccaaagggtacctggacgaccccacggtgccccgcgggtccaccaccgcgcagcctctctgctataagaaaagcagacgcagcagctgggacccctcccaacctcaatgccctgccattaaatccgcaaacagcccctcctgtccccttgtcatttgcttccctgaggacccacttccttgtcccactccccaagtcacccgggtgcttcctctgtggccactgaggagcctcctcacttctggttctgaccccatgtcc

SEQ ID NO: 357577 - DNA, 1309 bp, Homo sapiens
agggacagcccagaggaggcgtggccacgctgccggcggaagtggagccctccgcgagcgcgcgaggccgccggggaggcggggaaaccggacagtaggggcggggcgggccggcgatggggatgcgggagcactacgcggagctgcacccgtgcccgccggaattggggatgcagagcagcggcagcgggtatggcaggcaccggcgggccggcctccagcgcaggtgcccgagaggcaggggctggcctgggatgcgcgcgcacctgccctcgccccgccccgcccgcacgaggggtggtggccgaggccccgccccgcacgcctcgcctgaggcgggtccgctcagcccaggcgcccgcccccgcccccgccgattaaatgggccggcggggctcagcccccggaaacggtcgtacacttcggggctgcgagcgcggagggcgacgacgacgaagcgcagcagacagcgtcatggcagagcaggtggccctgagccggacccaggtgtgcgggatcctgcgggaagagcttttccagggcgatgccttccatcagtcggatacacacatattcatcatcatgggtgcatcgggtgacctggccaagaagaagatctaccccaccatctggtggctgttccgggatggccttctgcccgaaaacaccttcatcgtgggctatgcccgttcccgcctcacagtggctgacatccgcaaacagagtgagcccttcttcaaggccaccccagaggagaagctcaagctggaggacttctttgcccgcaactcctatgtggctggccagtacgatgatgcagcctcctaccagcgcctcaacagccacatgaatgccctccacctggggtcacaggccaaccgcctcttctacctggccttgcccccgaccgtctacgaggccgtcaccaagaacattcacgagtcctgcatgagccagataggctggaaccgcatcatcgtggagaagcccttcgggagggacctgcagagctctgaccggctgtccaaccacatctcctccctgttccgtgaggaccagatctaccgcatcgaccactacctgggcaaggagatggtgcagaacctcatggtgctgagatttgccaacaggatcttcggccccatctggaaccgggacaacatcgcctgcgttatcctcaccttcaaggagccctttggcactgagggtcgcgggggctatttcgatgaatttgggatcatccgggagtgatgcgaacacccctttttgtgaatgtggtctgggtggcctggggaagccgggttcacag

SEQ ID NO: 357578 - DNA, 331 bp, Homo sapiens
gccttactgagtcatgtttctgactaaaaccgcgttatgaaatggagagaatgacatgtcttgggtttaatcaccacagatgttaactccctgaattttagagttgcagaggaaaaagagcaaaaaccaaaaaaaaaaaatgttcagtaataatgatgtgggtctcataggactccagaaagaacctgccaaagctgcgaactctgcttatttacctaaaacaaatcctaactgtgcaaacaggcacaccctctgatgccacagagcgggaacgccaaggtgggaggaattcagaacaatcacaaggttaacgttccactgagaacacagc

SEQ ID NO: 357579 - DNA, 2400 bp, Homo sapiens
  misc_feature (5)..(5): n is a, c, g, or t
  misc_feature (7)..(7): n is a, c, g, or t
caggncnggtggtgagcagggacggtgcaccggacggcgggatcgagcaaatgggtctggccatggagcacggagggtcctacgctcgggcggggggcagctctcggggctgctggtattacctgcgctacttcttcctcttcgtctccctcatccaattcctcatcatcctggggctcgtgctcttcatggtctatggcaacgtgcacgtgagcacagagtccaacctgcaggccaccgagcgccgagccgagggcctatacagtcagctcctagggctcacggcctcccagtccaacttgaccaaggagctcaacttcaccacccgcgccaaggatgccatcatgcagatgtggctgaatgctcgccgcgacctggaccgcatcaatgccagcttccgccagtgccagggtgaccgggtcatctacacgaacaatcagaggtacatggctgccatcatcttgagtgagaagcaatgcagagatcaattcaaggacatgaacaagagctgcgatggtgagtgctaaggctgcagggagccggggtggtggactccctgcccagtgctctcggcagcccccaatcttcctgggtctcctggtcctgttttccttagccttgctcttcatgctgaatcagaaggtgaagacgctggaggtggagatagccaaggagaagaccatttgcactaaggataaggaaagcgtgctgctgaacaaacgcgtggcggaggaacagctggttgaatgcgtgaaaacccgggagctgcagcaccaagagcgccagctggccaaggagcaactgcaaaaggtgcaagccctctgcctgcccctggacaaggacaagtttgagatggaccttcgtaacctgtggagggactccattatcccacgcagcctggacaacctgggttacaacctctaccatcccctgggctcggaattggcctccatccgcagagcctgcgaccacatgcccagcctcatgagctccaaggtggaggagctggcccggagcctccgggcggatatcgaacgcgtggcccgcgagaactcagacctccaacgccagaagctggaagcccagcagggcctgcgggccagtcaggaggcgaaacagaaggtggagaaggaggctcaggcccgggaggccaagctccaagctgaatgctcccggcagacccagctagcgctggaggagaaggcggtgctgcggaaggaacgagacaacctggccaaggagctggaagagaagaagagggaggcggagcagctcaggatggagctggccatcagaaactcagccctggacacctgcatcaagaccaagtcgcagccgatgatgccagtgtcaaggcccatgggccctgtccccaacccccagcccatcgacccagctagcctggaggagttcaagaggaagatcctggagtcccagaggccccctgcaggcatccctgtagccccatccagtggctgaggaggctccaggcctgaggaccaagggatggcccgactcggcggtttgcggaggatgcagggatatgctcacagcgcccgacacaaccccctcccgccgcccccaaccacccagggccaccatcagacaactccctgcatgcaaacccctagtaccctctcacacccgcacccgcgcctcacgatccctcacccagagcacacggccgcggagatgacgtcacgcaagcaacggcgctgacgtcacatatcaccgtggtgatggcgtcacgtggccatgtagacgtcacgaagagatatagcgatggcgtcgtgcagatgcagcacgtcgcacacagacatggggaacttggcatgacgtcacaccgagatgcagcaacgacgtcacgggccatgtcgacgtcacacatattaatgtcacacagacgcggcgatggcatcacacagacggtgatgatgtcacacacagacacagtgacaacacacaccatgacaacgacacctatagatatggcaccaacatcacatgcacgcatgccctttcacacacactttctacccaattctcacctagtgtcacgttcccccgaccctggcacacgggccaaggtacccacaggatcccatcccctcccgcacagccctgggccccagcacctcccctcctccagcttcctggcctcccagccacttcctcacccccagtgcctggacccggaggtgagaacaggaagccattcacctccgctccttgagcgtgagtgtttccaggaccccctcggggccctgagccgggggtgagggtcacctgttgtcgggaggggagccactccttctcccccaactcccagccctgcctgtggcccgttgaaatgttggtggcacttaataaatattagtaaatccttcaaaaaaaaaagaa

SEQ ID NO: 357580 - DNA, 2307 bp, Homo sapiens
  misc_feature (5)..(5): n is a, c, g, or t
  misc_feature (7)..(7): n is a, c, g, or t
caggncnggtggtgagcagggacggtgcaccggacggcgggatcgagcaaatgggtctggccatggagcacggagggtcctacgctcgggcggggggcagctctcggggctgctggtattacctgcgctacttcttcctcttcgtctccctcatccaattcctcatcatcctggggctcgtgctcttcatggtctatggcaacgtgcacgtgagcacagagtccaacctgcaggccaccgagcgccgagccgagggcctatacagtcagctcctagggctcacggcctcccagtccaacttgaccaaggagctcaacttcaccacccgcgccaaggatgccatcatgcagatgtggctgaatgctcgccgcgacctggaccgcatcaatgccagcttccgccagtgccagggtgaccgggtcatctacacgaacaatcagaggtacatggctgccatcatcttgagtgagaagcaatgcagagatcaattcaaggacatgaacaagagctgcgatgccttgctcttcatgctgaatcagaaggtgaagacgctggaggtggagatagccaaggagaagaccatttgcactaaggataaggaaagcgtgctgctgaacaaacgcgtggcggaggaacagctggttgaatgcgtgaaaacccgggagctgcagcaccaagagcgccagctggccaaggagcaactgcaaaaggtgcaagccctctgcctgcccctggacaaggacaagtttgagatggaccttcgtaacctgtggagggactccattatcccacgcagcctggacaacctgggttacaacctctaccatcccctgggctcggaattggcctccatccgcagagcctgcgaccacatgcccagcctcatgagctccaaggtggaggagctggcccggagcctccgggcggatatcgaacgcgtggcccgcgagaactcagacctccaacgccagaagctggaagcccagcagggcctgcgggccagtcaggaggcgaaacagaaggtggagaaggaggctcaggcccgggaggccaagctccaagctgaatgctcccggcagacccagctagcgctggaggagaaggcggtgctgcggaaggaacgagacaacctggccaaggagctggaagagaagaagagggaggcggagcagctcaggatggagctggccatcagaaactcagccctggacacctgcatcaagaccaagtcgcagccgatgatgccagtgtcaaggcccatgggccctgtccccaacccccagcccatcgacccagctagcctggaggagttcaagaggaagatcctggagtcccagaggccccctgcaggcatccctgtagccccatccagtggctgaggaggctccaggcctgaggaccaagggatggcccgactcggcggtttgcggaggatgcagggatatgctcacagcgcccgacacaaccccctcccgccgcccccaaccacccagggccaccatcagacaactccctgcatgcaaacccctagtaccctctcacacccgcacccgcgcctcacgatccctcacccagagcacacggccgcggagatgacgtcacgcaagcaacggcgctgacgtcacatatcaccgtggtgatggcgtcacgtggccatgtagacgtcacgaagagatatagcgatggcgtcgtgcagatgcagcacgtcgcacacagacatggggaacttggcatgacgtcacaccgagatgcagcaacgacgtcacgggccatgtcgacgtcacacatattaatgtcacacagacgcggcgatggcatcacacagacggtgatgatgtcacacacagacacagtgacaacacacaccatgacaacgacacctatagatatggcaccaacatcacatgcacgcatgccctttcacacacactttctacccaattctcacctagtgtcacgttcccccgaccctggcacacgggccaaggtacccacaggatcccatcccctcccgcacagccctgggcacacacccccatgtccaccatgatcctcttctcacggtgacttgtgctccctcagcaatcatctttcctgttccagacaggtgggcattaggtgtctccatctgagcgtcagtgtcatggtgccctcagctgtacctttatccttccgttattagtcattatgaacgttgagtaatagaattccactctcttctcacttcttgctcatgagaggtgtgatgaggttaattaaagaagaagatgtcctattatttgagagtcgtaattcatggaacgcatg

SEQ ID NO: 357581 - DNA, 727 bp, Homo sapiens
caaggaccatcagtcatcctttaaaattcatttcaagctctgaaaagatattttttgtcacatggccacggtattgatggccatgtagacgtcacgaagagatatagcgatggcgtcgtgcagatgcagcacgtcgcacacagacatggggaacttggcatgacgtcacaccgagatgcagcaacgacgtcacgggccatgtcgacgtcacacatattaatgtcacacagacgcggcgatggcatcacacagacggtgatgatgtcacacacagacacagtgacaacacacaccatgacaacgacacctatagatatggcaccaacatcacatgcacgcatgccctttcacacacactttctacccaattctcacctagtgtcacgttcccccgaccctggcacacgggccaaggtacccacaggatcccatcccctcccgcacagccctgggccccagcacctcccctcctccagcttcctggcctcccagccacttcctcacccccagtgcctggacccggaggtgagaacaggaagccattcacctccgctccttgagcgtgagtgtttccaggaccccctcggggccctgagccgggggtgagggtcacctgttgtcgggaggggagccactccttctcccccaactcccagccctgcctgtggcccgttgaaatgttggtggcacttaataaatattagtaaatccttcaaaaaaaaaagaa

SEQ ID NO: 357582 - DNA, 748 bp, Homo sapiens
  misc_feature (5)..(5): n is a, c, g, or t
  misc_feature (7)..(7): n is a, c, g, or t
caggncnggtggtgagcagggacggtgcaccggacggcgggatcgagcaaatgggtctggccatggagcacggagggtcctacgctcgggcggggggcagctctcggggctgctggtattacctgcgctacttcttcctcttcgtctccctcatccaattcctcatcatcctggggctcgtgctcttcatggtctatggcaacgtgcacgtgagcacagagtccaacctgcaggccaccgagcgccgagccgagggcctatacagtcagctcctagggctcacggcctcccagtccaacttgaccaaggagctcaacttcaccacccgcgccaaggatgccatcatgcagatgtggctgaatgctcgccgcgacctggaccgcatcaatgccagcttccgccagtgccagggtgaccgggtcatctacacgaacaatcagaggtacatggctgccatcatcttgagtgagaagcaatgcagagatcaattcaaggacatgaacaagagctgcgatgccttgctcttcatgctgaatcagaaggtgaagacgaacaggaagccattcacctccgctccttgagcgtgagtgtttccaggaccccctcggggccctgagccgggggtgagggtcacctgttgtcgggaggggagccactccttctcccccaactcccagccctgcctgtggcccgttgaaatgttggtggcacttaataaatattagtaaatccttcaaaaaaaaaagaa

SEQ ID NO: 357583 - DNA, 453 bp, Homo sapiens
gtgatcctcccacctcagcctcccaagtaattgggatgacaggtgtgagctgccacacctggcttctaacattccctcataaagggaccatgcccttgtgaactcagctcactctggccaccagggtgctcgatctgggtccaggcagtcctgggggcaagacactaagctctgtcctgcgtccttcccctatcttccgggcaggtcatctacacgaacaatcagaggtacatggctgccatcatcttgagtgagaagcaatgcagagatcaattcaaggacatgaacaagagctgcgatggtgagtgctaaggctgcagggagccggggtggtggactccctgcccagtgctctcggcagcccccaatcttcctgggtctcctggtcctgttttccttagccttgctcttcatgctgaatcagaaggtgaagacgctggaggtggagatagc

SEQ ID NO: 357584 - DNA, 2300 bp, Homo sapiens
  misc_feature (5)..(5): n is a, c, g, or t
  misc_feature (7)..(7): n is a, c, g, or t
caggncnggtggtgagcagggacggtgcaccggacggcgggatcgagcaaatgggtctggccatggagcacggagggtcctacgctcgggcggggggcagctctcggggctgctggtattacctgcgctacttcttcctcttcgtctccctcatccaattcctcatcatcctggggctcgtgctcttcatggtctatggcaacgtgcacgtgagcacagagtccaacctgcaggccaccgagcgccgagccgagggcctatacagtcagctcctagggctcacggcctcccagtccaacttgaccaaggagctcaacttcaccacccgcgccaaggatgccatcatgcagatgtggctgaatgctcgccgcgacctggaccgcatcaatgccagcttccgccagtgccagggtgaccgggtcatctacacgaacaatcagaggtacatggctgccatcatcttgagtgagaagcaatgcagagatcaattcaaggacatgaacaagagctgcgatgccttgctcttcatgctgaatcagaaggtgaagacgctggaggtggagatagccaaggagaagaccatttgcactaaggataaggaaagcgtgctgctgaacaaacgcgtggcggaggaacagctggttgaatgcgtgaaaacccgggagctgcagcaccaagagcgccagctggccaaggagcaactgcaaaaggtgcaagccctctgcctgcccctggacaaggacaagtttgagatggaccttcgtaacctgtggagggactccattatcccacgcagcctggacaacctgggttacaacctctaccatcccctgggctcggaattggcctccatccgcagagcctgcgaccacatgcccagcctcatgagctccaaggtggaggagctggcccggagcctccgggcggatatcgaacgcgtggcccgcgagaactcagacctccaacgccagaagctggaagcccagcagggcctgcgggccagtcaggaggcgaaacagaaggtggagaaggaggctcaggcccgggaggccaagctccaagctgaatgctcccggcagacccagctagcgctggaggagaaggcggtgctgcggaaggaacgagacaacctggccaaggagctggaagagaagaagagggaggcggagcagctcaggatggagctggccatcagaaactcagccctggacacctgcatcaagaccaagtcgcagccgatgatgccagtgtcaaggcccatgggccctgtccccaacccccagcccatcgacccagctagcctggaggagttcaagaggaagatcctggagtcccagaggccccctgcaggcatccctgtagccccatccagtggctgaggaggctccaggcctgaggaccaagggatggcccgactcggcggtttgcggaggatgcagggatatgctcacagcgcccgacacaaccccctcccgccgcccccaaccacccagggccaccatcagacaactccctgcatgcaaacccctagtaccctctcacacccgcacccgcgcctcacgatccctcacccagagcacacggccgcggagatgacgtcacgcaagcaacggcgctgacgtcacatatcaccgtggtgatggcgtcacgtggccatgtagacgtcacgaagagatatagcgatggcgtcgtgcagatgcagcacgtcgcacacagacatggggaacttggcatgacgtcacaccgagatgcagcaacgacgtcacgggccatgtcgacgtcacacatattaatgtcacacagacgcggcgatggcatcacacagacggtgatgatgtcacacacagacacagtgacaacacacaccatgacaacgacacctatagatatggcaccaacatcacatgcacgcatgccctttcacacacactttctacccaattctcacctagtgtcacgttcccccgaccctggcacacgggccaaggtacccacaggatcccatcccctcccgcacagccctgggccccagcacctcccctcctccagcttcctggcctcccagccacttcctcacccccagtgcctggacccggaggtgagaacaggaagccattcacctccgctccttgagcgtgagtgtttccaggaccccctcggggccctgagccgggggtgagggtcacctgttgtcgggaggggagccactccttctcccccaactcccagccctgcctgtggcccgttgaaatgttggtggcacttaataaatattagtaaatccttcaaaaaaaaaagaa

SEQ ID NO: 357585 - DNA, 822 bp, Homo sapiens
tattgagtggccatgtgacaggaattccttcttttttaaggctgcataatattctattttatgtgtatggcacattttctttacccattcatccattcatgggttgcttctctcttgtggctattgtgaattaagctgcgtgaacatgagtgtgcaaatatctctgtattgatggccatgtagacgtcacgaagagatatagcgatggcgtcgtgcagatgcagcacgtcgcacacagacatggggaacttggcatgacgtcacaccgagatgcagcaacgacgtcacgggccatgtcgacgtcacacatattaatgtcacacagacgcggcgatggcatcacacagacggtgatgatgtcacacacagacacagtgacaacacacaccatgacaacgacacctatagatatggcaccaacatcacatgcacgcatgccctttcacacacactttctacccaattctcacctagtgtcacgttcccccgaccctggcacacgggccaaggtacccacaggatcccatcccctcccgcacagccctgggccccagcacctcccctcctccagcttcctggcctcccagccacttcctcacccccagtgcctggacccggaggtgagaacaggaagccattcacctccgctccttgagcgtgagtgtttccaggaccccctcggggccctgagccgggggtgagggtcacctgttgtcgggaggggagccactccttctcccccaactcccagccctgcctgtggcccgttgaaatgttggtggcacttaataaatattagtaaatccttcaaaaaaaaaagaa

SEQ ID NO: 357586 - DNA, 1335 bp, Homo sapiens
  misc_feature (5)..(5): n is a, c, g, or t
  misc_feature (7)..(7): n is a, c, g, or t
caggncnggtggtgagcagggacggtgcaccggacggcgggatcgagcaaatgggtctggccatggagcacggagggtcctacgctcgggcggggggcagctctcggggctgctggtattacctgcgctacttcttcctcttcgtctccctcatccaattcctcatcatcctggggctcgtgctcttcatggtctatggcaacgtgcacgtgagcacagagtccaacctgcaggccaccgagcgccgagccgagggcctatacagtcagctcctagggctcacggcctcccagtccaacttgaccaaggagctcaacttcaccacccgcgccaaggatgccatcatgcagatgtggctgaatgctcgccgcgacctggaccgcatcaatgccagcttccgccagtgccagggtgaccgggtcatctacacgaacaatcagaggtacatggctgccatcatcttgagtgagaagcaatgcagagatcaattcaaggacatgaacaagagctgcgatgccttgctcttcatgctgaatcagaaggtgaagacgctggaggtggagatagccaaggagaagaccatttgcactaaggataaggaaagcgtgctgctgaacaaacgcgtggcggaggaacagctggttgaatgcgtgaaaacccgggagctgcagcaccaagagcgccagctggccaaggagcaactgcaaaaggtgcaagccctctgcctgcccctggacaaggacaagtttgagatggaccttcgtaacctgtggagggactccattatcccacgcagcctggacaacctgggttacaacctctaccatcccctgggctcggaattggcctccatccgcagagcctgcgaccacatgcccagcctcatgagctccaaggtggaggagctggcccggagcctccgggcggatatcgaacgcgtggcccgcgagaactcagacctccaacgccagaagctggaagcccagcagggcctgcgggccagtcaggaggcgaaacagaaggtggagaaggaggctcaggcccgggaggccaagctccaagctgaatgctcccggcagacccagttcctggcctcccagccacttcctcacccccagtgcctggacccggaggtgagaacaggaagccattcacctccgctccttgagcgtgagtgtttccaggaccccctcggggccctgagccgggggtgagggtcacctgttgtcgggaggggagccactccttctcccccaactcccagccctgcctgtggcccgttgaaatgttggtggcacttaataaatattagtaaatccttcaaaaaaaaaagaa

SEQ ID NO: 357587 - DNA, 410 bp, Homo sapiens
taccaattcacatggaggaccttattgtttggtccaataatcagagatttgaaagaacctgatattgttggccagcagattagaaaagagttattagagagagatggctcaagtgataataactgtatgccttgtgaatgctcacctaaaccaaagatcactgaagataatgtattttaccataatgttttaatctcaggtaaatgccaatcaggagacaaacacttctttatctcctgattggtattgatctgaattaagctgtctgccatttggagaaatttaaatgctattttaaacacacagtcttgttacttgagttatttatgatcttaagcggctcccctccttttgtgggttagattgtgtcttcaaaaagaaaatatatatattagagttctagcccctga

SEQ ID NO: 357588 - DNA, 598 bp, Homo sapiens
actagattagtcctaattaatttagtctacttagtttaactaatcggtaactgccttagtctgttttgtgttgctataacagaatacttgagtctgggtaacttgtagagaaaaggggtttacttggcttatgattctggtggctagatagtctaagattggaaagctgaatctggtaagggtctcaggctgcttccattcatggtggagagtggcaagggagtgggcaggtgcagaggaatcagatggtgagagagaaagtaggggagagaaactgaagaaaccagactttttaacagcccactgttgtgggaattaatttactcctaccagactctgattatcctttttaatttaggtgaaggatgctaccccaacaggatagcattaatttattcatgaaaaatccacccctcggacccaaacacctcccactagtctccagcttccatcatggccacactggggaccaaatttcaacatgagttttgatggggacaaaccacatccagaccatagtagtaaccagcattgatttacctcctactcgcagtcatttggtggctgcaaaaatgtattaagcaagcctctgctctca

SEQ ID NO: 357589 - DNA, 1128 bp, Homo sapiens
cgtctccctcgcagtcccgcccgcccctcctgccgcccctgccgcgcgcgccgcagcagcgccgccttccctgcggagtcggtgtctccgcgtcgctgggtgggacttggctcggcggccatgggcaagcagaacagcaagctgcggcccgagatgttgcaggacctgcgagagaacacagagttctcagagctggagctgcaggagtggtacaagggcttcctcaaggactgccccacaggaatcctcaatgtggatgagttcaagaagatctacgccaacttctttccctatggtgacgcctccaagtttgccgagcacgtcttccgcacctttgacaccaacagcgatggcaccatagactttcgggagttcatcattgcgctgagcgtgacctcgcgcggccgcctggagcagaagctcatgtgggccttcagcatgtatgacctggacggcaacggctacatcagccgggaggagatgctggagatcgtgcaggccatttacaagatggtttcgtccgtgatgaagatgccggaggacgagtcgaccccggaaaagaggactgagaaaatcttccgccaaatggacacaaacaacgacggcaagctgtccttggaggagttcatccgcggggccaaaagcgacccgtccatcgtgcgtctgctgcagtgcgaccccagcagcgcctcccagttctgagaggagccaggttccccttcctccctcccttcaccggccccctcccggctcttagcttccactcccttgtgtgtattctggctgggggccagattggggaagcccttctccccgggtctgccctgtggggggcttccggaaaagggaaccctgcggtacccccaggccaaagcaagtaagcggttagcaccccccaatcccagaggcaacaatagagacacaggctgggttggtctgcccctcagtcaggcccccttacccacccaccagccccaaggcccgacccctcccccaaaggggcagtccccttcttgcaggtctcagcttgcggggtggggggagtcatgccctgcatgcagccaaatggagcatctctgttctttttaataatttcagaataaagtctcatttcagtgcagtgggctg

SEQ ID NO: 357590 - DNA, 1494 bp, Homo sapiens
cgtctccctcgcagtcccgcccgcccctcctgccgcccctgccgcgcgcgccgcagcagcgccgccttccctgcggagtcggtgtctccgcgtcgctgggtgggacttggctcggcggccatgggcaagcagaacagcaagctgcggcccgagatgttgcaggacctgcgagagaacacagagttctcagagctggagctgcaggagtggtacaagggcttcctcaaggactgccccacaggaatcctcaatgtggatgagttcaagaagatctacgccaacttctttccctatggtgacgcctccaagtttgccgagcacgtcttccgcacctttgacaccaacagcgatggcaccatagactttcgggagttcatcattgcgctgagcgtgacctcgcgcggccgcctggagcagaagctcatgtgggccttcagcatgtatgacctggacggcaacggctacatcagccgggaggagatgctggagatcgtgcaggccatttacaagatggtttcgtccgtgatgaagatgccggaggacgagtcgaccccggaaaagaggactgagaaaatcttccgccaaatggacacaaacaacgacggcaagctgtccttggaggagttcatccgcggggccaaaagcgacccgtccatcgtgcgtctgctgcagtgcgaccccagcagcgcctcccagttctgagaggagccaggttccccttcctccctcccttcaccggccccctcccggctcttagcttccactcccttgtgtgtattctggctgggggccagattggggaagcccttctccccgggtctgccctgtggggggcttccggaaaagggaaccctgcggtacccccaggccaaagcaagtaagcggttagcaccccccaatcccagaggcaacaatagagacacaggctgggttggtctgcccctcagtcaggcccccttacccacccaccagccccaaggcccgacccctcccccaaaggggcagtccccttcttgcaggtctcagcttgcggggtggggggagtcatgcccaggggaggagactttttatctggaggggagagaaggattctaggggtgtggagttggagaaagaggcttccttgagccacccttcccaccccagcccttgctggtccctaggccaagccaccaagtgaaaccttccaggatactagcccgccagctgtgggccccagaaagccagcctgccttttagcacttggatacacacagacccacggagctctctgtgtttggcctctcacacacacacaggcccatagacagatgggcagatgcacccagagccccatgcacagtgtcctgcgtgggaaagagacacggtccccctggctgagcccctgtcctcccctctgtccccccaaccgccccccctgcatgcagccaaatggagcatctctgttctttttaataatttcagaataaagtctcatttcagtgcagtgggctg

SEQ ID NO: 357591 - DNA, 877 bp, Homo sapiens
cgtctccctcgcagtcccgcccgcccctcctgccgcccctgccgcgcgcgccgcagcagcgccgccttccctgcggagtcggtgtctccgcgtcgctgggtgggacttggctcggcggccatgggcaagcagaacagcaagctgcggcccgagatgttgcaggacctgcgagagaacacagagttctcagagctggagctgcaggagtggtacaagggcttcctcaaggactgccccacaggaatcctcaatgtggatgagttcaagaagatctacgccaacttctttccctatggtgacgcctccaagtttgccgagcacgtcttccgcacctttgacaccaacagcgatggcaccatagactttcgggagttcatcattgcgctgagcgtgacctcgcgcggccgcctggagcagaagctcatgtgggccttcagcatgtatgacctggacggcaacggctacatcagccgggaggagatgctggagatcgtgcagagcacagtccagctatgtctagttgatcctcatttacaccagaggaaacggatgctcagagagataaaggcacttgcttgaggccacacagcctgtgtgagtgggccatctggcaccactgtctacattccatctggatacccagccatcttctaactaattgattgagggcccactatgagcctagcattgagtgaggtgctcatgagctcagtgcgtgcttacaacaaccccatgaggctcagagaggtgaggtgatgtgcccaaaatcacacagcacataagtggagaaaagctctggctggccactacttagagctgtctactgagagggctctggactcatagccaggaggtctggcttccagttctggaagtg

SEQ ID NO: 357592 - DNA, 1438 bp, Homo sapiens
gcctgatcactcctctctgcccttgacccccttggggacccaggtgggacttggctcggcggccatgggcaagcagaacagcaagctgcggcccgagatgttgcaggacctgcgagagaacacagagttctcagagctggagctgcaggagtggtacaagggcttcctcaaggactgccccacaggaatcctcaatgtggatgagttcaagaagatctacgccaacttctttccctatggtgacgcctccaagtttgccgagcacgtcttccgcacctttgacaccaacagcgatggcaccatagactttcgggagttcatcattgcgctgagcgtgacctcgcgcggccgcctggagcagaagctcatgtgggccttcagcatgtatgacctggacggcaacggctacatcagccgggaggagatgctggagatcgtgcaggccatttacaagatggtttcgtccgtgatgaagatgccggaggacgagtcgaccccggaaaagaggactgagaaaatcttccgccaaatggacacaaacaacgacggcaagctgtccttggaggagttcatccgcggggccaaaagcgacccgtccatcgtgcgtctgctgcagtgcgaccccagcagcgcctcccagttctgagaggagccaggttccccttcctccctcccttcaccggccccctcccggctcttagcttccactcccttgtgtgtattctggctgggggccagattggggaagcccttctccccgggtctgccctgtggggggcttccggaaaagggaaccctgcggtacccccaggccaaagcaagtaagcggttagcaccccccaatcccagaggcaacaatagagacacaggctgggttggtctgcccctcagtcaggcccccttacccacccaccagccccaaggcccgacccctcccccaaaggggcagtccccttcttgcaggtctcagcttgcggggtggggggagtcatgcccaggggaggagactttttatctggaggggagagaaggattctaggggtgtggagttggagaaagaggcttccttgagccacccttcccaccccagcccttgctggtccctaggccaagccaccaagtgaaaccttccaggatactagcccgccagctgtgggccccagaaagccagcctgccttttagcacttggatacacacagacccacggagctctctgtgtttggcctctcacacacacacaggcccatagacagatgggcagatgcacccagagccccatgcacagtgtcctgcgtgggaaagagacacggtccccctggctgagcccctgtcctcccctctgtccccccaaccgccccccctgcatgcagccaaatggagcatctctgttctttttaataatttcagaataaagtctcatttcagtgcagtgggctg

SEQ ID NO: 357593 - DNA, 1095 bp, Homo sapiens
cgtctccctcgcagtcccgcccgcccctcctgccgcccctgccgcgcgcgccgcagcagcgccgccttccctgcggagtcggtgtctccgcgtcgctgggccatttacaagatggtttcgtccgtgatgaagatgccggaggacgagtcgaccccggaaaagaggactgagaaaatcttccgccaaatggacacaaacaacgacggcaagctgtccttggaggagttcatccgcggggccaaaagcgacccgtccatcgtgcgtctgctgcagtgcgaccccagcagcgcctcccagttctgagaggagccaggttccccttcctccctcccttcaccggccccctcccggctcttagcttccactcccttgtgtgtattctggctgggggccagattggggaagcccttctccccgggtctgccctgtggggggcttccggaaaagggaaccctgcggtacccccaggccaaagcaagtaagcggttagcaccccccaatcccagaggcaacaatagagacacaggctgggttggtctgcccctcagtcaggcccccttacccacccaccagccccaaggcccgacccctcccccaaaggggcagtccccttcttgcaggtctcagcttgcggggtggggggagtcatgcccaggggaggagactttttatctggaggggagagaaggattctaggggtgtggagttggagaaagaggcttccttgagccacccttcccaccccagcccttgctggtccctaggccaagccaccaagtgaaaccttccaggatactagcccgccagctgtgggccccagaaagccagcctgccttttagcacttggatacacacagacccacggagctctctgtgtttggcctctcacacacacacaggcccatagacagatgggcagatgcacccagagccccatgcacagtgtcctgcgtgggaaagagacacggtccccctggctgagcccctgtcctcccctctgtccccccaaccgccccccctgcatgcagccaaatggagcatctctgttctttttaataatttcagaataaagtctcatttcagtgcagtgggctg

SEQ ID NO: 357594 - DNA, 1026 bp, Homo sapiens
gagacggggtcttgctctgtcacccaggctggagggcagtggcacaatcacagccactgcagccttgactcctgggctcaagcaatcctcctgccttggcctcccaaagtgttagggttagagatatgaaccaccacacccaccttatatgtccttttatttcataaaaaacaattttagattatctgatatcacacatatcccataaatggtagtcattaatttagaagtgaatttataaagttaagagaagttaaaattgcacatgcattttgtttctaaaatctgagatgtctatgcatttccaggtattgtatatttgcaaatacattgggttagaaatcatctttaacattttgtgttagtgtaataacaatattatctaatattaatgctgccagaatccagttgctttttctgtgtatcaaaatttatcataactttttccacttaacactaggtaattaaacagaatctgcccaatttattctgcagtaaaattattttaaaatctatttttcctgctgactcttagaaattgcagaaagacaaaaaccagtttcatctccagtaatagtgtgaaacaatttccttccagtgggacagaaacctagacatactagggaaagatttaaatataaagaaaaatgccttggctgaaaaaaaaaaaaaccaccaaaacacaaaaaggattcattaaagcaacagaacaaaacctaatttgggaccctaaaaactctggcaatgccactgtaatgaagtttcattatctgcttcagagtaacagtctctgaaattgttattctgctacatgctgtaaagaactcccaaaactcaaatgtatcaggaaatgtaaaggttaagtctgactacaagaaggccaaaattgcaccagcttcctaagtgaagaataatagaataaaacatatagagggcagaaataaaatgaggtgtatctggagaatttcatgatgagcatttagatttagcaatgcccaatgtcatgctgacactgtttgtcatgac

SEQ ID NO: 357595 - DNA, 121 bp, Homo sapiens
cttcttaataaagacataataaaacttacatatatggggtagatgtaagcacaatcatactacagatgtatcttgagcctgtctctaattatgatgaaagatgtagtcatcaatacaattt

SEQ ID NO: 357596 - DNA, 882 bp, Homo sapiens
ataaagacataataaaacttacatatatggggtagatgtaagcacaatcatactacagatgtatcttgagcctgtctctaattatgatgaaagatgtagtcatcaatacaatttaaaaaaagatatgtcctttttttgagacggggtcttgctctgtcacccaggctggagggcagtggcacaatcacagccactgcagccttgacctctccaacttaagtgatctttcctgcctcagcctcatgagtagctgggaccacaggtgtgcaccaccacacccagctaaattttgtattgtttgtaaagacgaggcctcactatgctgaccacactggtctcgaactcctgggctcaagcaatcctcctgccttggcctcccaaagtgttagggttagagatatgaaccaccacacccaccttatatgtccttttatttcataaaaaacaattttagattatctgatatcacacatatcccataaatggtagtcattaatttagaagtgaatttataaagttaagagaagttaaaattgcacatgcattttgtttctaaaatctgagatgtctatgcatttccaggtattgtatatttgcaaatacattgggttagaaatcatctttaacattttgtgttagtgtaataacaatattatctaatattaatgctgccagaatccagttgctttttctgtgtatcaaaatttatcataactttttccacttaacactaggtaattaaacagaatctgcccaatttattctgcagtaaaattattttaaaatctatttttcctgctgactcttagaaattgcagaaagacaaaaaccagtttcatctccagtaatagtgtgaaacaatttccttccagtgggacagaa

SEQ ID NO: 357597 - DNA, 332 bp, Homo sapiens
aagaaatgtttgaagaaataacgcctgaaaacattccaaacttgatgaaaactataaacccacagatccaaacaccatggcaaaccccaagcacaagaaacatgaagaaaacaataccaagctacatcataatcaaactgcttagaacctatgacaaagagaaaatctgagaaacagaccaaaaaaaaacaaaaaaaaaaagaaagaaattgggagacagaggtaggagaattgcttgaccctggtaggtggaggttggagtgagccaagacatcatgccaccgcactccagcctgggtgacagagcgagactccatctcaaaaaaaaaaaa

SEQ ID NO: 357598 - DNA, 1077 bp, Homo sapiens
agcagtctttgaaacagctgtaacggcatctgtgaaagaagataggttccaggaacggaactgccacttagattgtaaattcctgaaaaacaggacgtttttgcatctcctcccggcttccccatccctaaaccaacgtctgttgaattaaactaccaaacaaaataactgcagtacagcaatggcgatcagaaggtagaacagctgtatggctgcacattcccatcctccaaagccgatttattgcccctgctgcttccctgggcttctgctttcaccacgcagaatcggattcatcaacgttgactctgtggctgagagaagggcccagcagattaccaggatatgcttcacatcaagtaggagttgcaggagctgtatttgatgaaagtactagaaaaatactggttgtacaagatcgaaataaattgaaaaatatgtggaagtttccaggaggcctgtcagagcctgaagaagatattggagacacagcggttcgagaagtttttgaagagactggtataaaatcagaattcaggtccgtcctgagtattcggcaacagcacacaaatcctggagcttttgggaagtcagatatgtatatcatctgccgcctaaagccatattcattcaccataaatttttgccaggaagaatgcttaagatgtgagtggatggatctcaatgacctggcgaagactgaaaatacaactcccatcaccagcagagttgctaggctgctgctgtatgggtacagagaagggtttgacaaaattgacctgactgtggaagaacttccagcagtttacacaggactgttttataaactctatcataaggaactgccagagaattataaaactatgaaaggaattgattaaattcacatttatatgtttagaaacatgtagactaacgaatgacataagaaatagtggacattttggattgattaaacatctgactgtgattttctaatgtatatgatttccatgaagaaattttgtttctaaacatgcacattttaaaagcctcttttcgaataaagcaaatgcgtgaaaaagatcattgctctag

SEQ ID NO: 357599 - DNA, 666 bp, Homo sapiens
acaaactaatcaattttattcatactactcatgaaaagcaattacatttttacataaaatcattaacacatacaatagaaataataagagtaatacatctgattagaaatacaatataggaaatagattttaaaatagcatattttagtgatgaaatttatattttctacttatttatagcagcatctgtaagattcttctatctgttcatagttaactagcagcaaaatattttaaattacagaaattcagtagatgtttccctccaatgtttcattcatacagaatgtatcacgttaaccaaacaaaaccacttatatttcctgaagagaaaaggtgggaaaagatttcatcagttaccagctcccccaaaaaaagaagaaacgagggagaaaggatggaagctagaaaaattttgcatgcaattactaaaaaatatattctcaaccactttgaccaattataggtggattttgtgaaatctacatatgtgtgtgttagtgaaagttatgttaactttattttctgactttatactgcagttgaaaaatatgtggaagtttccaggaggcctgtcagagcctgaagaagatattggtgtgtatcttttatatttttaattggcttaaaaatgttgaggaaattaatgtgtttactttcttgctt

SEQ ID NO: 357600 - DNA, 624 bp, Homo sapiens
gcattcaaatggtatttgattcggtttaaatccttttatttgtccactctaaaactacagaacatctgttacgtgccaagcattgtctttggtggtatggatataaaggtcagcagtgtaatgactttattctgaaggaattcagtctgatggaaaaatcatataaacaaggtggttactataaaacatggtacttccagtgccagcgatgtgaacaagacatttggggacctcttttgcttaaagatggtttcctggaggaggcgaaaccctgaggtgagttttaatttattccactcgtctctttggaaattatttagacttttttcttctgcatttagctgcagtacagcaatggcgatcagaaggtagaacagctgtatggctgcacattcccatcctccaaagccgatttattgcccctgctgcttccctgggcttctgctttcaccacgcagaatcggattcatcaacgttgactctgtggctgagagaagggcccagcagattaccaggatatgcttcacatcaagtaggagttgcaggagctgtatttgatgaaagtactagaaaaatactggttgtacaagatcgaaataaagtaagctgcttctgttttataaa

SEQ ID NO: 357601 - DNA, 555 bp, Homo sapiens
catttgggcaacggacgaatcaagcggcgtggagatgcggcagccgctgagctggggccgctggcgcgcgatgcttgcccgaacctacggccccgggccttcggcgggttaccgctgggcctcgggcgcacagggttacgtgcggaatccgccagttggagcgtgcgatctgcagggcgagctggacagattcgggggcatctcggtgcgcctggcgcggctcgatgcgctggaccgcctggacgctgccgccttccagaagggcttgcaggctgcagtacagcaatggcgatcagaaggtagaacagctgtatggctgcacattcccatcctccaaagccgatttattgcccctgctgcttccctgggcttctgctttcaccacgcagaatcggattcatcaacgttgactctgtggctgagagaagggcccagcagattaccaggatatgcttcacatcaagtaggagttgcaggagctgtatttgatgaaagtactagaaaaatactggttgtacaagatcgaaataaagtaagctgcttctgttttataaa

SEQ ID NO: 357602 - DNA, 684 bp, Homo sapiens
  misc_feature (6)..(6): n is a, c, g, or t
  misc_feature (23)..(23): n is a, c, g, or t
  misc_feature (28)..(28): n is a, c, g, or t
  misc_feature (33)..(33): n is a, c, g, or t
tcgtangtgactgactctctttntaacnccgcnagttgaaaaatatgtggaagtttccaggaggcctgtcagagcctgaagaagatattggagacacagcggttcgagaagtttttgaagagactggtataaaatcagaattcaggtccgtcctgagtattcggcaacagcacacaaatcctggagcttttgggaagtcagatatgtatatcatctgccgcctaaagccatattcattcaccataaatttttgccaggaagaatgcttaagatgtgagtggatggatctcaatgacctggcgaagactgaaaatacaactcccatcaccagcagagttgctaggctgctgctgtatgggtacagagaagggtttgacaaaattgacctgactgtggaagaacttccagcagtttacacaggactgttttataaactctatcataaggaactgccagagaattataaaactatgaaaggaattgattaaattcacatttatatgtttagaaacatgtagactaacgaatgacataagaaatagtggacattttggattgattaaacatctgactgtgattttctaatgtatatgatttccatgaagaaattttgtttctaaacatgcacattttaaaagcctcttttcgaataaagcaaatgcgtgaaaaagatcattgctctag

SEQ ID NO: 357603 - DNA, 1181 bp, Homo sapiens
catttgggcaacggacgaatcaagcggcgtggagatgcggcagccgctgagctggggccgctggcgcgcgatgcttgcccgaacctacggccccgggccttcggcgggttaccgctgggcctcgggcgcacagggttacgtgcggaatccgccagttggagcgtgcgatctgcagggcgagctggacagattcgggggcatctcggtgcgcctggcgcggctcgatgcgctggaccgcctggacgctgccgccttccagaagggcttgcaggctgcagtacagcaatggcgatcagaaggtagaacagctgtatggctgcacattcccatcctccaaagccgatttattgcccctgctgcttccctgggcttctgctttcaccacgcagaatcggattcatcaacgttgactctgtggctgagagaagggcccagcagattaccaggatatgcttcacatcaagtaggagttgcaggagctgtatttgatgaaagtactagaaaaatactggttgtacaagatcgaaataaattgaaaaatatgtggaagtttccaggaggcctgtcagagcctgaagaagatattggagacacagcggttcgagaagtttttgaagagactggtataaaatcagaattcaggtccgtcctgagtattcggcaacagcacacaaatcctggagcttttgggaagtcagatatgtatatcatctgccgcctaaagccatattcattcaccataaatttttgccaggaagaatgcttaagatgtgagtggatggatctcaatgacctggcgaagactgaaaatacaactcccatcaccagcagagttgctaggctgctgctgtatgggtacagagaagggtttgacaaaattgacctgactgtggaagaacttccagcagtttacacaggactgttttataaactctatcataaggaactgccagagaattataaaactatgaaaggaattgattaaattcacatttatatgtttagaaacatgtagactaacgaatgacataagaaatagtggacattttggattgattaaacatctgactgtgattttctaatgtatatgatttccatgaagaaattttgtttctaaacatgcacattttaaaagcctcttttcgaataaagcaaatgcgtgaaaaagatcattgctctag

SEQ ID NO: 357604 - DNA, 788 bp, Homo sapiens
aggcatcgtctgtaaagaatgagcccttattagacactgaatctgccagcaccttgatcttggacttcctagcttctagaactgagctgtatttgatgaaagtactagaaaaatactggttgtacaagatcgaaataaattgaaaaatatgtggaagtttccaggaggcctgtcagagcctgaagaagatattggagacacagcggttcgagaagtttttgaagagactggtataaaatcagaattcaggtccgtcctgagtattcggcaacagcacacaaatcctggagcttttgggaagtcagatatgtatatcatctgccgcctaaagccatattcattcaccataaatttttgccaggaagaatgcttaagatgtgagtggatggatctcaatgacctggcgaagactgaaaatacaactcccatcaccagcagagttgctaggctgctgctgtatgggtacagagaagggtttgacaaaattgacctgactgtggaagaacttccagcagtttacacaggactgttttataaactctatcataaggaactgccagagaattataaaactatgaaaggaattgattaaattcacatttatatgtttagaaacatgtagactaacgaatgacataagaaatagtggacattttggattgattaaacatctgactgtgattttctaatgtatatgatttccatgaagaaattttgtttctaaacatgcacattttaaaagcctcttttcgaataaagcaaatgcgtgaaaaagatcattgctctag

SEQ ID NO: 357605 - DNA, 1556 bp, Homo sapiens
catttgggcaacggacgaatcaagcggcgtggagatgcggcagccgctgagctggggccgctggcgcgcgatgcttgcccgaacctacggccccgggccttcggcgggttaccgctgggcctcgggcgcacagggttacgtgcggaatccgccagttggagcgtgcgatctgcagggcgagctggacagattcgggggcatctcggtgcgcctggcgcggctcgatgcgctggaccgcctggacgctgccgccttccagaagggcttgcaggctgcagtacagcaatggcgatcagaaggtagaacagctgtatggctgcacattcccatcctccaaagccgatttattgcccctgctgcttccctgggcttctgctttcaccacgcagaatcggattcatcaacgttgactctgtggctgagagaagggcccagcagattaccaggatatgcttcacatcaagtaggagttgcaggagctgtatttgatgaaagtactagaaaaatactggttgtacaagatcgaaataaattgaaaaatatgtggaagtttccaggaggcctgtcagagcctgaagaagatattggagacacagcggttcgagaagtttttgaagagactggtataaaatcagaattcaggtccgtcctgagtattcggcaacagcacacaaatcctggagcttttgggaagtcagatatgtatatcatctgccgcctaaagccatattcattcaccataaatttttgccaggaagaatgcttaagatgtgagtggatggatctcaatgacctggcgaagactgaaaatacaactcccatcaccagcagagttgctaggctgctgctgtatgggtacagagaagggtttgacaaaattgacctgactgtggaagaacttccagcagtttacacaggactgttttataaactctatcataaggaactgccagagaattataaaactatgaaaggaattgattaaattcacatttatatgtttagaaacatgtagactaacgaatgacataagaaatagtggacattttggattgattaaacatctgactgtgattttctaatgtatatgatttccatgaagaaattttgtttctaaacatgcacattttaaaagcctcttttcgaataaagcaaatgcgtgaaaaagatcattgctctaggtttatgatcaagaatagaagcagaagggaaacaaagagtgaaaggaaaattcatagtaaccataaagacaacatgaaaggtcaccatggaacttcatagactgattccccagaggcatctaagacacatcaatgaacaaaactgaacaagatccctgcctttatgccactcaaattctagctgggggagacacacaataagcaataagcttaagtgaataaattatattctatgttagaatataagaaaacttagaaaaatgtaaacctgaacagggtaagagggactaggaatggtgagtggtagaagctaggtgcaatattaaatagcatggtcacagtaggctccattgagaaagtgacatttgagcaaat

SEQ ID NO: 357606 - DNA, 474 bp, Homo sapiens
atgaagttctggggtacaagtcactaatgtattagaaattttccagctctccctccttgcccagcagagtatatttccactcaaacacaatgaacccatttggaatgggacaaaacaaaatggggtgggcctggaacaagagaaagttcagctacacaggatccaggtcaaaactctttaatcctcccatttctggatttcaaatgaacacctttttgtctagcagttctcctccagaggtttgctttcccacaacagcttgtcaacagtgtaagaagttcaaaaagaacttttggggttgcacgttgcaggttgtgtggcatcatcccagcttgtctcaacacctctgatgaacagtagcggaagaaaggactctttccacatgagttcctcggcggtccccgtctcttagggagtttataaaaaaatccatcatcttgttctactaaacccaagtaaatataattaacacca

SEQ ID NO: 357607 - DNA, 1258 bp, Homo sapiens
tctgctctgagcccccgcccagcccagaaaccccactagcctggggcctgagaacagccacgccactccctcctgagagcccaccgcgccacagcttggaggaagagcctgcggggaactggctgcaggacgctctcttcttgagtgcagcctgctcctgcaaccagcacgcccgacgctgccggttcaactctgagctgttcagactgtcgggcggccggagtgggggtgtttgtgagcggtgccgccaccacacagctgggcggcactgccactactgccaacctgggttctggagggaccctagccagcctatcttcagccgcagggcctgcagagcctgccagtgccaccctattggggcaacaggaggaacctgcaaccagaccagtgggcagtgcacctgcaagttaggggtcacaggcctgacctgcaaccgctgtggccctggctaccagcagagccgctcccccaggatgccctgccagcgaattccagaggcaacaaccacccttgccactactcctggtgcttatagctctgaccctcagtgtcaaaactactgcaatatgtcggacaccagggtacacatgagccttcggaggtactgccagcaggaccatgttctccgcgcgcaggtgctagcgtccgaggcggcgggcccggcatggcagcggctggccgtgcgcgtgctggccgtttacaagcagcgggcgcagcccgtgcgacgcggcgaccaggacgcctgggtgccccgcgccgacctgacctgcggctgcctgcgcctgcagccaggcaccgactacctgctgctgggcagcgccgtgggcgaccccgaccccacgcgcctcatcctcgaccgccacggcctcgcgctgccatggaggccgcgctgggcccggcccctgaagcggctgcagcaggaggagcgcgccggaggctgccgcggcgtgcgggcacccacacccagtcccaggccggagcactagacgtgagatggggctgcctcgagcaccaacaaagtaatttgggagcgactaggagctgagccttctacctcgacggtgcactgcagagagccaatcagacgtcgcagagccccgacgacactatgcttgcgcccacgccgagcaggcgtgcggaacttttagcaaaaggcggcaagcgggacttctggtcccaacatttcctcctttggcctgtggcttattccccgccagtgatctgtttcccccaataaagtctcaaatctttggga

SEQ ID NO: 357608 - DNA, 1603 bp, Homo sapiens
tctgctctgagcccccgcccagcccagaaaccccactagcctggggcctgagaacagccacgccactccctcctgagagcccaccgcgccacagcttggaggaagagcctgcggggaactggctgcaggacgctctcttcttgagtgcagcctgctcctgcaaccagcacgcccgacgctgccggttcaactctgagctgttcagactgtcgggcggccggagtgggggtgtttgtgagcggtgccgccaccacacagctgggcggcactgccactactgccaacctgggttctggagggaccctagccagcctatcttcagccgcagggcctgcagagcctgccagtgccaccctattggggcaacaggaggaacctgcaaccagaccagtgggcagtgcacctgcaagttaggggtcacaggcctgacctgcaaccgctgtggccctggctaccagcagagccgctcccccaggatgccctgccagcgaattccagaggcaacaaccacccttgccactactcctggtgcttatagctctgaccctcagtgtcaaaactactgcaatatgtcggacaccagggtacacatgagccttcggaggtactgccagcaggaccatggtgagtgctggggagacagacagctgaaggctacacagctggttctgatgactgcttctaagccaccccctttctggccttccactttctcatcttaaatgggaaggagtgttggattccaaaccccttcctgatctagaaattgatggggcagaagacaaatggggaggggagtggggagggggcattcactaccttcctgtgtctcctctttccccatgttcttcggcttacagagtttcatcatctccttcagcctgacatctctgagggatggaagagataggggaactggttgagtggaatgaactcttgccctgtcctccctatctcagagaccctttctgcttcccttcatggtcccagatatttgagccttagccccacttcccataaagacttgtcccacggttccctaatccccagtccacacctgctccatgaccttggggtctatgacctcaggctattcagctctcttaagacactcaggagttcggcccagccaacaaatctagaccaacgccagctatttctctcaatgtataggaccgcagacttctccctcaggaacctcatctggtcactagtgttctaggccttcacaggtggaaagattttccccaccttccacagggatctcctgccccgcagacccagctggctagtcagagtcccacccagcctctcagaaagtgcatttttctggccgggcgcggtggctcatgctaataatcccagcactttgtgggggccgaggtgggcggatcacttgaggtcaggagttcgagaccagcctggccaacatggtgaaactccatctctactaaaaatacaaaaattagccaggcgtggtggcaggatcctgtaaacccagctgaggcacaagaatcacttcaacctgggaggcagaggctgcagtgagttgagatcacaccactgcactccagactgggcaatagagtaagattccgtctca

SEQ ID NO: 357609 - DNA, 2220 bp, Homo sapiens
ggcctggtggcgaattcggcacgaggcagccacgccactccctcctgagagcccaccgcgccacagcttggaggaagagcctgcggggaactggctgcaggacgctctcttcttgagtgcaggtgctggctctgctgtgaccatgcccgtgacctttgccctcctgctcctcctgggccaggccactgcggacccatgctacgatccacagggccgcccccaattctgcctcccgccagtgacacagctggctgccgtggcggcctcctgccctcaggcctgtgccctgtccccaggaaaccaccttggcgccagggaaacctgcaatggcagcctgactttggccctgggtggccccttcctcctgacatctgtcagcttgcgcttctgtaccccaggacccccagccctcatcctgtctgctgcctgggcctcagggggtccctggaggctgctgtggcacaggcccgcctggcctggggccttagggggccctgaaagggtgaccttccactccacaccaggtcctaaggccactgtggcggccagccacctccgtgtggagtttgggggccaggccgggctagcggcagctgggctgagaggccgctgccagtgtcatggccacgctgcccgctgtgccgcccgtgcccggcccccccgctgcactgccgccacataccactggcccggggtgcgagagcttgccgccgtcccatcgagactggccctggcggctgcacgccccggaccccaaccttgcctaccctgctcctgcaaccagcacgcccgacgctgccggttcaactctgagctgttcagactgtcgggcggccggagtgggggtgtttgtgagcggtgccgccaccacacagctgggcggcactgccactactgccaacctgggttctggagggaccctagccagcctatcttcagccgcagggcctgcagagcctgccagtgccaccctattggggcaacaggaggaacctgcaaccagaccagtgggcagtgcacctgcaagttaggggtcacaggcctgacctgcaaccgctgtggccctggctaccagcagagccgctcccccaggatgccctgccagcgaattccagaggcaacaaccacccttgccactactcctggtgcttatagctctgaccctcagtgtcaaaactactgcaatatgtcggacaccagggtacacatgagccttcggaggtactgccagcaggaccatggtgagtgctggggagacagacagctgaaggctacacagctggttctgatgactgcttctaagccaccccctttctggccttccactttctcatcttaaatgggaaggagtgttggattccaaaccccttcctgatctagaaattgatggggcagaagacaaatggggaggggagtggggagggggcattcactaccttcctgtgtctcctctttccccatgttcttcggcttacagagtttcatcatctccttcagcctgacatctctgagggatggaagagataggggaactggttgagtggaatgaactcttgccctgtcctccctatctcagagaccctttctgcttcccttcatggtcccagatatttgagccttagccccacttcccataaagacttgtcccacggttccctaatccccagtccacacctgctccatgaccttggggtctatgacctcaggctattcagctctcttaagacactcaggagttcggcccagccaacaaatctagaccaacgccagctatttctctcaatgtataggaccgcagacttctccctcaggaacctcatctggtcactagtgttctaggccttcacaggtggaaagattttccccaccttccacagggatctcctgccccgcagacccagctggctagtcagagtcccacccagcctctcagaaagtgcatttttctggccgggcgcggtggctcatgctaataatcccagcactttgtgggggccgaggtgggcggatcacttgaggtcaggagttcgagaccagcctggccaacatggtgaaactccatctctactaaaaatacaaaaattagccaggcgtggtggcaggatcctgtaaacccagctgaggcacaagaatcacttcaacctgggaggcagaggctgcagtgagttgagatcacaccactgcactccagactgggcaatagagtaagattccgtctca

SEQ ID NO: 357610 - DNA, 1875 bp, Homo sapiens
ggcctggtggcgaattcggcacgaggcagccacgccactccctcctgagagcccaccgcgccacagcttggaggaagagcctgcggggaactggctgcaggacgctctcttcttgagtgcaggtgctggctctgctgtgaccatgcccgtgacctttgccctcctgctcctcctgggccaggccactgcggacccatgctacgatccacagggccgcccccaattctgcctcccgccagtgacacagctggctgccgtggcggcctcctgccctcaggcctgtgccctgtccccaggaaaccaccttggcgccagggaaacctgcaatggcagcctgactttggccctgggtggccccttcctcctgacatctgtcagcttgcgcttctgtaccccaggacccccagccctcatcctgtctgctgcctgggcctcagggggtccctggaggctgctgtggcacaggcccgcctggcctggggccttagggggccctgaaagggtgaccttccactccacaccaggtcctaaggccactgtggcggccagccacctccgtgtggagtttgggggccaggccgggctagcggcagctgggctgagaggccgctgccagtgtcatggccacgctgcccgctgtgccgcccgtgcccggcccccccgctgcactgccgccacataccactggcccggggtgcgagagcttgccgccgtcccatcgagactggccctggcggctgcacgccccggaccccaaccttgcctaccctgctcctgcaaccagcacgcccgacgctgccggttcaactctgagctgttcagactgtcgggcggccggagtgggggtgtttgtgagcggtgccgccaccacacagctgggcggcactgccactactgccaacctgggttctggagggaccctagccagcctatcttcagccgcagggcctgcagagcctgccagtgccaccctattggggcaacaggaggaacctgcaaccagaccagtgggcagtgcacctgcaagttaggggtcacaggcctgacctgcaaccgctgtggccctggctaccagcagagccgctcccccaggatgccctgccagcgaattccagaggcaacaaccacccttgccactactcctggtgcttatagctctgaccctcagtgtcaaaactactgcaatatgtcggacaccagggtacacatgagccttcggaggtactgccagcaggaccatgttctccgcgcgcaggtgctagcgtccgaggcggcgggcccggcatggcagcggctggccgtgcgcgtgctggccgtttacaagcagcgggcgcagcccgtgcgacgcggcgaccaggacgcctgggtgccccgcgccgacctgacctgcggctgcctgcgcctgcagccaggcaccgactacctgctgctgggcagcgccgtgggcgaccccgaccccacgcgcctcatcctcgaccgccacggcctcgcgctgccatggaggccgcgctgggcccggcccctgaagcggctgcagcaggaggagcgcgccggaggctgccgcggcgtgcgggcacccacacccagtcccaggccggagcactagacgtgagatggggctgcctcgagcaccaacaaagtaatttgggagcgactaggagctgagccttctacctcgacggtgcactgcagagagccaatcagacgtcgcagagccccgacgacactatgcttgcgcccacgccgagcaggcgtgcggaacttttagcaaaaggcggcaagcgggacttctggtcccaacatttcctcctttggcctgtggcttattccccgccagtgatctgtttcccccaataaagtctcaaatctttggga

SEQ ID NO: 357611 - DNA, 2410 bp, Homo sapiens
gtcccatacagggggagctcaggcagggtcagcggagggacctgcgcctgaatcccgaagttccactctgactcacacagcctgggcccccagctctgacatgccccctctgatggggggcgtctcagccccattccatcctcctgcagctgatgcacctcccagctttcggagtgactcccttctttcaaatccgatgtccctgtcctgctcctgccaaatctggccccctccaacgtggtacctaagggtccagagtcgagggtcgcctttgctgtgccctcgcaccccctgggggcgggcctggggcagtgggtcccaagcctgtcaggattgggcccacgctacaccacgataaacgctggggccaggccactgcggacccatgctacgatccacagggccgcccccaattctgcctcccgccagtgacacagctggctgccgtggcggcctcctgccctcaggcctgtgccctgtccccaggaaaccaccttggcgccagggaaacctgcaatggcagcctgactttggccctgggtggccccttcctcctgacatctgtcagcttgcgcttctgtaccccaggacccccagccctcatcctgtctgctgcctgggcctcagggggtccctggaggctgctgtggcacaggcccgcctggcctggggccttagggggccctgaaagggtgaccttccactccacaccaggtcctaaggccactgtggcggccagccacctccgtgtggagtttgggggccaggccgggctagcggcagctgggctgagaggccgctgccagtgtcatggccacgctgcccgctgtgccgcccgtgcccggcccccccgctgcactgccgccacataccactggcccggggtgcgagagcttgccgccgtcccatcgagactggccctggcggctgcacgccccggaccccaaccttgcctaccctgctcctgcaaccagcacgcccgacgctgccggttcaactctgagctgttcagactgtcgggcggccggagtgggggtgtttgtgagcggtgccgccaccacacagctgggcggcactgccactactgccaacctgggttctggagggaccctagccagcctatcttcagccgcagggcctgcagagcctgccagtgccaccctattggggcaacaggaggaacctgcaaccagaccagtgggcagtgcacctgcaagttaggggtcacaggcctgacctgcaaccgctgtggccctggctaccagcagagccgctcccccaggatgccctgccagcgaattccagaggcaacaaccacccttgccactactcctggtgcttatagctctgaccctcagtgtcaaaactactgcaatatgtcggacaccagggtacacatgagccttcggaggtactgccagcaggaccatggtgagtgctggggagacagacagctgaaggctacacagctggttctgatgactgcttctaagccaccccctttctggccttccactttctcatcttaaatgggaaggagtgttggattccaaaccccttcctgatctagaaattgatggggcagaagacaaatggggaggggagtggggagggggcattcactaccttcctgtgtctcctctttccccatgttcttcggcttacagagtttcatcatctccttcagcctgacatctctgagggatggaagagataggggaactggttgagtggaatgaactcttgccctgtcctccctatctcagagaccctttctgcttcccttcatggtcccagatatttgagccttagccccacttcccataaagacttgtcccacggttccctaatccccagtccacacctgctccatgaccttggggtctatgacctcaggctattcagctctcttaagacactcaggagttcggcccagccaacaaatctagaccaacgccagctatttctctcaatgtataggaccgcagacttctccctcaggaacctcatctggtcactagtgttctaggccttcacaggtggaaagattttccccaccttccacagggatctcctgccccgcagacccagctggctagtcagagtcccacccagcctctcagaaagtgcatttttctggccgggcgcggtggctcatgctaataatcccagcactttgtgggggccgaggtgggcggatcacttgaggtcaggagttcgagaccagcctggccaacatggtgaaactccatctctactaaaaatacaaaaattagccaggcgtggtggcaggatcctgtaaacccagctgaggcacaagaatcacttcaacctgggaggcagaggctgcagtgagttgagatcacaccactgcactccagactgggcaatagagtaagattccgtctca

SEQ ID NO: 357612 - DNA, 2039 bp, Homo sapiens
ggcgggagtgtttctaggagggaacatacttccccttaaaggaagatcacgttgctaaagtaaaaaatttgaaggcgccctatgtgtagaacacttacgttcttggctttctggccactataaagatgggtcgggaatggcgccagctacgttaaaaagtaacgtgcaggaatggttcagttgcccggtgttgaccagagtagagatggttttgcccacaaaaaaaatggcgccgaaacatgtcaatccgcacaatcacgtgttcacaaacctggatgagagatggtatggcttcagatgacaaacggatgttattattctttacttccgggtgagacaaatcgggcgccatcttgtcttgttcccgaagaagtagaagcatcgaaagcgttggagaggtgttaccggaacggcggcgacaagggtgttcccgaactagagtggggcatacataatcttgctgctatgcttcgaagctgtagtctgaatcaacctaagttttaaacagaaggtgaacctctgagatagaaaatcaagtatattttaaaagaagggatgtgggatcaaggaggacagccttggcagcagtggcccttgaaccagcaacaatggatgcagtcattccagcaccaacaggatccaagccagattgattgggctgcattggcccaagcttggattgcccaaagagaagcttcaggacagcaaagcatggtagaacaaccaccaggaatgatgccaaatggacaagatatgtctacaatggaatctggtccaaacaatcatgggaatttccaaggggattcaaacttcaacagaatgtggcaaccagaatggggaatgcatcagcaacccccacacccccctccagatcagccatggatgccaccaacaccaggcccaatggacattgttcctccttctgaagacagcaacagtcaggacagtggggaatttgcccctgacaacaggcatatatttaaccagaacaatcacaactttggtggaccacccgataattttgcagtggggccagtgaaccagtttgactatcagcatggggctgcttttggtccaccgcaaggtggatttcatcctccttattggcaaccaggacctccaggacctccagcacctccccagaatcgaagagaaaggccatcatcattcagggatcgtcagcgttcacctattgcacttcctgtgaagcaggagcctccacaaattgacgcagtaaaacgcaggactcttcccgcttggattcgcgaaggtcttgaaaaaatggaacgtgaaaagcagaagaaattggagaaagaaagaatggaacaacaacgttcacaattgtccaaaaaagaaaaaaaggccacagaagatgctgaaggaggggatggccctcgtttacctcagagaagtaaatttgatagtgatgaggaagaagaagacactgaaaatgttgaggctgcaagtagtgggaaagtcaccagaagtccatccccagttcctcaagaagagcacagtgaccctgagatgactgaagaggagaaagagtatcaaatgatgttgctgacaaaaatgcttctaacagaaattctgctggatgtcacagatgaagaaatttattacgtagccaaagatgcacaccgcaaagcaacgaaagctcctgcaaaacagctggcacagtccagtgcactggcttccctcactggactcggtggactgggtggttatggatcaggagacagtgaagatgagaggagtgacagaggatctgagtcatctgacactgatgatgaagaattacggcatcgaatccggcaaaaacaggaagctttttggagaaaagaaaaagaacagcagctattacatgataaacagatggaagaagaaaagcagcaaacagaaagggttacaaaagagatgaatgaatttatccataaagagcaaaatagtttatcactactagaagcaagagaagcagacggtgatgtggttaatgaaaagaagagaactccaaatgaaaccacatcagttttagaacc

SEQ ID NO: 357613 - DNA, 767 bp, Homo sapiens
  misc_feature (37)..(38): n is a, c, g, or t
cgggtgatatcgttccaaggatcccgtcgtcagcatnnacaggatccaagccagattgattgggctgcattggcccaagcttggattgcccaaagagaagcttcaggacagcaaagcatggtagaacaaccaccaggaatgatgccaaatggacaagatatgtctacaatggaatctggtccaaacaatcatgggaatttccaaggggattcaaacttcaacagaatgtggcaaccaggctgacaggggctgggaacactctggaaacctcacttggcatctagggaagagagcattctttgtctctctattgcaacctctggccttttcagaagcagcactggcagagtaaaacatgtctagcctctaattaaagaaaaattgtgtcactgtgtgacaaattagtctgtcaaatatactctgcccctaccatccgcctacctttttcttccctttttttttttcagatagtgaagatctttcataagtttttgtgtgttttacttttttgtttgttttatttcacagtatgatgtagatttcttgatgctaattcagtcttccatggcttgtgttattcctttttaatagtcacttgaaactatggaggaatcagcctctcatttgggtatgctgatggtgaagtcataacctcctttccctattaatactttttgtttctccttataagaatggagacctcagtcgagaccagcctgggcaacatagcaaggccctgtctctacaaaaaaaaaaaaaaaaaacct

SEQ ID NO: 357614 - DNA, 1232 bp, Homo sapiens
  misc_feature (1056)..(1056): n is a, c, g, or t
ggcgggagtgtttctaggagggaacatacttccccttaaaggaagatcacgttgctaaagtaaaaaatttgaaggcgccctatgtgtagaacacttacgttcttggctttctggccactataaagatgggtcgggaatggcgccagctacgttaaaaagtaacgtgcaggaatggttcagttgcccggtgttgaccagagtagagatggttttgcccacaaaaaaaatggcgccgaaacatgtcaatccgcacaatcacgtgttcacaaacctggatgagagatggtatggcttcagatgacaaacggatgttattattctttacttccgggtgagacaaatcgggcgccatcttgtcttgttcccgaagaagtagaagcatcgaaagcgttggagaggtgttaccggaacggcggcgacaagggtgttcccgaactagagtggggcatacataatcttgctgctatgcttcgaagctgtagtctgaatcaacctaagttttaaacagaaggtgaacctctgagatagaaaatcaagtatattttaaaagaagggatgtgggatcaaggaggacagccttggcagcagtggcccttgaaccagcaacaatggatgcagtcattccagcaccaacaggatccaagccagattgattgggctgcattggcccaagcttggattgcccaaagagaagcttcaggacagcaaagcatggtagaacaaccaccaggaatgatgccaaatggacaagatatgtctacaatggaatctggtccaaacaatcatgggaatttccaaggggattcaaacttcaacagaatgtggcaaccaggctgacaggggctgggaacactctggaaacctcacttggcatctagggaagagagcattctttgtctctctattgcaacctctggccttttcagaagcagcactggcagagtaaaacatgtctagcctctaattaaagaaaaattgtgtcactgtgtgacaaattagtctgtcaaatatactctgcccctaccatccgcctacctttttcttcccttttttatncagaagggaagacctcagaagaagggtgtaactcgggagcgaattcccgaagaattcactcctggaggcacacggctcaggtgtgttccttcaggcttgaatgagacccccaggagttaggaacaccacatcactacgatggcctaaggacagacggccaggctgcaacaaaggcc

SEQ ID NO: 357615 - DNA, 1129 bp, Homo sapiens
cataatttagccatgatagtatctaagctcactttcagaattattgcatacatgccttagggaagaacctatccactaatgcttttaataacttacatagattgtgttgcggcaagtcaagttttaatatagaggaaagggtttatcttatcatagtaaaatagtagtgatgtgttcataatttactatttgcatggtatattatcaaggctgtaaaagcttgaatttgccttttccacatcttcatttcaaattaatttttgtgaggacccagagaagtgggtagaaccaaatgcccatgtggttttgttatggttatttagatcatttcagggtggggagtattttcagcaccataatatttctgtaccagggagattatagtattctaatttttttagggaaaaattgcttagctctagggatttctaaactttgaacaataaaagttaattttagaaatactttcagggtcatcattaagctttagcgtggctttgttactgccctgttaagtagttttgttggttagtatggacagtacagcaaacccattatgattcctttacagtgagaaaaatatgaaatagtccagaaagaataagatattaagtaacctttgcctgaaggttctgtgaactccttaagcgtttgaatatatacttctccccaccccgaataagcgtattcttctgggaaaaggcaatgaaaaaagaaatgaactttcttctcagaccttgaaaagtttttagtgcatagtataatttttttcatatgatagactgagctttatgcacacaggtggactgggtggttatggatcaggagacagtgaagatgagaggagtgacagaggatctgagtcatctgacactgatgatgaagaattacggcatcgaatccggcaaaaacaggaagctttttggagaaaagaaaaagaacagcagctattacatgataaacagatggaagaagaaaagcagcaaacagaaagggttacaaaagagatgaatgaatttatccataaagagcaaaatagtttatcactactagaagcaagagaagcagacggtgatgtggttaatgaaaagaagagaactccaaatgaaaccacatcagttttagaacc

SEQ ID NO: 357616 - DNA, 1130 bp, Homo sapiens
cataatttagccatgatagtatctaagctcactttcagaattattgcatacatgccttagggaagaacctatccactaatgcttttaataacttacatagattgtgttgcggcaagtcaagttttaatatagaggaaagggtttatcttatcatagtaaaatagtagtgatgtgttcataatttactatttgcatggtatattatcaaggctgtaaaagcttgaatttgccttttccacatcttcatttcaaattaatttttgtgaggacccagagaagtgggtagaaccaaatgcccatgtggttttgttatggttatttagatcatttcagggtggggagtattttcagcaccataatatttctgtaccagggagattatagtattctaatttttttagggaaaaattgcttagctctagggatttctaaactttgaacaataaaagttaattttagaaatactttcagggtcatcattaagctttagcgtggctttgttactgccctgttaagtagttttgttggttagtatggacagtacagcaaacccattatgattcctttacagtgagaaaaatatgaaatagtccagaaagaataagatattaagtaacctttgcctgaaggttctgtgaactccttaagcgtttgaatatatacttctccccaccccgaataagcgtattcttctgggaaaaggcaatgaaaaaagaaatgaactttcttctcagaccttgaaaagtttttagtgcatagtataatttttttcatatgatagactgagctttatgcacacaggtggactgggtggttatggatcaggagacagtgaagatgagaggagtgacagaggatctgagtcatctgacactgatgatgaagaattacggcatcgaatccggcaaaaacaggaagctttttggagaaaagaaaaagaacagcagctattacatgataaacagatggaagaagaaaagcagcaaacatagccccgccctgctcccatcccctactcccactgctcagcgcgggccattgcaagggtgccacacaatgtcttgtccaccctgggacacttctgagtatgaagcgggatgctattaaaaactacatggggaaacaggtgc

SEQ ID NO: 357617 - DNA, 751 bp, Homo sapiens
ggcgggagtgtttctaggagggaacatacttccccttaaaggaagatcacgttgctaaagtaaaaaatttgaaggcgccctatgtgtagaacacttacgttcttggctttctggccactataaagatgggtcgggaatggcgccagctacgttaaaaagtaacgtgcaggaatggttcagttgcccggtgttgaccagagtagagatggttttgcccacaaaaaaaatggcgccgaaacatgtcaatccgcacaatcacgtgttcacaaacctggatgagagatggtatggcttcagatgacaaacggatgttattattctttacttccgggtgagacaaatcgggcgccatcttgtcttgttcccgaagaagtagaagcatcgaaagcgttggagaggtgttaccggaacggcggcgacaagggtgttcccgaactagagtgggtaagtgatggagaacaattatacgtgggcacttgccggaccattacaacgttcttggtttctgtggcgaaggtagcataacttaaaataggctgcgtacgctgcttggcgcgaccgctggaacctcattcctttaaagcgctgcggtccgccagacttggtaaatcagagcgctgctttcgctgaaaaggaaatgtccttgttaaagagagtgctcacggtcccatcttctcacagagtttcctctcggacgagaagggactaattgttgggttcctgaccggccgttaaacactgcgcgtgcgca

SEQ ID NO: 357618 - DNA, 821 bp, Homo sapiens
ggcgggagtgtttctaggagggaacatacttccccttaaaggaagatcacgttgctaaagtaaaaaatttgaaggcgccctatgtgtagaacacttacgttcttggctttctggccactataaagatgggtcgggaatggcgccagctacgttaaaaagtaacgtgcaggaatggttcagttgcccggtgttgaccagagtagagatggttttgcccacaaaaaaaatggcgccgaaacatgtcaatccgcacaatcacgtgttcacaaacctggatgagagatggtatggcttcagatgacaaacggatgttattattctttacttccgggtgagacaaatcgggcgccatcttgtcttgttcccgaagaagtagaagcatcgaaagcgttggagaggtgttaccggaacggcggcgacaagggtgttcccgaactagagtggggcatacataatcttgctgctatgcttcgaagctgtagtctgaatcaacctaagttttaaacagaaggtgaacctctgaggtcagtttaaatagcagttggtgtgtcttcttggtgtttcctatttatttgttaactcttaattaaagttgtaagcgaagttacttttcaagggctctgataacctatttagccttaaaggagtctaaaggcgtacttgggaaactggacaggacaaaaaggggaggaagaaggaaacactgaacagaggttagaaaaaaatatatttaacttggaactgatacccaaaccagttgttggcctcatttgtgctatgtagtgcctattttgccatattctaataatgtcattgtaatt

SEQ ID NO: 357619 - DNA, 4851 bp, Homo sapiens
ggcgggagtgtttctaggagggaacatacttccccttaaaggaagatcacgttgctaaagtaaaaaatttgaaggcgccctatgtgtagaacacttacgttcttggctttctggccactataaagatgggtcgggaatggcgccagctacgttaaaaagtaacgtgcaggaatggttcagttgcccggtgttgaccagagtagagatggttttgcccacaaaaaaaatggcgccgaaacatgtcaatccgcacaatcacgtgttcacaaacctggatgagagatggtatggcttcagatgacaaacggatgttattattctttacttccgggtgagacaaatcgggcgccatcttgtcttgttcccgaagaagtagaagcatcgaaagcgttggagaggtgttaccggaacggcggcgacaagggtgttcccgaactagagtggggcatacataatcttgctgctatgcttcgaagctgtagtctgaatcaacctaagttttaaacagaaggtgaacctctgagatagaaaatcaagtatattttaaaagaagggatgtgggatcaaggaggacagccttggcagcagtggcccttgaaccagcaacaatggatgcagtcattccagcaccaacaggatccaagccagattgattgggctgcattggcccaagcttggattgcccaaagagaagcttcaggacagcaaagcatggtagaacaaccaccaggaatgatgccaaatggacaagatatgtctacaatggaatctggtccaaacaatcatgggaatttccaaggggattcaaacttcaacagaatgtggcaaccagaatggggaatgcatcagcaacccccacacccccctccagatcagccatggatgccaccaacaccaggcccaatggacattgttcctccttctgaagacagcaacagtcaggacagtggggaatttgcccctgacaacaggcatatatttaaccagaacaatcacaactttggtggaccacccgataattttgcagtggggccagtgaaccagtttgactatcagcatggggctgcttttggtccaccgcaaggtggatttcatcctccttattggcaaccaggacctccaggacctccagcacctccccagaatcgaagagaaaggccatcatcattcagggatcgtcagcgttcacctattgcacttcctgtgaagcaggagcctccacaaattgacgcagtaaaacgcaggactcttcccgcttggattcgcgaaggtcttgaaaaaatggaacgtgaaaagcagaagaaattggagaaagaaagaatggaacaacaacgttcacaattgtccaaaaaagaaaaaaaggccacagaagatgctgaaggaggggatggccctcgtttacctcagagaagtaaatttgatagtgatgaggaagaagaagacactgaaaatgttgaggctgcaagtagtgggaaagtcaccagaagtccatccccagttcctcaagaagagcacagtgaccctgagatgactgaagaggagaaagagtatcaaatgatgttgctgacaaaaatgcttctaacagaaattctgctggatgtcacagatgaagaaatttattacgtagccaaagatgcacaccgcaaagcaacgaaagctcctgcaaaacagctggcacagtccagtgcactggcttccctcactggactcggtggactgggtggttatggatcaggagacagtgaagatgagaggagtgacagaggatctgagtcatctgacactgatgatgaagaattacggcatcgaatccggcaaaaacaggaagctttttggagaaaagaaaaagaacagcagctattacatgataaacagatggaagaagaaaagcagcaaacagaaagggttacaaaagagatgaatgaatttatccataaagagcaaaatagtttatcactactagaagcaagagaagcagacggtgatgtggttaatgaaaagaagagaactccaaatgaaaccacatcagttttagaaccaaaaaaagagcataaagaaaaagaaaaacaaggaaggagtaggtcgggaagttctagtagtggtagttccagtagcaatagcagaactagtagtactagtagtactgtctctagctcttcatacagttctagctcaggtagtagtcgtacttcttctcggtcttcttctcctaaaaggaaaaagagacacagtaggagtagatctccaacaatcaaagctagacgtagcaggagtagaagctattctcgcagaattaaaatagagagcaatagggctagggtaaagattagagatagaaggagatctaatagaaatagcattgaaagagaaagacgacgaaatcggagtccttcccgagagagacgtagaagtagaagtcgctcaagggatagacgaaccaatcgtgccagtcgcagtaggagtcgagataggcgtaaaattgatgatcaacgtggaaatcttagtgggaacagtcataagcataaaggtgaggctaaagaacaagagaggaaaaaggagaggagtcgaagtatagataaagataggaaaaagaaagacaaagaaagggaacgtgaacaggataaaagaaaagagaaacaaaaaagggaagaaaaagattttaagttcagtagtcaggatgatagattaaaaaggaaacgagaaagtgaaagaacattttctaggagtggttctatatctgttaaaatcataagacatgattctagacaggatagtaagaaaagtactaccaaagatagtaaaaaacattcaggctctgattctagtggaaggagcagttctgagtctccaggaagtagcaaagaaaagaaggctaagaagcctaaacatagtcgatcgcgatccgtggagaaatctcaaaggtctggtaagaaggcaagccgcaaacacaagtctaagtcccgatcaaggtagtatactttttaaagtattttgtctgatttttaaaaaaaattgactgaatttattcaaagttgaaagtgtcctttctctctctctttaataaactcagtttggtacttgataaataatcatagtcttaaatgttagaaatcctatataatattatttatttaaaattgcagatttttaatttaaaatacatttttatttttaaattttgtcttttcccttttttttcagatcaacaacccctccccgtcgtaaacgctgaggaatgatgtggcaagaatgccatgatgttctttaaaaaaattccatgagttttaagggcttgtctcattatagaggcacattgtggctgtgtaggtgaaaccagaatcttttttttttttaatctgtaaataggtgtactttttccaatgctgctccaagttacttaataggatttctttgtattacgtttttttcaaaaaatatagtgcataataagactataaacatgccattctctttcagctgtaatgttcttaaaattattcttgaatgtactgtgatgtcaataaagctctttagttcatttttgttaaactcttgcaccttaattttatggttttaatctaaggaacgtacttttataaaaaggcagctggaattttgtataacaggttttaaaggtaccttctctcacctcccccaaagaaaatggtttttacttaatagtttgtcaaagtttgtaaattgtacccatggacttttgccagattccaactttaagggtatgaaagagggctagaaatagacctttacttttcatttggaagtatttgacaactttctaaacttttcttcctattttggggattttcaagtaatatattctctgtgtgtataacgtgtggttcactcctgtaaaatgaaattgctggaatcaatcaagccagtgcaccagtagagttatttgtaaggaacgattgtgtttgacagtaatagtcaagtctggaactatattctacagtcacccacttctgttttagaagcattttgaaacactttttggggttatagaaataagactcatgattcaatatatttatttatatttttaaagtataatatgacctcaaatcaatggaggaatgctgtattatgcaggtttgtgtcaatttcatgacattaaaattgtctgattttgtccgtttcttaaaattatgattagtgagtggtctaacagtttaaggcattgataacttacaagtagaatggggctctcaaagcattttaactcagttgctttagggtccatttttttatgtaatcacttactcagtgataaatgaatctctgaaaacaaatgcttttacattttaatttaaaaagaaaacaggtgcaggccacagaaaagttttaaagtatgccttcttaccagcaatagttcattttaaaaatcatgccagatttttgccaagatcagtgtttcctcaacatgaagatagaaatagatttgtatagtgtgctcttgtacctctacatagattattatataattttgagcagttacacatttatctaaaggaaataaatcaactgtgaataaatgcatgtttaccaaaatggctgtttacagtgcatttagttctgatatttataaagatgacatttcacagaataactttaaaatagtttgaaattctatatagtttagacatcgatcacatctggagacaaaataaaatgtgcaatattttttatgtaggcgagctaacacagtgtacctaattgcagaattatctgattaatttgtaatagataagttgtataacattttcatatcttaaaatgttttttagatcaatcttgaagtgaaatattttcaaaataaaattctacaga

SEQ ID NO: 357620 - DNA, 3550 bp, Homo sapiens
ggcgggagtgtttctaggagggaacatacttccccttaaaggaagatcacgttgctaaagtaaaaaatttgaaggcgccctatgtgtagaacacttacgttcttggctttctggccactataaagatgggtcgggaatggcgccagctacgttaaaaagtaacgtgcaggaatggttcagttgcccggtgttgaccagagtagagatggttttgcccacaaaaaaaatggcgccgaaacatgtcaatccgcacaatcacgtgttcacaaacctggatgagagatggtatggcttcagatgacaaacggatgttattattctttacttccgggtgagacaaatcgggcgccatcttgtcttgttcccgaagaagtagaagcatcgaaagcgttggagaggtgttaccggaacggcggcgacaagggtgttcccgaactagagtggggcatacataatcttgctgctatgcttcgaagctgtagtctgaatcaacctaagttttaaacagaaggtgaacctctgagatagaaaatcaagtatattttaaaagaagggatgtgggatcaaggaggacagccttggcagcagtggcccttgaaccagcaacaatggatgcagtcattccagcaccaacaggatccaagccagattgattgggctgcattggcccaagcttggattgcccaaagagaagcttcaggacagcaaagcatggtagaacaaccaccaggaatgatgccaaatggacaagatatgtctacaatggaatctggtccaaacaatcatgggaatttccaaggggattcaaacttcaacagaatgtggcaaccagaatggggaatgcatcagcaacccccacacccccctccagatcagccatggatgccaccaacaccaggcccaatggacattgttcctccttctgaagacagcaacagtcaggacagtggggaatttgcccctgacaacaggcatatatttaaccagaacaatcacaactttggtggaccacccgataattttgcagtggggccagtgaaccagtttgactatcagcatggggctgcttttggtccaccgcaaggtggatttcatcctccttattggcaaccaggacctccaggacctccagcacctccccagaatcgaagagaaaggccatcatcattcagggatcgtcagcgttcacctattgcacttcctgtgaagcaggagcctccacaaattgacgcagtaaaacgcaggactcttcccgcttggattcgcgaaggtcttgaaaaaatggaacgtgaaaagcagaagaaattggagaaagaaagaatggaacaacaacgttcacaattgtccaaaaaagaaaaaaaggccacagaagatgctgaaggaggggatggccctcgtttacctcagagaagtaaatttgatagtgatgaggaagaagaagacactgaaaatgttgaggctgcaagtagtgggaaagtcaccagaagtccatccccagttcctcaagaagagcacagtgaccctgagatgactgaagaggagaaagagtatcaaatgatgttgctgacaaaaatgcttctaacagaaattctgctggatgtcacagatgaagaaatttattacgtagccaaagatgcacaccgcaaagcaacgaaagctcctgcaaaacagctggcacagtccagtgcactggcttccctcactggactcggtggactgggtggttatggatcaggagacagtgaagatgagaggagtgacagaggatctgagtcatctgacactgatgatgaagaattacggcatcgaatccggcaaaaacaggaagctttttggagaaaagaaaaagaacagcagctattacatgataaacagatggaagaagaaaagcagcaaacagaaagggttacaaaagagatgaatgaatttatccataaagagcaaaatagtttatcactactagaagcaagagaagcagacggtgatgtggttaatgaaaagaagagaactccaaatgaaaccacatcagttttagaaccaaaaaaagagcataaagaaaaagaaaaacaaggaaggagtaggtcgggaagttctagtagtggtagttccagtagcaatagcagaactagtagtactagtagtactgtctctagctcttcatacagttctagctcaggtagtagtcgtacttcttctcggtcttcttctcctaaaaggaaaaagagacacagtaggagtagatctccaacaatcaaagctagacgtagcaggagtagaagctattctcgcagaattaaaatagagagcaatagggctagggtaaagattagagatagaaggagatctaatagaaatagcattgaaagagaaagacgacgaaatcggagtccttcccgagagagacgtagaagtagaagtcgctcaagggatagacgaaccaatcgtgccagtcgcagtaggagtcgagataggcgtaaaattgatgatcaacgtggaaatcttagtgggaacagtcataagcataaaggtgaggctaaagaacaagagaggaaaaaggagaggagtcgaagtatagataaagataggaaaaagaaagacaaagaaagggaacgtgaacaggataaaagaaaagagaaacaaaaaagggaagaaaaagattttaagttcagtagtcaggatgatagattaaaaaggaaacgagaaagtgaaagaacattttctaggagtggttctatatctgttaaaatcataagacatgattctagacaggatagtaagaaaagtactaccaaagatagtaaaaaacattcaggctctgattctagtggaaggagcagttctgagtctccaggaagtagcaaagaaaagaaggctaagaagcctaaacatagtcgatcgcgatccgtggagaaatctcaaaggtctggtaagaaggcaagccgcaaacacaagtctaagtcccgatcaaggtagtatactttttaaagtattttgtctgatttttaaaaaaaattgactgaatttattcaaagttgaaagtgtcctttctctctctctttaataaactcagtttggtacttgataaataatcatagtcttaaatgttagaaatcctatataatattatttatttaaaattgcagatttttaatttaaaatacatttttatttttaaattttgtcttttcccttttttttcagatcaacaacccctccccgtcgtaaacgctgaggaatgatgtggcaagaatgccatgatgttctttaaaaaaattccatgagttttaagggcttgtctcattatagaggcacattgtggctgtgtaggtgaaaccagaatcttttttttttttaatctgtaaataggtgtactttttccaatgctgctccaagttacttaataggatttctttgtattacgtttttttcaaaaaatatagtgcataataagactataaacatgccattctctttcagctgtaatgttcttaaaattattcttgaatgtactgtgatgtcaataaagctctttagttcatttttgttaaac

SEQ ID NO: 357621 - DNA, 5190 bp, Homo sapiens
ggcgggagtgtttctaggagggaacatacttccccttaaaggaagatcacgttgctaaagtaaaaaatttgaaggcgccctatgtgtagaacacttacgttcttggctttctggccactataaagatgggtcgggaatggcgccagctacgttaaaaagtaacgtgcaggaatggttcagttgcccggtgttgaccagagtagagatggttttgcccacaaaaaaaatggcgccgaaacatgtcaatccgcacaatcacgtgttcacaaacctggatgagagatggtatggcttcagatgacaaacggatgttattattctttacttccgggtgagacaaatcgggcgccatcttgtcttgttcccgaagaagtagaagcatcgaaagcgttggagaggtgttaccggaacggcggcgacaagggtgttcccgaactagagtggggcatacataatcttgctgctatgcttcgaagctgtagtctgaatcaacctaagttttaaacagaaggtgaacctctgagatagaaaatcaagtatattttaaaagaagggatgtgggatcaaggaggacagccttggcagcagtggcccttgaaccagcaacaatggatgcagtcattccagcaccaacaggatccaagccagattgattgggctgcattggcccaagcttggattgcccaaagagaagcttcaggacagcaaagcatggtagaacaaccaccaggaatgatgccaaatggacaagatatgtctacaatggaatctggtccaaacaatcatgggaatttccaaggggattcaaacttcaacagaatgtggcaaccagaatggggaatgcatcagcaacccccacacccccctccagatcagccatggatgccaccaacaccaggcccaatggacattgttcctccttctgaagacagcaacagtcaggacagtggggaatttgcccctgacaacaggcatatatttaaccagaacaatcacaactttggtggaccacccgataattttgcagtggggccagtgaaccagtttgactatcagcatggggctgcttttggtccaccgcaaggtggatttcatcctccttattggcaaccaggacctccaggacctccagcacctccccagaatcgaagagaaaggccatcatcattcagggatcgtcagcgttcacctattgcacttcctgtgaagcaggagcctccacaaattgacgcagtaaaacgcaggactcttcccgcttggattcgcgaaggtcttgaaaaaatggaacgtgaaaagcagaagaaattggagaaagaaagaatggaacaacaacgttcacaattgtccaaaaaagaaaaaaaggccacagaagatgctgaaggaggggatggccctcgtttacctcagagaagtaaatttgatagtgatgaggaagaagaagacactgaaaatgttgaggctgcaagtagtgggaaagtcaccagaagtccatccccagttcctcaagaagagcacagtgaccctgagatgactgaagaggagaaagagtatcaaatgatgttgctgacaaaaatgcttctaacagaaattctgctggatgtcacagatgaagaaatttattacgtagccaaagatgcacaccgcaaagcaacgaaagctcctgcaaaacagctggcacagtccagtgcactggcttccctcactggactcggtggactgggtggttatggatcaggagacagtgaagatgagaggagtgacagaggatctgagtcatctgacactgatgatgaagaattacggcatcgaatccggcaaaaacaggaagctttttggagaaaagaaaaagaacagcagctattacatgataaacagatggaagaagaaaagcagcaaacagaaagggttacaaaagagatgaatgaatttatccataaagagcaaaatagtttatcactactagaagcaagagaagcagacggtgatgtggttaatgaaaagaagagaactccaaatgaaaccacatcagttttagaaccaaaaaaagagcataaagaaaaagaaaaacaaggaaggagtaggtcgggaagttctagtagtggtagttccagtagcaatagcagaactagtagtactagtagtactgtctctagctcttcatacagttctagctcaggtagtagtcgtacttcttctcggtcttcttctcctaaaaggaaaaagagacacagtaggagtagatctccaacaatcaaagctagacgtagcaggagtagaagctattctcgcagaattaaaatagagagcaatagggctagggtaaagattagagatagaaggagatctaatagaaatagcattgaaagagaaagacgacgaaatcggagtccttcccgagagagacgtagaagtagaagtcgctcaagggatagacgaaccaatcgtgccagtcgcagtaggagtcgagataggcgtaaaattgatgatcaacgtggaaatcttagtgggaacagtcataagcataaaggtgaggctaaagaacaagagaggaaaaaggagaggagtcgaagtatagataaagataggaaaaagaaagacaaagaaagggaacgtgaacaggataaaagaaaagagaaacaaaaaagggaagaaaaagattttaagttcagtagtcaggatgatagattaaaaaggaaacgagaaagtgaaagaacattttctaggagtggttctatatctgttaaaatcataagacatgattctagacaggatagtaagaaaagtactaccaaagatagtaaaaaacattcaggctctgattctagtggaaggagcagttctgagtctccaggaagtagcaaagaaaagaaggctaagaagcctaaacatagtcgatcgcgatccgtggagaaatctcaaaggtctggtaagaaggcaagccgcaaacacaagtctaagtcccgatcaaggtagtatactttttaaagtattttgtctgatttttaaaaaaaattgactgaatttattcaaagttgaaagtgtcctttctctctctctttaataaactcagtttggtacttgataaataatcatagtcttaaatgttagaaatcctatataatattatttatttaaaattgcagatttttaatttaaaatacatttttatttttaaattttgtcttttcccttttttttcagatcaacaacccctccccgtcgtaaacgctgaggaatgatgtggcaagaatgccatgatgttctttaaaaaaattccatgagttttaagggcttgtctcattatagaggcacattgtggctgtgtaggtgaaaccagaatcttttttttttttaatctgtaaataggtgtactttttccaatgctgctccaagttacttaataggatttctttgtattacgtttttttcaaaaaatatagtgcataataagactataaacatgccattctctttcagctgtaatgttcttaaaattattcttgaatgtactgtgatgtcaataaagctctttagttcatttttgttaaactcttgcaccttaattttatggttttaatctaaggaacgtacttttataaaaaggcagctggaattttgtataacaggttttaaaggtaccttctctcacctcccccaaagaaaatggtttttacttaatagtttgtcaaagtttgtaaattgtacccatggacttttgccagattccaactttaagggtatgaaagagggctagaaatagacctttacttttcatttggaagtatttgacaactttctaaacttttcttcctattttggggattttcaagtaatatattctctgtgtgtataacgtgtggttcactcctgtaaaatgaaattgctggaatcaatcaagccagtgcaccagtagagttatttgtaaggaacgattgtgtttgacagtaatagtcaagtctggaactatattctacagtcacccacttctgttttagaagcattttgaaacactttttggggttatagaaataagactcatgattcaatatatttatttatatttttaaagtataatatgacctcaaatcaatggaggaatgctgtattatgcaggtttgtgtcaatttcatgacattaaaattgtctgattttgtccgtttcttaaaattatgattagtgagtggtctaacagtttaaggcattgataacttacaagtagaatggggctctcaaagcattttaactcagttgctttagggtccatttttttatgtaatcacttactcagtgataaatgaatctctgaaaacaaatgcttttacattttaatttaaaaagaaaacaggtgcaggccacagaaaagttttaaagtatgccttcttaccagcaatagttcattttaaaaatcatgccagatttttgccaagatcagtgtttcctcaacatgaagatagaaatagatttgtatagtgtgctcttgtacctctacatagattattatataattttgagcagttacacatttatctaaaggaaataaatcaactgtgaataaatgcatgtttaccaaaatggctgtttacagtgcatttagttctgatatttataaagatgacatttcacagaataactttaaaatagtttgaaattctatatagtttagacatcgatcacatctggagacaaaataaaatgtgcaatattttttatgtaggcgagctaacacagtgtacctaattgcagaattatctgattaatttgtaatagataagttgtataacattttcatatcttaaaatgttttttagatcaatcttgaagtgaaatattttcaaaataaaattctacagaaaaaatctgttggctatgatatgcacatttttgggcaagttatgaactagagcccaaagtagtatttgacagttttatttactctgccgtaatttgcaagcttatcagttaagtctgtagtttttttaaaagccgtcatgatatttgtgattattagtacataaaccagtgttataatttgatatttgggtttttcagactttgagtggcagatttagagaattctttatgttcttgacatgtgatatagtatttatttaccttgagtggtaaggttttataaggtagggtttccatgatttaggatgtgaatgcgaaaacttacacattagttaatta

SEQ ID NO: 357622 - DNA, 4797 bp, Homo sapiens
ggcgggagtgtttctaggagggaacatacttccccttaaaggaagatcacgttgctaaagtaaaaaatttgaaggcgccctatgtgtagaacacttacgttcttggctttctggccactataaagatgggtcgggaatggcgccagctacgttaaaaagtaacgtgcaggaatggttcagttgcccggtgttgaccagagtagagatggttttgcccacaaaaaaaatggcgccgaaacatgtcaatccgcacaatcacgtgttcacaaacctggatgagagatggtatggcttcagatgacaaacggatgttattattctttacttccgggtgagacaaatcgggcgccatcttgtcttgttcccgaagaagtagaagcatcgaaagcgttggagaggtgttaccggaacggcggcgacaagggtgttcccgaactagagtggggcatacataatcttgctgctatgcttcgaagctgtagtctgaatcaacctaagttttaaacagaaggtgaacctctgagatagaaaatcaagtatattttaaaagaagggatgtgggatcaaggaggacagccttggcagcagtggcccttgaaccagcaacaatggatgcagtcattccagcaccaacaggatccaagccagattgattgggctgcattggcccaagcttggattgcccaaagagaagcttcaggacagcaaagcatggtagaacaaccaccaggaatgatgccaaatggacaagatatgtctacaatggaatctggtccaaacaatcatgggaatttccaaggggattcaaacttcaacagaatgtggcaaccagaatggggaatgcatcagcaacccccacacccccctccagatcagccatggatgccaccaacaccaggcccaatggacattgttcctccttctgaagacagcaacagtcaggacagtggggaatttgcccctgacaacaggcatatatttaaccagaacaatcacaactttggtggaccacccgataattttgcagtggggccagtgaaccagtttgactatcagcatggggctgcttttggtccaccgcaaggtggatttcatcctccttattggcaaccaggacctccaggacctccagcacctccccagaatcgaagagaaaggccatcatcattcagggatcgtcagcgttcacctattgcacttcctgtgaagcaggagcctccacaaattgacgcagtaaaacgcaggactcttcccgcttggattcgcgaaggtcttgaaaaaatggaacgtgaaaagcagaagaaattggagaaagaaagaatggaacaacaacgttcacaattgtccaaaaaagaaaaaaaggccacagaagatgctgaaggaggggatggccctcgtttacctcagagaagtaaatttgatagtgatgaggaagaagaagacactgaaaatgttgaggctgcaagtagtgggaaagtcaccagaagtccatccccagttcctcaagaagagcacagtgaccctgagatgactgaagaggagaaagagtatcaaatgatgttgctgacaaaaatgcttctaacagaaattctgctggatgtcacagatgaagaaatttattacgtagccaaagatgcacaccgcaaagcaacgaaagctcctgcaaaacagctggcacagtccagtgcactggcttccctcactggactcggtggactgggtggttatggatcaggagacagtgaagatgagaggagtgacagaggatctgagtcatctgacactgatgatgaagaattacggcatcgaatccggcaaaaacaggaagctttttggagaaaagaaaaagaacagcagctattacatgataaacagatggaagaagaaaagcagcaaacagaaagggttacaaaagagatgaatgaatttatccataaagagcaaaatagtttatcactactagaagcaagagaagcagacggtgatgtggttaatgaaaagaagagaactccaaatgaaaccacatcagttttagaaccaaaaaaagagcataaagaaaaagaaaaacaaggaaggagtaggtcgggaagttctagtagtggtagttccagtagcaatagcagaactagtagtactagtagtactgtctctagctcttcatacagttctagctcaggtagtagtcgtacttcttctcggtcttcttctcctaaaaggaaaaagagacacagtaggagtagatctccaacaatcaaagctagacgtagcaggagtagaagctattctcgcagaattaaaatagagagcaatagggctagggtaaagattagagatagaaggagatctaatagaaatagcattgaaagagaaagacgacgaaatcggagtccttcccgagagagacgtagaagtagaagtcgctcaagggatagacgaaccaatcgtgccagtcgcagtaggagtcgagataggcgtaaaattgatgatcaacgtggaaatcttagtgggaacagtcataagcataaaggtgaggctaaagaacaagagaggaaaaaggagaggagtcgaagtatagataaagataggaaaaagaaagacaaagaaagggaacgtgaacaggataaaagaaaagagaaacaaaaaagggaagaaaaagattttaagttcagtagtcaggatgatagattaaaaaggaaacgagaaagtgaaagaacattttctaggagtggttctatatctgttaaaatcataagacatgattctagacaggatagtaagaaaagtactaccaaagatagtaaaaaacattcaggctctgattctagtggaaggagcagttctgagtctccaggaagtagcaaagaaaagaaggctaagaagcctaaacatagtcgatcgcgatccgtggagaaatctcaaaggtctggtaagaaggcaagccgcaaacacaagtctaagtcccgatcaaggtagtatactttttaaagtattttgtctgatttttaaaaaaaattgactgaatttattcaaagttgaaagtgtcctttctctctctctttaataaactcagtttggtacttgataaataatcatagtcttaaatgttagaaatcctatataatattatttatttaaaattgcagatttttaatttaaaatacatttttatttttaaattttgtcttttcccttttttttcagatcaacaacccctccccgtcgtaaacgctgaggaatgatgtggcaagaatgccatgatgttctttaaaaaaattccatgagttttaagggcttgtctcattatagaggcacattgtggctgtgtaggtgaaaccagaatcttttttttttttaatctgtaaataggtgtactttttccaatgctgctccaagttacttaataggatttctttgtattacgtttttttcaaaaaatatagtgcataataagactataaacatgccattctctttcagctgtaatgttcttaaaattattcttgaatgtactgtgatgtcaataaagctctttagttcatttttgttaaactcttgcaccttaattttatggttttaatctaaggaacgtacttttataaaaaggcagctggaattttgtataacaggttttaaaggtaccttctctcacctcccccaaagaaaatggtttttacttaatagtttgtcaaagtttgtaaattgtacccatggacttttgccagattccaactttaagggtatgaaagagggctagaaatagacctttacttttcatttggaagtatttgacaactttctaaacttttcttcctattttggggattttcaagtaatatattctctgtgtgtataacgtgtggttcactcctgtagaacgattgtgtttgacagtaatagtcaagtctggaactatattctacagtcacccacttctgttttagaagcattttgaaacactttttggggttatagaaataagactcatgattcaatatatttatttatatttttaaagtataatatgacctcaaatcaatggaggaatgctgtattatgcaggtttgtgtcaatttcatgacattaaaattgtctgattttgtccgtttcttaaaattatgattagtgagtggtctaacagtttaaggcattgataacttacaagtagaatggggctctcaaagcattttaactcagttgctttagggtccatttttttatgtaatcacttactcagtgataaatgaatctctgaaaacaaatgcttttacattttaatttaaaaagaaaacaggtgcaggccacagaaaagttttaaagtatgccttcttaccagcaatagttcattttaaaaatcatgccagatttttgccaagatcagtgtttcctcaacatgaagatagaaatagatttgtatagtgtgctcttgtacctctacatagattattatataattttgagcagttacacatttatctaaaggaaataaatcaactgtgaataaatgcatgtttaccaaaatggctgtttacagtgcatttagttctgatatttataaagatgacatttcacagaataactttaaaatagtttgaaattctatatagtttagacatcgatcacatctggagacaaaataaaatgtgcaatattttttatgtaggcgagctaacacagtgtacctaattgcagaattatctgattaatttgtaatagataagttgtataacattttcatatcttaaaatgttttttagatcaatcttgaagtgaaatattttcaaaataaaattctacaga

SEQ ID NO: 357623 - DNA, 4619 bp, Homo sapiens
ggcgggagtgtttctaggagggaacatacttccccttaaaggaagatcacgttgctaaagtaaaaaatttgaaggcgccctatgtgtagaacacttacgttcttggctttctggccactataaagatgggtcgggaatggcgccagctacgttaaaaagtaacgtgcaggaatggttcagttgcccggtgttgaccagagtagagatggttttgcccacaaaaaaaatggcgccgaaacatgtcaatccgcacaatcacgtgttcacaaacctggatgagagatggtatggcttcagatgacaaacggatgttattattctttacttccgggtgagacaaatcgggcgccatcttgtcttgttcccgaagaagtagaagcatcgaaagcgttggagaggtgttaccggaacggcggcgacaagggtgttcccgaactagagtggggcatacataatcttgctgctatgcttcgaagctgtagtctgaatcaacctaagttttaaacagaaggtgaacctctgagatagaaaatcaagtatattttaaaagaagggatgtgggatcaaggaggacagccttggcagcagtggcccttgaaccagcaacaatggatgcagtcattccagcaccaacaggatccaagccagattgattgggctgcattggcccaagcttggattgcccaaagagaagcttcaggacagcaaagcatggtagaacaaccaccaggaatgatgccaaatggacaagatatgtctacaatggaatctggtccaaacaatcatgggaatttccaaggggattcaaacttcaacagaatgtggcaaccagaatggggaatgcatcagcaacccccacacccccctccagatcagccatggatgccaccaacaccaggcccaatggacattgttcctccttctgaagacagcaacagtcaggacagtggggaatttgcccctgacaacaggcatatatttaaccagaacaatcacaactttggtggaccacccgataattttgcagtggggccagtgaaccagtttgactatcagcatggggctgcttttggtccaccgcaaggtggatttcatcctccttattggcaaccaggacctccaggacctccagcacctccccagaatcgaagagaaaggccatcatcattcagggatcgtcagcgttcacctattgcacttcctgtgaagcaggagcctccacaaattgacgcagtaaaacgcaggactcttcccgcttggattcgcgaaggtcttgaaaaaatggaacgtgaaaagcagaagaaattggagaaagaaagaatggaacaacaacgttcacaattgtccaaaaaagaaaaaaaggccacagaagatgctgaaggaggggatggccctcgtttacctcagagaagtaaatttgatagtgatgaggaagaagaagacactgaaaatgttgaggctgcaagtagtgggaaagtcaccagaagtccatccccagttcctcaagaagagcacagtgaccctgagatgactgaagaggagaaagagtatcaaatgatgttgctgacaaaaatgcttctaacagaaattctgctggatgtcacagatgaagaaatttattacgtagccaaagatgcacaccgcaaagcaacgaaagctcctgcaaaacagctggcacagtccagtgcactggcttccctcactggactcggtggactgggtggttatggatcaggagacagtgaagatgagaggagtgacagaggatctgagtcatctgacactgatgatgaagaattacggcatcgaatccggcaaaaacaggaagctttttggagaaaagaaaaagaacagcagctattacatgataaacagatggaagaagaaaagcagcaaacagaaagggttacaaaagagatgaatgaatttatccataaagagcaaaatagtttatcactactagaagcaagagaagcagacggtgatgtggttaatgaaaagaagagaactccaaatgaaaccacatcagttttagaaccaaaaaaagagcataaagaaaaagaaaaacaaggaaggagtaggtcgggaagttctagtagtggtagttccagtagcaatagcagaactagtagtactagtagtactgtctctagctcttcatacagttctagctcaggtagtagtcgtacttcttctcggtcttcttctcctaaaaggaaaaagagacacagtaggagtagatctccaacaatcaaagctagacgtagcaggagtagaagctattctcgcagaattaaaatagagagcaatagggctagggtaaagattagagatagaaggagatctaatagaaatagcattgaaagagaaagacgacgaaatcggagtccttcccgagagagacgtagaagtagaagtcgctcaagggatagacgaaccaatcgtgccagtcgcagtaggagtcgagataggcgtaaaattgatgatcaacgtggaaatcttagtgggaacagtcataagcataaaggtgaggctaaagaacaagagaggaaaaaggagaggagtcgaagtatagataaagataggaaaaagaaagacaaagaaagggaacgtgaacaggataaaagaaaagagaaacaaaaaagggaagaaaaagattttaagttcagtagtcaggatgatagattaaaaaggaaacgagaaagtgaaagaacattttctaggagtggttctatatctgttaaaatcataagacatgattctagacaggatagtaagaaaagtactaccaaagatagtaaaaaacattcaggctctgattctagtggaaggagcagttctgagtctccaggaagtagcaaagaaaagaaggctaagaagcctaaacatagtcgatcgcgatccgtggagaaatctcaaaggtctggtaagaaggcaagccgcaaacacaagtctaagtcccgatcaagatcaacaacccctccccgtcgtaaacgctgaggaatgatgtggcaagaatgccatgatgttctttaaaaaaattccatgagttttaagggcttgtctcattatagaggcacattgtggctgtgtaggtgaaaccagaatcttttttttttttaatctgtaaataggtgtactttttccaatgctgctccaagttacttaataggatttctttgtattacgtttttttcaaaaaatatagtgcataataagactataaacatgccattctctttcagctgtaatgttcttaaaattattcttgaatgtactgtgatgtcaataaagctctttagttcatttttgttaaactcttgcaccttaattttatggttttaatctaaggaacgtacttttataaaaaggcagctggaattttgtataacaggttttaaaggtaccttctctcacctcccccaaagaaaatggtttttacttaatagtttgtcaaagtttgtaaattgtacccatggacttttgccagattccaactttaagggtatgaaagagggctagaaatagacctttacttttcatttggaagtatttgacaactttctaaacttttcttcctattttggggattttcaagtaatatattctctgtgtgtataacgtgtggttcactcctgtaaaatgaaattgctggaatcaatcaagccagtgcaccagtagagttatttgtaaggaacgattgtgtttgacagtaatagtcaagtctggaactatattctacagtcacccacttctgttttagaagcattttgaaacactttttggggttatagaaataagactcatgattcaatatatttatttatatttttaaagtataatatgacctcaaatcaatggaggaatgctgtattatgcaggtttgtgtcaatttcatgacattaaaattgtctgattttgtccgtttcttaaaattatgattagtgagtggtctaacagtttaaggcattgataacttacaagtagaatggggctctcaaagcattttaactcagttgctttagggtccatttttttatgtaatcacttactcagtgataaatgaatctctgaaaacaaatgcttttacattttaatttaaaaagaaaacaggtgcaggccacagaaaagttttaaagtatgccttcttaccagcaatagttcattttaaaaatcatgccagatttttgccaagatcagtgtttcctcaacatgaagatagaaatagatttgtatagtgtgctcttgtacctctacatagattattatataattttgagcagttacacatttatctaaaggaaataaatcaactgtgaataaatgcatgtttaccaaaatggctgtttacagtgcatttagttctgatatttataaagatgacatttcacagaataactttaaaatagtttgaaattctatatagtttagacatcgatcacatctggagacaaaataaaatgtgcaatattttttatgtaggcgagctaacacagtgtacctaattgcagaattatctgattaatttgtaatagataagttgtataacattttcatatcttaaaatgttttttagatcaatcttgaagtgaaatattttcaaaataaaattctacaga

SEQ ID NO: 357624 - DNA, 3318 bp, Homo sapiens
ggcgggagtgtttctaggagggaacatacttccccttaaaggaagatcacgttgctaaagtaaaaaatttgaaggcgccctatgtgtagaacacttacgttcttggctttctggccactataaagatgggtcgggaatggcgccagctacgttaaaaagtaacgtgcaggaatggttcagttgcccggtgttgaccagagtagagatggttttgcccacaaaaaaaatggcgccgaaacatgtcaatccgcacaatcacgtgttcacaaacctggatgagagatggtatggcttcagatgacaaacggatgttattattctttacttccgggtgagacaaatcgggcgccatcttgtcttgttcccgaagaagtagaagcatcgaaagcgttggagaggtgttaccggaacggcggcgacaagggtgttcccgaactagagtggggcatacataatcttgctgctatgcttcgaagctgtagtctgaatcaacctaagttttaaacagaaggtgaacctctgagatagaaaatcaagtatattttaaaagaagggatgtgggatcaaggaggacagccttggcagcagtggcccttgaaccagcaacaatggatgcagtcattccagcaccaacaggatccaagccagattgattgggctgcattggcccaagcttggattgcccaaagagaagcttcaggacagcaaagcatggtagaacaaccaccaggaatgatgccaaatggacaagatatgtctacaatggaatctggtccaaacaatcatgggaatttccaaggggattcaaacttcaacagaatgtggcaaccagaatggggaatgcatcagcaacccccacacccccctccagatcagccatggatgccaccaacaccaggcccaatggacattgttcctccttctgaagacagcaacagtcaggacagtggggaatttgcccctgacaacaggcatatatttaaccagaacaatcacaactttggtggaccacccgataattttgcagtggggccagtgaaccagtttgactatcagcatggggctgcttttggtccaccgcaaggtggatttcatcctccttattggcaaccaggacctccaggacctccagcacctccccagaatcgaagagaaaggccatcatcattcagggatcgtcagcgttcacctattgcacttcctgtgaagcaggagcctccacaaattgacgcagtaaaacgcaggactcttcccgcttggattcgcgaaggtcttgaaaaaatggaacgtgaaaagcagaagaaattggagaaagaaagaatggaacaacaacgttcacaattgtccaaaaaagaaaaaaaggccacagaagatgctgaaggaggggatggccctcgtttacctcagagaagtaaatttgatagtgatgaggaagaagaagacactgaaaatgttgaggctgcaagtagtgggaaagtcaccagaagtccatccccagttcctcaagaagagcacagtgaccctgagatgactgaagaggagaaagagtatcaaatgatgttgctgacaaaaatgcttctaacagaaattctgctggatgtcacagatgaagaaatttattacgtagccaaagatgcacaccgcaaagcaacgaaagctcctgcaaaacagctggcacagtccagtgcactggcttccctcactggactcggtggactgggtggttatggatcaggagacagtgaagatgagaggagtgacagaggatctgagtcatctgacactgatgatgaagaattacggcatcgaatccggcaaaaacaggaagctttttggagaaaagaaaaagaacagcagctattacatgataaacagatggaagaagaaaagcagcaaacagaaagggttacaaaagagatgaatgaatttatccataaagagcaaaatagtttatcactactagaagcaagagaagcagacggtgatgtggttaatgaaaagaagagaactccaaatgaaaccacatcagttttagaaccaaaaaaagagcataaagaaaaagaaaaacaaggaaggagtaggtcgggaagttctagtagtggtagttccagtagcaatagcagaactagtagtactagtagtactgtctctagctcttcatacagttctagctcaggtagtagtcgtacttcttctcggtcttcttctcctaaaaggaaaaagagacacagtaggagtagatctccaacaatcaaagctagacgtagcaggagtagaagctattctcgcagaattaaaatagagagcaatagggctagggtaaagattagagatagaaggagatctaatagaaatagcattgaaagagaaagacgacgaaatcggagtccttcccgagagagacgtagaagtagaagtcgctcaagggatagacgaaccaatcgtgccagtcgcagtaggagtcgagataggcgtaaaattgatgatcaacgtggaaatcttagtgggaacagtcataagcataaaggtgaggctaaagaacaagagaggaaaaaggagaggagtcgaagtatagataaagataggaaaaagaaagacaaagaaagggaacgtgaacaggataaaagaaaagagaaacaaaaaagggaagaaaaagattttaagttcagtagtcaggatgatagattaaaaaggaaacgagaaagtgaaagaacattttctaggagtggttctatatctgttaaaatcataagacatgattctagacaggatagtaagaaaagtactaccaaagatagtaaaaaacattcaggctctgattctagtggaaggagcagttctgagtctccaggaagtagcaaagaaaagaaggctaagaagcctaaacatagtcgatcgcgatccgtggagaaatctcaaaggtctggtaagaaggcaagccgcaaacacaagtctaagtcccgatcaagatcaacaacccctccccgtcgtaaacgctgaggaatgatgtggcaagaatgccatgatgttctttaaaaaaattccatgagttttaagggcttgtctcattatagaggcacattgtggctgtgtaggtgaaaccagaatcttttttttttttaatctgtaaataggtgtactttttccaatgctgctccaagttacttaataggatttctttgtattacgtttttttcaaaaaatatagtgcataataagactataaacatgccattctctttcagctgtaatgttcttaaaattattcttgaatgtactgtgatgtcaataaagctctttagttcatttttgttaaac

SEQ ID NO: 357625 - DNA, 4231 bp, Homo sapiens
ggcgggagtgtttctaggagggaacatacttccccttaaaggaagatcacgttgctaaagtaaaaaatttgaaggcgccctatgtgtagaacacttacgttcttggctttctggccactataaagatgggtcgggaatggcgccagctacgttaaaaagtaacgtgcaggaatggttcagttgcccggtgttgaccagagtagagatggttttgcccacaaaaaaaatggcgccgaaacatgtcaatccgcacaatcacgtgttcacaaacctggatgagagatggtatggcttcagatgacaaacggatgttattattctttacttccgggtgagacaaatcgggcgccatcttgtcttgttcccgaagaagtagaagcatcgaaagcgttggagaggtgttaccggaacggcggcgacaagggtgttcccgaactagagtggggcatacataatcttgctgctatgcttcgaagctgtagtctgaatcaacctaagttttaaacagaaggtgaacctctgagatagaaaatcaagtatattttaaaagaagggatgtgggatcaaggaggacagccttggcagcagtggcccttgaaccagcaacaatggatgcagtcattccagcaccaacaggatccaagccagattgattgggctgcattggcccaagcttggattgcccaaagagaagcttcaggacagcaaagcatggtagaacaaccaccaggaatgatgccaaatggacaagatatgtctacaatggaatctggtccaaacaatcatgggaatttccaaggggattcaaacttcaacagaatgtggcaaccagaatggggaatgcatcagcaacccccacacccccctccagatcagccatggatgccaccaacaccaggcccaatggacattgttcctccttctgaagacagcaacagtcaggacagtggggaatttgcccctgacaacaggcatatatttaaccagaacaatcacaactttggtggaccacccgataattttgcagtggggccagtgaaccagtttgactatcagcatggggctgcttttggtccaccgcaaggtggatttcatcctccttattggcaaccaggacctccaggacctccagcacctccccagaatcgaagagaaaggccatcatcattcagggatcgtcagcgttcacctattgcacttcctgtgaagcaggagcctccacaaattgacgcagtaaaacgcaggactcttcccgcttggattcgcgaaggtcttgaaaaaatggaacgtgaaaagcagaagaaattggagaaagaaagaatggaacaacaacgttcacaattgtccaaaaaagaaaaaaaggccacagaagatgctgaaggaggggatggccctcgtttacctcagagaagtaaatttgatagtgatgaggaagaagaagacactgaaaatgttgaggctgcaagtagtgggaaagtcaccagaagtccatccccagttcctcaagaagagcacagtgaccctgagatgactgaagaggagaaagagtatcaaatgatgttgctgacaaaaatgcttctaacagaaattctgctggatgtcacagatgaagaaatttattacgtagccaaagatgcacaccgcaaagcaacgaaagctcctgcaaaacagctggcacagtccagtgcactggcttccctcactggactcggtggactgggtggttatggatcaggagacagtgaagatgagaggagtgacagaggatctgagtcatctgacactgatgatgaagaattacggcatcgaatccggcaaaaacaggaagctttttggagaaaagaaaaagaacagcagctattacatgataaacagatggaagaagaaaagcagcaaacagaaagggttacaaaagagatgaatgaatttatccataaagagcaaaatagtttatcactactagaagcaagagaagcagacggtgatgtggttaatgaaaagaagagaactccaaatgaaaccacatcagttttagaaccaaaaaaagagcataaagaaaaagaaaaacaaggaaggagtaggtcgggaagttctagtagtggtagttccagtagcaatagcagaactagtagtactagtagtactgtctctagctcttcatacagttctagctcaggtagtagtcgtacttcttctcggtcttcttctcctaaaaggaaaaagagacacagtaggagtagatctccaacaatcaaagctagacgtagcaggagtagaagctattctcgcagaattaaaatagagagcaatagggctagggtaaagattagagatagaaggagatctaatagaaatagcattgaaagagaaagacgacgaaatcggagtccttcccgagagagacgtagaagtagaagtcgctcaagggatagacgaaccaatcgtgccagtcgcagtaggagtcgagataggcgtaaaattgatgatcaacgtggaaatcttagtgggaacagtcataagcataaaggtgaggctaaagaacaagagaggaaaaaggagaggagtcgaagtatagataaagataggaaaaagaaagacaaagaaagggaacgtgaacaggataaaagaaaagagaaacaaaaaagggaagaaaaagattttaagttcagtagtcaggatgatagattaaaaaggaaacgagaaagtgaaagaacattttctaggagtggttctatatctgttaaaatcataagacatgattctagacaggatagtaagaaaagtactaccaaagatagtaaaaaacattcaggctctgattctagtggaaggagcagttctgagtctccaggaagtagcaaagaaaagaaggctaagaagcctaaacatagtcgatcgcgatccgtggagaaatctcaaaggtctggtaagaaggcaagccgcaaacacaagtctaagtcccgatcaaggtagtatactttttaaagtattttgtctgatttttaaaaaaaattgactgaatttattcaaagttgaaagtgtcctttctctctctctttaataaactcagtttggtacttgataaataatcatagtcttaaatgttagaaatcctatataatattatttatttaaaattgcagatttttaatttaaaatacatttttatttttaaattttgtcttttcccttttttttcagatcaacaacccctccccgtcgtaaacgctgaggaatgatgtggcaagaatgccatgatgttctttaaaaaaattccatgagttttaagggcttgtctcattatagaggcacattgtggctgtgtaggtgaaaccagaatcttttttttttttaatctgtaaataggtgtactttttccaatgctgctccaagttacttaataggatttctttgtattacgtttttttcaaaaaatatagtgcataataagactataaacatgccattctctttcagctgtaatgttcttaaaattattcttgaatgtactgtgatgtcaataaagctctttagttcatttttgttaaacaaaaaaaaaaaaaaaaaaaacaaaaaaaacaaaaaaaaaacaaaaaaaacaaaaacaaaaaaaaaaaaaaaacacaaaggggcgcgggccgcccagcaaacagcacacccacacaggcgagcacacaacacaatacacgcagacacaacacaagaatcatagtgacgaagagaggcggaccaaaaaaggatcgacaagtaatcaaaaaaacagagaggagcacaggagagcgaataataaaaacacgagagaacagaaaaagagaaaaaaaagaagacacatgtggtcgaccaacccctcgacgacgaaagacaacgaagatattaatactctgcaggctgggggggcaacactaaccaatataaggtagcgaccccaaagtatttccttctagcgaccaagagacgaaagctaatagaaaaccaccaacttaatgtgcgactgagaataataatcatcaaacacagctcgtccacagcaacgccggcacccacaataccctatagagactaggcatagaacaacagaaaggcagatgagtagtaagatagtctcgcgactgtatccagtttaagaaatagatatagcgtatatgtggagcatccaagtagagaccgaatatatcaaggaataaaaacgtaaggaacaaaaaatgataaatgataaaaatgacaacagggc

SEQ ID NO: 357626 - DNA, 4525 bp, Homo sapiens
taggagaagatgtacgaggccgtcccccgtttttaatttcagtacatcgtgactgcgcttaagttcgtaattacatggtccctcggcttacaatttaccaaaggtgtcccgaactaatggcatacataatcttgctgctatgcttcgaagctgtagtctgaatcaacctaagttttaaacagaaggtgaacctctgagatagaaaatcaagtatattttaaaagaagggatgtgggatcaaggaggacagccttggcagcagtggcccttgaaccagcaacaatggatgcagtcattccagcaccaacaggatccaagccagattgattgggctgcattggcccaagcttggattgcccaaagagaagcttcaggacagcaaagcatggtagaacaaccaccaggaatgatgccaaatggacaagatatgtctacaatggaatctggtccaaacaatcatgggaatttccaaggggattcaaacttcaacagaatgtggcaaccagaatggggaatgcatcagcaacccccacacccccctccagatcagccatggatgccaccaacaccaggcccaatggacattgttcctccttctgaagacagcaacagtcaggacagtggggaatttgcccctgacaacaggcatatatttaaccagaacaatcacaactttggtggaccacccgataattttgcagtggggccagtgaaccagtttgactatcagcatggggctgcttttggtccaccgcaaggtggatttcatcctccttattggcaaccaggacctccaggacctccagcacctccccagaatcgaagagaaaggccatcatcattcagggatcgtcagcgttcacctattgcacttcctgtgaagcaggagcctccacaaattgacgcagtaaaacgcaggactcttcccgcttggattcgcgaaggtcttgaaaaaatggaacgtgaaaagcagaagaaattggagaaagaaagaatggaacaacaacgttcacaattgtccaaaaaagaaaaaaaggccacagaagatgctgaaggaggggatggccctcgtttacctcagagaagtaaatttgatagtgatgaggaagaagaagacactgaaaatgttgaggctgcaagtagtgggaaagtcaccagaagtccatccccagttcctcaagaagagcacagtgaccctgagatgactgaagaggagaaagagtatcaaatgatgttgctgacaaaaatgcttctaacagaaattctgctggatgtcacagatgaagaaatttattacgtagccaaagatgcacaccgcaaagcaacgaaagctcctgcaaaacagctggcacagtccagtgcactggcttccctcactggactcggtggactgggtggttatggatcaggagacagtgaagatgagaggagtgacagaggatctgagtcatctgacactgatgatgaagaattacggcatcgaatccggcaaaaacaggaagctttttggagaaaagaaaaagaacagcagctattacatgataaacagatggaagaagaaaagcagcaaacagaaagggttacaaaagagatgaatgaatttatccataaagagcaaaatagtttatcactactagaagcaagagaagcagacggtgatgtggttaatgaaaagaagagaactccaaatgaaaccacatcagttttagaaccaaaaaaagagcataaagaaaaagaaaaacaaggaaggagtaggtcgggaagttctagtagtggtagttccagtagcaatagcagaactagtagtactagtagtactgtctctagctcttcatacagttctagctcaggtagtagtcgtacttcttctcggtcttcttctcctaaaaggaaaaagagacacagtaggagtagatctccaacaatcaaagctagacgtagcaggagtagaagctattctcgcagaattaaaatagagagcaatagggctagggtaaagattagagatagaaggagatctaatagaaatagcattgaaagagaaagacgacgaaatcggagtccttcccgagagagacgtagaagtagaagtcgctcaagggatagacgaaccaatcgtgccagtcgcagtaggagtcgagataggcgtaaaattgatgatcaacgtggaaatcttagtgggaacagtcataagcataaaggtgaggctaaagaacaagagaggaaaaaggagaggagtcgaagtatagataaagataggaaaaagaaagacaaagaaagggaacgtgaacaggataaaagaaaagagaaacaaaaaagggaagaaaaagattttaagttcagtagtcaggatgatagattaaaaaggaaacgagaaagtgaaagaacattttctaggagtggttctatatctgttaaaatcataagacatgattctagacaggatagtaagaaaagtactaccaaagatagtaaaaaacattcaggctctgattctagtggaaggagcagttctgagtctccaggaagtagcaaagaaaagaaggctaagaagcctaaacatagtcgatcgcgatccgtggagaaatctcaaaggtctggtaagaaggcaagccgcaaacacaagtctaagtcccgatcaaggtagtatactttttaaagtattttgtctgatttttaaaaaaaattgactgaatttattcaaagttgaaagtgtcctttctctctctctttaataaactcagtttggtacttgataaataatcatagtcttaaatgttagaaatcctatataatattatttatttaaaattgcagatttttaatttaaaatacatttttatttttaaattttgtcttttcccttttttttcagatcaacaacccctccccgtcgtaaacgctgaggaatgatgtggcaagaatgccatgatgttctttaaaaaaattccatgagttttaagggcttgtctcattatagaggcacattgtggctgtgtaggtgaaaccagaatcttttttttttttaatctgtaaataggtgtactttttccaatgctgctccaagttacttaataggatttctttgtattacgtttttttcaaaaaatatagtgcataataagactataaacatgccattctctttcagctgtaatgttcttaaaattattcttgaatgtactgtgatgtcaataaagctctttagttcatttttgttaaactcttgcaccttaattttatggttttaatctaaggaacgtacttttataaaaaggcagctggaattttgtataacaggttttaaaggtaccttctctcacctcccccaaagaaaatggtttttacttaatagtttgtcaaagtttgtaaattgtacccatggacttttgccagattccaactttaagggtatgaaagagggctagaaatagacctttacttttcatttggaagtatttgacaactttctaaacttttcttcctattttggggattttcaagtaatatattctctgtgtgtataacgtgtggttcactcctgtaaaatgaaattgctggaatcaatcaagccagtgcaccagtagagttatttgtaaggaacgattgtgtttgacagtaatagtcaagtctggaactatattctacagtcacccacttctgttttagaagcattttgaaacactttttggggttatagaaataagactcatgattcaatatatttatttatatttttaaagtataatatgacctcaaatcaatggaggaatgctgtattatgcaggtttgtgtcaatttcatgacattaaaattgtctgattttgtccgtttcttaaaattatgattagtgagtggtctaacagtttaaggcattgataacttacaagtagaatggggctctcaaagcattttaactcagttgctttagggtccatttttttatgtaatcacttactcagtgataaatgaatctctgaaaacaaatgcttttacattttaatttaaaaagaaaacaggtgcaggccacagaaaagttttaaagtatgccttcttaccagcaatagttcattttaaaaatcatgccagatttttgccaagatcagtgtttcctcaacatgaagatagaaatagatttgtatagtgtgctcttgtacctctacatagattattatataattttgagcagttacacatttatctaaaggaaataaatcaactgtgaataaatgcatgtttaccaaaatggctgtttacagtgcatttagttctgatatttataaagatgacatttcacagaataactttaaaatagtttgaaattctatatagtttagacatcgatcacatctggagacaaaataaaatgtgcaatattttttatgtaggcgagctaacacagtgtacctaattgcagaattatctgattaatttgtaatagataagttgtataacattttcatatcttaaaatgttttttagatcaatcttgaagtgaaatattttcaaaataaaattctacaga

SEQ ID NO: 357627 - DNA, 6130 bp, Homo sapiens
tcacgccactgcactccagcctgggtgacagaatgagtccctcatttaaaacaaacaaacaaaaaaaacgagaattcagattacttttaaaaacataaatattctagtctttgatactgtgaggtggttcatttctagctttcttgaaagtgaaatttccccacatttgaaaatgttttagttcctaagtttaagttcttaaatgactcccgcgggcatccctaccccttagttttactctactttgtgaccctgggcaagtgatttacctctgtgtgcctcgattttccctcccgaaattggcaaaaataatacctaatttctccctacctcacagggatgttgtgaggataaatgtgttcgtgtaagaaagaaattatataaaacctcaaggtattatttttgtggtgttgttactaaacaaatataaaaattcaacaaaaatagtgctttggattttgttacatttgttaaaaataactttgggcatttggttaggatatgaattagagtggagttagctcattttgaattatatatgacagtttagttcattgcttatttttaagataaacaaaaggaatttgaccaagaagtcataagttgttttttaaatctgtatgtttactgaaaaatctttcttgagatcttaaaattctgtgttgattttgttataaccgcctgttgaatgtttttatgcctaaatcttaaatagaatggggaatgcatcagcaacccccacacccccctccagatcagccatggatgccaccaacaccaggcccaatggacattgttcctccttctgaagacagcaacagtcaggacagtggggaatttgcccctgacaacaggcatatatttaaccagaacaatcacaactttggtggaccacccgataattttgcagtggggccagtgaaccagtttgactatcaggtgaaagatattttgttgctttaatattgtagatgtgcacgtaatccattctttggaagtgtctcatcaagaatacctaagatacgtgtttcacttttcagacttgtataaataagcacattctgtctcagttatcaatttttgagtattaaaataattagaatttgttttctgatttttttatttcattaggaaaatggtataaaagatcattacggaaaacttttgaaaaaattaaaaatgtataagtgcaatagctatatgatgttttattttctaatttatatttcaaaatggtatatttaaatgttaaagactagagaatgcacagtaattgaatatagctcatggttaagacatgaataaaaaatatagatcattttcctaagtgtaattccttgtgctatgtagaattatgactgtttttctagtgtcattttttttccattctgacatgacatgttaatggaattgtatataatttcctctgtagcatccaattcattcctagggacatagaactctgtggggaatagtgttgtatgttgggctttatttacttcattccctctgccagggtctacccttaaattatagtgctaggtgtcattttgaaataactgattgcaattattaacttataaactgctatcataatttaaaattttgaaagaattatttcatgaattctagggtagatttgataatggacatctagtattcaccttgagatggtaatcctctcattaataaatattcagatacttgtatacttggtatacagatacaacagtttttatgttgtttgaagaaatataatggcagggagcatctgcttaccctacttttgcatggtagatcccatgtaaacaagacaaagagctgtattggcagctggcctagaaaagcctctgaaaatagcaaaattgcagaaaatatttaatgattcattaacttctatctttgcttataaatgaatatatctgcaagattatagaaacagcttaagttgtttagttcactttttgttcactgtaagtaggatgttgaaattgacaaaaatgtctagttaaagagaaattagtatctatttgatgtcttagtgttggtaggattagcttgtaaatggattcagaatgaaaaatttcatatacttcttgaaagtagcttatcagctggcttttagaagcctctttgcatttacatagccggaaaatcttaagacaagtaagcctaggttcttgggaccatagaagtatcggtggatattagagccatggaattcttggatgtgctgcacacatggatttctactgtcccagttcataacacacgtgtgtcccagagagtatattgtattaatttgaagaaaaaataaactgcaatactctttcagcatggggctgcttttggtccaccgcaaggtggatttcatcctccttattggcaaccaggacctccaggacctccagcacctccccagaatcgaagagaaaggccatcatcattcagggatcgtcagcgttcacctattgcacttcctgtgaagcaggagcctccacaaattgacgcagtaaaacgcaggactcttcccgcttggattcgcgaaggtcttgaaaaaatggaacgtgaaaagcagaagaaattggagaaagaaagaatggaacaacaacgttcacaattgtccaaaaaagaaaaaaaggccacagaagatgctgaaggaggggatggccctcgtttacctcagagaagtaaatttgatagtgatgaggaagaagaagacactgaaaatgttgaggctgcaagtagtgggaaagtcaccagaagtccatccccagttcctcaagaagagcacagtgaccctgagatgactgaagaggagaaagagtatcaaatgatgttgctgacaaaaatgcttctaacagaaattctgctggatgtcacagatgaagaaatttattacgtagccaaagatgcacaccgcaaagcaacgaaagctcctgcaaaacagctggcacagtccagtgcactggcttccctcactggactcggtggactgggtggttatggatcaggagacagtgaagatgagaggagtgacagaggatctgagtcatctgacactgatgatgaagaattacggcatcgaatccggcaaaaacaggaagctttttggagaaaagaaaaagaacagcagctattacatgataaacagatggaagaagaaaagcagcaaacagaaagggttacaaaagagatgaatgaatttatccataaagagcaaaatagtttatcactactagaagcaagagaagcagacggtgatgtggttaatgaaaagaagagaactccaaatgaaaccacatcagttttagaaccaaaaaaagagcataaagaaaaagaaaaacaaggaaggagtaggtcgggaagttctagtagtggtagttccagtagcaatagcagaactagtagtactagtagtactgtctctagctcttcatacagttctagctcaggtagtagtcgtacttcttctcggtcttcttctcctaaaaggaaaaagagacacagtaggagtagatctccaacaatcaaagctagacgtagcaggagtagaagctattctcgcagaattaaaatagagagcaatagggctagggtaaagattagagatagaaggagatctaatagaaatagcattgaaagagaaagacgacgaaatcggagtccttcccgagagagacgtagaagtagaagtcgctcaagggatagacgaaccaatcgtgccagtcgcagtaggagtcgagataggcgtaaaattgatgatcaacgtggaaatcttagtgggaacagtcataagcataaaggtgaggctaaagaacaagagaggaaaaaggagaggagtcgaagtatagataaagataggaaaaagaaagacaaagaaagggaacgtgaacaggataaaagaaaagagaaacaaaaaagggaagaaaaagattttaagttcagtagtcaggatgatagattaaaaaggaaacgagaaagtgaaagaacattttctaggagtggttctatatctgttaaaatcataagacatgattctagacaggatagtaagaaaagtactaccaaagatagtaaaaaacattcaggctctgattctagtggaaggagcagttctgagtctccaggaagtagcaaagaaaagaaggctaagaagcctaaacatagtcgatcgcgatccgtggagaaatctcaaaggtctggtaagaaggcaagccgcaaacacaagtctaagtcccgatcaaggtagtatactttttaaagtattttgtctgatttttaaaaaaaattgactgaatttattcaaagttgaaagtgtcctttctctctctctttaataaactcagtttggtacttgataaataatcatagtcttaaatgttagaaatcctatataatattatttatttaaaattgcagatttttaatttaaaatacatttttatttttaaattttgtcttttcccttttttttcagatcaacaacccctccccgtcgtaaacgctgaggaatgatgtggcaagaatgccatgatgttctttaaaaaaattccatgagttttaagggcttgtctcattatagaggcacattgtggctgtgtaggtgaaaccagaatcttttttttttttaatctgtaaataggtgtactttttccaatgctgctccaagttacttaataggatttctttgtattacgtttttttcaaaaaatatagtgcataataagactataaacatgccattctctttcagctgtaatgttcttaaaattattcttgaatgtactgtgatgtcaataaagctctttagttcatttttgttaaactcttgcaccttaattttatggttttaatctaaggaacgtacttttataaaaaggcagctggaattttgtataacaggttttaaaggtaccttctctcacctcccccaaagaaaatggtttttacttaatagtttgtcaaagtttgtaaattgtacccatggacttttgccagattccaactttaagggtatgaaagagggctagaaatagacctttacttttcatttggaagtatttgacaactttctaaacttttcttcctattttggggattttcaagtaatatattctctgtgtgtataacgtgtggttcactcctgtaaaatgaaattgctggaatcaatcaagccagtgcaccagtagagttatttgtaaggaacgattgtgtttgacagtaatagtcaagtctggaactatattctacagtcacccacttctgttttagaagcattttgaaacactttttggggttatagaaataagactcatgattcaatatatttatttatatttttaaagtataatatgacctcaaatcaatggaggaatgctgtattatgcaggtttgtgtcaatttcatgacattaaaattgtctgattttgtccgtttcttaaaattatgattagtgagtggtctaacagtttaaggcattgataacttacaagtagaatggggctctcaaagcattttaactcagttgctttagggtccatttttttatgtaatcacttactcagtgataaatgaatctctgaaaacaaatgcttttacattttaatttaaaaagaaaacaggtgcaggccacagaaaagttttaaagtatgccttcttaccagcaatagttcattttaaaaatcatgccagatttttgccaagatcagtgtttcctcaacatgaagatagaaatagatttgtatagtgtgctcttgtacctctacatagattattatataattttgagcagttacacatttatctaaaggaaataaatcaactgtgaataaatgcatgtttaccaaaatggctgtttacagtgcatttagttctgatatttataaagatgacatttcacagaataactttaaaatagtttgaaattctatatagtttagacatcgatcacatctggagacaaaataaaatgtgcaatattttttatgtaggcgagctaacacagtgtacctaattgcagaattatctgattaatttgtaatagataagttgtataacattttcatatcttaaaatgttttttagatcaatcttgaagtgaaatattttcaaaataaaattctacaga

SEQ ID NO: 357628 - DNA, 5030 bp, Homo sapiens
ggcgggagtgtttctaggagggaacatacttccccttaaaggaagatcacgttgctaaagtaaaaaatttgaaggcgccctatgtgtagaacacttacgttcttggctttctggccactataaagatgggtcgggaatggcgccagctacgttaaaaagtaacgtgcaggaatggttcagttgcccggtgttgaccagagtagagatggttttgcccacaaaaaaaatggcgccgaaacatgtcaatccgcacaatcacgtgttcacaaacctggatgagagatggtatggcttcagatgacaaacggatgttattattctttacttccgggtgagacaaatcgggcgccatcttgtcttgttcccgaagaagtagaagcatcgaaagcgttggagaggtgttaccggaacggcggcgacaagggtgttcccgaactagagtggggcatacataatcttgctgctatgcttcgaagctgtagtctgaatcaacctaagttttaaacagaaggtgaacctctgagcatacaggaaaggatcaatctagaaggattcatttagtaaacatttattaaatgcctgctatgaactaagccttgggatacaaaaataaagaagaaaccatgccctggttatgtgagtcactggttcttgaacagggttgtgtatcagtgttggaataaagtacaaagatattagacttatagaaaatcaagtatattttaaaagaagggatgtgggatcaaggaggacagccttggcagcagtggcccttgaaccagcaacaatggatgcagtcattccagcaccaacaggatccaagccagattgattgggctgcattggcccaagcttggattgcccaaagagaagcttcaggacagcaaagcatggtagaacaaccaccaggaatgatgccaaatggacaagatatgtctacaatggaatctggtccaaacaatcatgggaatttccaaggggattcaaacttcaacagaatgtggcaaccagaatggggaatgcatcagcaacccccacacccccctccagatcagccatggatgccaccaacaccaggcccaatggacattgttcctccttctgaagacagcaacagtcaggacagtggggaatttgcccctgacaacaggcatatatttaaccagaacaatcacaactttggtggaccacccgataattttgcagtggggccagtgaaccagtttgactatcagcatggggctgcttttggtccaccgcaaggtggatttcatcctccttattggcaaccaggacctccaggacctccagcacctccccagaatcgaagagaaaggccatcatcattcagggatcgtcagcgttcacctattgcacttcctgtgaagcaggagcctccacaaattgacgcagtaaaacgcaggactcttcccgcttggattcgcgaaggtcttgaaaaaatggaacgtgaaaagcagaagaaattggagaaagaaagaatggaacaacaacgttcacaattgtccaaaaaagaaaaaaaggccacagaagatgctgaaggaggggatggccctcgtttacctcagagaagtaaatttgatagtgatgaggaagaagaagacactgaaaatgttgaggctgcaagtagtgggaaagtcaccagaagtccatccccagttcctcaagaagagcacagtgaccctgagatgactgaagaggagaaagagtatcaaatgatgttgctgacaaaaatgcttctaacagaaattctgctggatgtcacagatgaagaaatttattacgtagccaaagatgcacaccgcaaagcaacgaaagctcctgcaaaacagctggcacagtccagtgcactggcttccctcactggactcggtggactgggtggttatggatcaggagacagtgaagatgagaggagtgacagaggatctgagtcatctgacactgatgatgaagaattacggcatcgaatccggcaaaaacaggaagctttttggagaaaagaaaaagaacagcagctattacatgataaacagatggaagaagaaaagcagcaaacagaaagggttacaaaagagatgaatgaatttatccataaagagcaaaatagtttatcactactagaagcaagagaagcagacggtgatgtggttaatgaaaagaagagaactccaaatgaaaccacatcagttttagaaccaaaaaaagagcataaagaaaaagaaaaacaaggaaggagtaggtcgggaagttctagtagtggtagttccagtagcaatagcagaactagtagtactagtagtactgtctctagctcttcatacagttctagctcaggtagtagtcgtacttcttctcggtcttcttctcctaaaaggaaaaagagacacagtaggagtagatctccaacaatcaaagctagacgtagcaggagtagaagctattctcgcagaattaaaatagagagcaatagggctagggtaaagattagagatagaaggagatctaatagaaatagcattgaaagagaaagacgacgaaatcggagtccttcccgagagagacgtagaagtagaagtcgctcaagggatagacgaaccaatcgtgccagtcgcagtaggagtcgagataggcgtaaaattgatgatcaacgtggaaatcttagtgggaacagtcataagcataaaggtgaggctaaagaacaagagaggaaaaaggagaggagtcgaagtatagataaagataggaaaaagaaagacaaagaaagggaacgtgaacaggataaaagaaaagagaaacaaaaaagggaagaaaaagattttaagttcagtagtcaggatgatagattaaaaaggaaacgagaaagtgaaagaacattttctaggagtggttctatatctgttaaaatcataagacatgattctagacaggatagtaagaaaagtactaccaaagatagtaaaaaacattcaggctctgattctagtggaaggagcagttctgagtctccaggaagtagcaaagaaaagaaggctaagaagcctaaacatagtcgatcgcgatccgtggagaaatctcaaaggtctggtaagaaggcaagccgcaaacacaagtctaagtcccgatcaaggtagtatactttttaaagtattttgtctgatttttaaaaaaaattgactgaatttattcaaagttgaaagtgtcctttctctctctctttaataaactcagtttggtacttgataaataatcatagtcttaaatgttagaaatcctatataatattatttatttaaaattgcagatttttaatttaaaatacatttttatttttaaattttgtcttttcccttttttttcagatcaacaacccctccccgtcgtaaacgctgaggaatgatgtggcaagaatgccatgatgttctttaaaaaaattccatgagttttaagggcttgtctcattatagaggcacattgtggctgtgtaggtgaaaccagaatcttttttttttttaatctgtaaataggtgtactttttccaatgctgctccaagttacttaataggatttctttgtattacgtttttttcaaaaaatatagtgcataataagactataaacatgccattctctttcagctgtaatgttcttaaaattattcttgaatgtactgtgatgtcaataaagctctttagttcatttttgttaaactcttgcaccttaattttatggttttaatctaaggaacgtacttttataaaaaggcagctggaattttgtataacaggttttaaaggtaccttctctcacctcccccaaagaaaatggtttttacttaatagtttgtcaaagtttgtaaattgtacccatggacttttgccagattccaactttaagggtatgaaagagggctagaaatagacctttacttttcatttggaagtatttgacaactttctaaacttttcttcctattttggggattttcaagtaatatattctctgtgtgtataacgtgtggttcactcctgtaaaatgaaattgctggaatcaatcaagccagtgcaccagtagagttatttgtaaggaacgattgtgtttgacagtaatagtcaagtctggaactatattctacagtcacccacttctgttttagaagcattttgaaacactttttggggttatagaaataagactcatgattcaatatatttatttatatttttaaagtataatatgacctcaaatcaatggaggaatgctgtattatgcaggtttgtgtcaatttcatgacattaaaattgtctgattttgtccgtttcttaaaattatgattagtgagtggtctaacagtttaaggcattgataacttacaagtagaatggggctctcaaagcattttaactcagttgctttagggtccatttttttatgtaatcacttactcagtgataaatgaatctctgaaaacaaatgcttttacattttaatttaaaaagaaaacaggtgcaggccacagaaaagttttaaagtatgccttcttaccagcaatagttcattttaaaaatcatgccagatttttgccaagatcagtgtttcctcaacatgaagatagaaatagatttgtatagtgtgctcttgtacctctacatagattattatataattttgagcagttacacatttatctaaaggaaataaatcaactgtgaataaatgcatgtttaccaaaatggctgtttacagtgcatttagttctgatatttataaagatgacatttcacagaataactttaaaatagtttgaaattctatatagtttagacatcgatcacatctggagacaaaataaaatgtgcaatattttttatgtaggcgagctaacacagtgtacctaattgcagaattatctgattaatttgtaatagataagttgtataacattttcatatcttaaaatgttttttagatcaatcttgaagtgaaatattttcaaaataaaattctacaga

SEQ ID NO: 357629 - DNA, 2983 bp, Homo sapiens
  misc_feature (1969)..(1969): n is a, c, g, or t
  misc_feature (1993)..(1993): n is a, c, g, or t
  misc_feature (1997)..(1997): n is a, c, g, or t
  misc_feature (2005)..(2005): n is a, c, g, or t
  misc_feature (2007)..(2007): n is a, c, g, or t
  misc_feature (2011)..(2011): n is a, c, g, or t
  misc_feature (2013)..(2013): n is a, c, g, or t
  misc_feature (2017)..(2017): n is a, c, g, or t
  misc_feature (2024)..(2024): n is a, c, g, or t
  misc_feature (2026)..(2027): n is a, c, g, or t
  misc_feature (2031)..(2031): n is a, c, g, or t
  misc_feature (2035)..(2035): n is a, c, g, or t
  misc_feature (2041)..(2041): n is a, c, g, or t
  misc_feature (2047)..(2047): n is a, c, g, or t
  misc_feature (2051)..(2051): n is a, c, g, or t
  misc_feature (2057)..(2057): n is a, c, g, or t
ggcgggagtgtttctaggagggaacatacttccccttaaaggaagatcacgttgctaaagtaaaaaatttgaaggcgccctatgtgtagaacacttacgttcttggctttctggccactataaagatgggtcgggaatggcgccagctacgttaaaaagtaacgtgcaggaatggttcagttgcccggtgttgaccagagtagagatggttttgcccacaaaaaaaatggcgccgaaacatgtcaatccgcacaatcacgtgttcacaaacctggatgagagatggtatggcttcagatgacaaacggatgttattattctttacttccgggtgagacaaatcgggcgccatcttgtcttgttcccgaagaagtagaagcatcgaaagcgttggagaggtgttaccggaacggcggcgacaagggtgttcccgaactagagtggggcatacataatcttgctgctatgcttcgaagctgtagtctgaatcaacctaagttttaaacagaaggtgaacctctgagatagaaaatcaagtatattttaaaagaagggatgtgggatcaaggaggacagccttggcagcagtggcccttgaaccagcaacaatggatgcagtcattccagcaccaacaggatccaagccagattgattgggctgcattggcccaagcttggattgcccaaagagaagcttcaggacagcaaagcatggtagaacaaccaccaggaatgatgccaaatggacaagatatgtctacaatggaatctggtccaaacaatcatgggaatttccaaggggattcaaacttcaacagaatgtggcaaccagaatggggaatgcatcagcaacccccacacccccctccagatcagccatggatgccaccaacaccaggcccaatggacattgttcctccttctgaagacagcaacagtcaggacagtggggaatttgcccctgacaacaggcatatatttaaccagaacaatcacaactttggtggaccacccgataattttgcagtggggccagtgaaccagtttgactatcagcatggggctgcttttggtccaccgcaaggtggatttcatcctccttattggcaaccaggacctccaggacctccagcacctccccagaatcgaagagaaaggccatcatcattcagggatcgtcagcgttcacctattgcacttcctgtgaagcaggagcctccacaaattgacgcagtaaaacgcaggactcttcccgcttggattcgcgaaggtcttgaaaaaatggaacgtgaaaagcagaagaaattggagaaagaaagaatggaacaacaacgttcacaattgtccaaaaaagaaaaaaaggccacagaagatgctgaaggaggggatggccctcgtttacctcagagaagtaaatttgatagtgatgaggaagaagaagacactgaaaatgttgaggctgcaagtagtgggaaagtcaccagaagtccatccccagttcctcaagaagagcacagtgaccctgagatgactgaagaggagaaagagtatcaaatgatgttgctgacaaaaatgcttctaacagaaattctgctggatgtcacagatgaagaaatttattacgtagccaaagatgcacaccgcaaagcaacgaaagctcctgcaaaacagctggcacagtccagtgcactggcttccctcactggactcggtggactgggtggttatggatcaggagacagtgaagatgagaggagtgacagaggatctgagtcatctgacactgatgatgaagaattacggcatcgaatccggcaaaaacaggaagctttttggagaaaagaaaaagaacagcagctattacatgataaacagatggaagaagaaaagcagcaaacagaaagggagggagagacagagagagacagacagacaggcagagaaagagagtaagacagaagataggcanagagagagagagagagagagaganaganagagagananagananaganagagagngnnaganaganagaganagaganaganagaganagagagagagaaacaaaaaagggaagaaaaagattttaagttcagtagtcaggatgatagattaaaaaggaaacgagaaagtgaaagaacattttctaggagtggttctatatctgttaaaatcataagacatgattctagacaggatagtaagaaaagtactaccaaagatagtaaaaaacattcaggctctgattctagtggaaggagcagttctgagtctccaggaagtagcaaagaaaagaaggctaagaagcctaaacatagtcgatcgcgatccgtggagaaatctcaaaggtctggtaagaaggcaagccgcaaacacaagtctaagtcccgatcaaggtagtatactttttaaagtattttgtctgatttttaaaaaaaattgactgaatttattcaaagttgaaagtgtcctttctctctctctttaataaactcagtttggtacttgataaataatcatagtcttaaatgttagaaatcctatataatattatttatttaaaattgcagatttttaatttaaaatacatttttatttttaaattttgtcttttcccttttttttcagatcaacaacccctccccgtcgtaaacgctgaggaatgatgtggcaagaatgccatgatgttctttaaaaaaattccatgagttttaagggcttgtctcattatagaggcacattgtggctgtgtaggtgaaaccagaatcttttttttttttaatctgtaaataggtgtactttttccaatgctgctccaagttacttaataggatttctttgtattacgtttttttcaaaaaatatagtgcataataagactataaacatgccattctctttcagctgtaatgttcttaaaattattcttgaatgtactgtgatgtcaataaagctctttagttcatttttgttaaac

SEQ ID NO: 357630 - DNA, 4671 bp, Homo sapiens
ggcgggagtgtttctaggagggaacatacttccccttaaaggaagatcacgttgctaaagtaaaaaatttgaaggcgccctatgtgtagaacacttacgttcttggctttctggccactataaagatgggtcgggaatggcgccagctacgttaaaaagtaacgtgcaggaatggttcagttgcccggtgttgaccagagtagagatggttttgcccacaaaaaaaatggcgccgaaacatgtcaatccgcacaatcacgtgttcacaaacctggatgagagatggtatggcttcagatgacaaacggatgttattattctttacttccgggtgagacaaatcgggcgccatcttgtcttgttcccgaagaagtagaagcatcgaaagcgttggagaggtgttaccggaacggcggcgacaagggtgttcccgaactagagtggggcatacataatcttgctgctatgcttcgaagctgtagtctgaatcaacctaagttttaaacagaaggtgaacctctgagatagaaaatcaagtatattttaaaagaagggatgtgggatcaaggaggacagccttggcagcagtggcccttgaaccagcaacaatggatgcagtcattccagcaccaacaggatccaagccagattgattgggctgcattggcccaagcttggattgcccaaagagaagcttcaggacagcaaagcatggtagaacaaccaccaggaatgatgccaaatggacaagatatgtctacaatggaatctggtccaaacaatcatgggaatttccaaggggattcaaacttcaacagaatgtggcaaccagaatggggaatgcatcagcaacccccacacccccctccagatcagccatggatgccaccaacaccaggcccaatggacattgttcctccttattggcaaccaggacctccaggacctccagcacctccccagaatcgaagagaaaggccatcatcattcagggatcgtcagcgttcacctattgcacttcctgtgaagcaggagcctccacaaattgacgcagtaaaacgcaggactcttcccgcttggattcgcgaaggtcttgaaaaaatggaacgtgaaaagcagaagaaattggagaaagaaagaatggaacaacaacgttcacaattgtccaaaaaagaaaaaaaggccacagaagatgctgaaggaggggatggccctcgtttacctcagagaagtaaatttgatagtgatgaggaagaagaagacactgaaaatgttgaggctgcaagtagtgggaaagtcaccagaagtccatccccagttcctcaagaagagcacagtgaccctgagatgactgaagaggagaaagagtatcaaatgatgttgctgacaaaaatgcttctaacagaaattctgctggatgtcacagatgaagaaatttattacgtagccaaagatgcacaccgcaaagcaacgaaagctcctgcaaaacagctggcacagtccagtgcactggcttccctcactggactcggtggactgggtggttatggatcaggagacagtgaagatgagaggagtgacagaggatctgagtcatctgacactgatgatgaagaattacggcatcgaatccggcaaaaacaggaagctttttggagaaaagaaaaagaacagcagctattacatgataaacagatggaagaagaaaagcagcaaacagaaagggttacaaaagagatgaatgaatttatccataaagagcaaaatagtttatcactactagaagcaagagaagcagacggtgatgtggttaatgaaaagaagagaactccaaatgaaaccacatcagttttagaaccaaaaaaagagcataaagaaaaagaaaaacaaggaaggagtaggtcgggaagttctagtagtggtagttccagtagcaatagcagaactagtagtactagtagtactgtctctagctcttcatacagttctagctcaggtagtagtcgtacttcttctcggtcttcttctcctaaaaggaaaaagagacacagtaggagtagatctccaacaatcaaagctagacgtagcaggagtagaagctattctcgcagaattaaaatagagagcaatagggctagggtaaagattagagatagaaggagatctaatagaaatagcattgaaagagaaagacgacgaaatcggagtccttcccgagagagacgtagaagtagaagtcgctcaagggatagacgaaccaatcgtgccagtcgcagtaggagtcgagataggcgtaaaattgatgatcaacgtggaaatcttagtgggaacagtcataagcataaaggtgaggctaaagaacaagagaggaaaaaggagaggagtcgaagtatagataaagataggaaaaagaaagacaaagaaagggaacgtgaacaggataaaagaaaagagaaacaaaaaagggaagaaaaagattttaagttcagtagtcaggatgatagattaaaaaggaaacgagaaagtgaaagaacattttctaggagtggttctatatctgttaaaatcataagacatgattctagacaggatagtaagaaaagtactaccaaagatagtaaaaaacattcaggctctgattctagtggaaggagcagttctgagtctccaggaagtagcaaagaaaagaaggctaagaagcctaaacatagtcgatcgcgatccgtggagaaatctcaaaggtctggtaagaaggcaagccgcaaacacaagtctaagtcccgatcaaggtagtatactttttaaagtattttgtctgatttttaaaaaaaattgactgaatttattcaaagttgaaagtgtcctttctctctctctttaataaactcagtttggtacttgataaataatcatagtcttaaatgttagaaatcctatataatattatttatttaaaattgcagatttttaatttaaaatacatttttatttttaaattttgtcttttcccttttttttcagatcaacaacccctccccgtcgtaaacgctgaggaatgatgtggcaagaatgccatgatgttctttaaaaaaattccatgagttttaagggcttgtctcattatagaggcacattgtggctgtgtaggtgaaaccagaatcttttttttttttaatctgtaaataggtgtactttttccaatgctgctccaagttacttaataggatttctttgtattacgtttttttcaaaaaatatagtgcataataagactataaacatgccattctctttcagctgtaatgttcttaaaattattcttgaatgtactgtgatgtcaataaagctctttagttcatttttgttaaactcttgcaccttaattttatggttttaatctaaggaacgtacttttataaaaaggcagctggaattttgtataacaggttttaaaggtaccttctctcacctcccccaaagaaaatggtttttacttaatagtttgtcaaagtttgtaaattgtacccatggacttttgccagattccaactttaagggtatgaaagagggctagaaatagacctttacttttcatttggaagtatttgacaactttctaaacttttcttcctattttggggattttcaagtaatatattctctgtgtgtataacgtgtggttcactcctgtaaaatgaaattgctggaatcaatcaagccagtgcaccagtagagttatttgtaaggaacgattgtgtttgacagtaatagtcaagtctggaactatattctacagtcacccacttctgttttagaagcattttgaaacactttttggggttatagaaataagactcatgattcaatatatttatttatatttttaaagtataatatgacctcaaatcaatggaggaatgctgtattatgcaggtttgtgtcaatttcatgacattaaaattgtctgattttgtccgtttcttaaaattatgattagtgagtggtctaacagtttaaggcattgataacttacaagtagaatggggctctcaaagcattttaactcagttgctttagggtccatttttttatgtaatcacttactcagtgataaatgaatctctgaaaacaaatgcttttacattttaatttaaaaagaaaacaggtgcaggccacagaaaagttttaaagtatgccttcttaccagcaatagttcattttaaaaatcatgccagatttttgccaagatcagtgtttcctcaacatgaagatagaaatagatttgtatagtgtgctcttgtacctctacatagattattatataattttgagcagttacacatttatctaaaggaaataaatcaactgtgaataaatgcatgtttaccaaaatggctgtttacagtgcatttagttctgatatttataaagatgacatttcacagaataactttaaaatagtttgaaattctatatagtttagacatcgatcacatctggagacaaaataaaatgtgcaatattttttatgtaggcgagctaacacagtgtacctaattgcagaattatctgattaatttgtaatagataagttgtataacattttcatatcttaaaatgttttttagatcaatcttgaagtgaaatattttcaaaataaaattctacaga

SEQ ID NO: 357631 - DNA, 3965 bp, Homo sapiens
gcatgcctctgtgaatgagtgcttggggtgtgtgtgttgagtgtgtggccttgtgtgtgcatatcagacggagtggctgacattgctgcagcatctgccagaacaatcacaactttggtggaccacccgataattttgcagtggggccagtgaaccagtttgactatcagcatggggctgcttttggtccaccgcaaggtggatttcatcctccttattggcaaccaggacctccaggacctccagcacctccccagaatcgaagagaaaggccatcatcattcagggatcgtcagcgttcacctattgcacttcctgtgaagcaggagcctccacaaattgacgcagtaaaacgcaggactcttcccgcttggattcgcgaaggtcttgaaaaaatggaacgtgaaaagcagaagaaattggagaaagaaagaatggaacaacaacgttcacaattgtccaaaaaagaaaaaaaggccacagaagatgctgaaggaggggatggccctcgtttacctcagagaagtaaatttgatagtgatgaggaagaagaagacactgaaaatgttgaggctgcaagtagtgggaaagtcaccagaagtccatccccagttcctcaagaagagcacagtgaccctgagatgactgaagaggagaaagagtatcaaatgatgttgctgacaaaaatgcttctaacagaaattctgctggatgtcacagatgaagaaatttattacgtagccaaagatgcacaccgcaaagcaacgaaagctcctgcaaaacagctggcacagtccagtgcactggcttccctcactggactcggtggactgggtggttatggatcaggagacagtgaagatgagaggagtgacagaggatctgagtcatctgacactgatgatgaagaattacggcatcgaatccggcaaaaacaggaagctttttggagaaaagaaaaagaacagcagctattacatgataaacagatggaagaagaaaagcagcaaacagaaagggttacaaaagagatgaatgaatttatccataaagagcaaaatagtttatcactactagaagcaagagaagcagacggtgatgtggttaatgaaaagaagagaactccaaatgaaaccacatcagttttagaaccaaaaaaagagcataaagaaaaagaaaaacaaggaaggagtaggtcgggaagttctagtagtggtagttccagtagcaatagcagaactagtagtactagtagtactgtctctagctcttcatacagttctagctcaggtagtagtcgtacttcttctcggtcttcttctcctaaaaggaaaaagagacacagtaggagtagatctccaacaatcaaagctagacgtagcaggagtagaagctattctcgcagaattaaaatagagagcaatagggctagggtaaagattagagatagaaggagatctaatagaaatagcattgaaagagaaagacgacgaaatcggagtccttcccgagagagacgtagaagtagaagtcgctcaagggatagacgaaccaatcgtgccagtcgcagtaggagtcgagataggcgtaaaattgatgatcaacgtggaaatcttagtgggaacagtcataagcataaaggtgaggctaaagaacaagagaggaaaaaggagaggagtcgaagtatagataaagataggaaaaagaaagacaaagaaagggaacgtgaacaggataaaagaaaagagaaacaaaaaagggaagaaaaagattttaagttcagtagtcaggatgatagattaaaaaggaaacgagaaagtgaaagaacattttctaggagtggttctatatctgttaaaatcataagacatgattctagacaggatagtaagaaaagtactaccaaagatagtaaaaaacattcaggctctgattctagtggaaggagcagttctgagtctccaggaagtagcaaagaaaagaaggctaagaagcctaaacatagtcgatcgcgatccgtggagaaatctcaaaggtctggtaagaaggcaagccgcaaacacaagtctaagtcccgatcaaggtagtatactttttaaagtattttgtctgatttttaaaaaaaattgactgaatttattcaaagttgaaagtgtcctttctctctctctttaataaactcagtttggtacttgataaataatcatagtcttaaatgttagaaatcctatataatattatttatttaaaattgcagatttttaatttaaaatacatttttatttttaaattttgtcttttcccttttttttcagatcaacaacccctccccgtcgtaaacgctgaggaatgatgtggcaagaatgccatgatgttctttaaaaaaattccatgagttttaagggcttgtctcattatagaggcacattgtggctgtgtaggtgaaaccagaatcttttttttttttaatctgtaaataggtgtactttttccaatgctgctccaagttacttaataggatttctttgtattacgtttttttcaaaaaatatagtgcataataagactataaacatgccattctctttcagctgtaatgttcttaaaattattcttgaatgtactgtgatgtcaataaagctctttagttcatttttgttaaactcttgcaccttaattttatggttttaatctaaggaacgtacttttataaaaaggcagctggaattttgtataacaggttttaaaggtaccttctctcacctcccccaaagaaaatggtttttacttaatagtttgtcaaagtttgtaaattgtacccatggacttttgccagattccaactttaagggtatgaaagagggctagaaatagacctttacttttcatttggaagtatttgacaactttctaaacttttcttcctattttggggattttcaagtaatatattctctgtgtgtataacgtgtggttcactcctgtaaaatgaaattgctggaatcaatcaagccagtgcaccagtagagttatttgtaaggaacgattgtgtttgacagtaatagtcaagtctggaactatattctacagtcacccacttctgttttagaagcattttgaaacactttttggggttatagaaataagactcatgattcaatatatttatttatatttttaaagtataatatgacctcaaatcaatggaggaatgctgtattatgcaggtttgtgtcaatttcatgacattaaaattgtctgattttgtccgtttcttaaaattatgattagtgagtggtctaacagtttaaggcattgataacttacaagtagaatggggctctcaaagcattttaactcagttgctttagggtccatttttttatgtaatcacttactcagtgataaatgaatctctgaaaacaaatgcttttacattttaatttaaaaagaaaacaggtgcaggccacagaaaagttttaaagtatgccttcttaccagcaatagttcattttaaaaatcatgccagatttttgccaagatcagtgtttcctcaacatgaagatagaaatagatttgtatagtgtgctcttgtacctctacatagattattatataattttgagcagttacacatttatctaaaggaaataaatcaactgtgaataaatgcatgtttaccaaaatggctgtttacagtgcatttagttctgatatttataaagatgacatttcacagaataactttaaaatagtttgaaattctatatagtttagacatcgatcacatctggagacaaaataaaatgtgcaatattttttatgtaggcgagctaacacagtgtacctaattgcagaattatctgattaatttgtaatagataagttgtataacattttcatatcttaaaatgttttttagatcaatcttgaagtgaaatattttcaaaataaaattctacaga

SEQ ID NO: 357632 - DNA, 3941 bp, Homo sapiens
cataatttagccatgatagtatctaagctcactttcagaattattgcatacatgccttagggaagaacctatccactaatgcttttaataacttacatagattgtgttgcggcaagtcaagttttaatatagaggaaagggtttatcttatcatagtaaaatagtagtgatgtgttcataatttactatttgcatggtatattatcaaggctgtaaaagcttgaatttgccttttccacatcttcatttcaaattaatttttgtgaggacccagagaagtgggtagaaccaaatgcccatgtggttttgttatggttatttagatcatttcagggtggggagtattttcagcaccataatatttctgtaccagggagattatagtattctaatttttttagggaaaaattgcttagctctagggatttctaaactttgaacaataaaagttaattttagaaatactttcagggtcatcattaagctttagcgtggctttgttactgccctgttaagtagttttgttggttagtatggacagtacagcaaacccattatgattcctttacagtgagaaaaatatgaaatagtccagaaagaataagatattaagtaacctttgcctgaaggttctgtgaactccttaagcgtttgaatatatacttctccccaccccgaataagcgtattcttctgggaaaaggcaatgaaaaaagaaatgaactttcttctcagaccttgaaaagtttttagtgcatagtataatttttttcatatgatagactgagctttatgcacacaggtggactgggtggttatggatcaggagacagtgaagatgagaggagtgacagaggatctgagtcatctgacactgatgatgaagaattacggcatcgaatccggcaaaaacaggaagctttttggagaaaagaaaaagaacagcagctattacatgataaacagatggaagaagaaaagcagcaaacagaaagggttacaaaagagatgaatgaatttatccataaagagcaaaatagtttatcactactagaagcaagagaagcagacggtgatgtggttaatgaaaagaagagaactccaaatgaaaccacatcagttttagaaccaaaaaaagagcataaagaaaaagaaaaacaaggaaggagtaggtcgggaagttctagtagtggtagttccagtagcaatagcagaactagtagtactagtagtactgtctctagctcttcatacagttctagctcaggtagtagtcgtacttcttctcggtcttcttctcctaaaaggaaaaagagacacagtaggagtagatctccaacaatcaaagctagacgtagcaggagtagaagctattctcgcagaattaaaatagagagcaatagggctagggtaaagattagagatagaaggagatctaatagaaatagcattgaaagagaaagacgacgaaatcggagtccttcccgagagagacgtagaagtagaagtcgctcaagggatagacgaaccaatcgtgccagtcgcagtaggagtcgagataggcgtaaaattgatgatcaacgtggaaatcttagtgggaacagtcataagcataaaggtgaggctaaagaacaagagaggaaaaaggagaggagtcgaagtatagataaagataggaaaaagaaagacaaagaaagggaacgtgaacaggataaaagaaaagagaaacaaaaaagggaagaaaaagattttaagttcagtagtcaggatgatagattaaaaaggaaacgagaaagtgaaagaacattttctaggagtggttctatatctgttaaaatcataagacatgattctagacaggatagtaagaaaagtactaccaaagatagtaaaaaacattcaggctctgattctagtggaaggagcagttctgagtctccaggaagtagcaaagaaaagaaggctaagaagcctaaacatagtcgatcgcgatccgtggagaaatctcaaaggtctggtaagaaggcaagccgcaaacacaagtctaagtcccgatcaaggtagtatactttttaaagtattttgtctgatttttaaaaaaaattgactgaatttattcaaagttgaaagtgtcctttctctctctctttaataaactcagtttggtacttgataaataatcatagtcttaaatgttagaaatcctatataatattatttatttaaaattgcagatttttaatttaaaatacatttttatttttaaattttgtcttttcccttttttttcagatcaacaacccctccccgtcgtaaacgctgaggaatgatgtggcaagaatgccatgatgttctttaaaaaaattccatgagttttaagggcttgtctcattatagaggcacattgtggctgtgtaggtgaaaccagaatcttttttttttttaatctgtaaataggtgtactttttccaatgctgctccaagttacttaataggatttctttgtattacgtttttttcaaaaaatatagtgcataataagactataaacatgccattctctttcagctgtaatgttcttaaaattattcttgaatgtactgtgatgtcaataaagctctttagttcatttttgttaaactcttgcaccttaattttatggttttaatctaaggaacgtacttttataaaaaggcagctggaattttgtataacaggttttaaaggtaccttctctcacctcccccaaagaaaatggtttttacttaatagtttgtcaaagtttgtaaattgtacccatggacttttgccagattccaactttaagggtatgaaagagggctagaaatagacctttacttttcatttggaagtatttgacaactttctaaacttttcttcctattttggggattttcaagtaatatattctctgtgtgtataacgtgtggttcactcctgtaaaatgaaattgctggaatcaatcaagccagtgcaccagtagagttatttgtaaggaacgattgtgtttgacagtaatagtcaagtctggaactatattctacagtcacccacttctgttttagaagcattttgaaacactttttggggttatagaaataagactcatgattcaatatatttatttatatttttaaagtataatatgacctcaaatcaatggaggaatgctgtattatgcaggtttgtgtcaatttcatgacattaaaattgtctgattttgtccgtttcttaaaattatgattagtgagtggtctaacagtttaaggcattgataacttacaagtagaatggggctctcaaagcattttaactcagttgctttagggtccatttttttatgtaatcacttactcagtgataaatgaatctctgaaaacaaatgcttttacattttaatttaaaaagaaaacaggtgcaggccacagaaaagttttaaagtatgccttcttaccagcaatagttcattttaaaaatcatgccagatttttgccaagatcagtgtttcctcaacatgaagatagaaatagatttgtatagtgtgctcttgtacctctacatagattattatataattttgagcagttacacatttatctaaaggaaataaatcaactgtgaataaatgcatgtttaccaaaatggctgtttacagtgcatttagttctgatatttataaagatgacatttcacagaataactttaaaatagtttgaaattctatatagtttagacatcgatcacatctggagacaaaataaaatgtgcaatattttttatgtaggcgagctaacacagtgtacctaattgcagaattatctgattaatttgtaatagataagttgtataacattttcatatcttaaaatgttttttagatcaatcttgaagtgaaatattttcaaaataaaattctacaga

SEQ ID NO: 357633 - DNA, 3344 bp, Homo sapiens
aattcgcggccgcgtcgacagaagacgacagaagggaagagtatcaaatgatgttgctgacaaaaatgcttctaacagaaattctgctggatgtcacagatgaagaaatttattacgtagccaaagatgcacaccgcaaagcaacgaaagctcctgcaaaacagctggcacagtccagtgcactggcttccctcactggactcggtggactgggtggttatggatcaggagacagtgaagatgagaggagtgacagaggatctgagtcatctgacactgatgatgaagaattacggcatcgaatccggcaaaaacaggaagctttttggagaaaagaaaaagaacagcagctattacatgataaacagatggaagaagaaaagcagcaaacagaaagggttacaaaagagatgaatgaatttatccataaagagcaaaatagtttatcactactagaagcaagagaagcagacggtgatgtggttaatgaaaagaagagaactccaaatgaaaccacatcagttttagaaccaaaaaaagagcataaagaaaaagaaaaacaaggaaggagtaggtcgggaagttctagtagtggtagttccagtagcaatagcagaactagtagtactagtagtactgtctctagctcttcatacagttctagctcaggtagtagtcgtacttcttctcggtcttcttctcctaaaaggaaaaagagacacagtaggagtagatctccaacaatcaaagctagacgtagcaggagtagaagctattctcgcagaattaaaatagagagcaatagggctagggtaaagattagagatagaaggagatctaatagaaatagcattgaaagagaaagacgacgaaatcggagtccttcccgagagagacgtagaagtagaagtcgctcaagggatagacgaaccaatcgtgccagtcgcagtaggagtcgagataggcgtaaaattgatgatcaacgtggaaatcttagtgggaacagtcataagcataaaggtgaggctaaagaacaagagaggaaaaaggagaggagtcgaagtatagataaagataggaaaaagaaagacaaagaaagggaacgtgaacaggataaaagaaaagagaaacaaaaaagggaagaaaaagattttaagttcagtagtcaggatgatagattaaaaaggaaacgagaaagtgaaagaacattttctaggagtggttctatatctgttaaaatcataagacatgattctagacaggatagtaagaaaagtactaccaaagatagtaaaaaacattcaggctctgattctagtggaaggagcagttctgagtctccaggaagtagcaaagaaaagaaggctaagaagcctaaacatagtcgatcgcgatccgtggagaaatctcaaaggtctggtaagaaggcaagccgcaaacacaagtctaagtcccgatcaaggtagtatactttttaaagtattttgtctgatttttaaaaaaaattgactgaatttattcaaagttgaaagtgtcctttctctctctctttaataaactcagtttggtacttgataaataatcatagtcttaaatgttagaaatcctatataatattatttatttaaaattgcagatttttaatttaaaatacatttttatttttaaattttgtcttttcccttttttttcagatcaacaacccctccccgtcgtaaacgctgaggaatgatgtggcaagaatgccatgatgttctttaaaaaaattccatgagttttaagggcttgtctcattatagaggcacattgtggctgtgtaggtgaaaccagaatcttttttttttttaatctgtaaataggtgtactttttccaatgctgctccaagttacttaataggatttctttgtattacgtttttttcaaaaaatatagtgcataataagactataaacatgccattctctttcagctgtaatgttcttaaaattattcttgaatgtactgtgatgtcaataaagctctttagttcatttttgttaaactcttgcaccttaattttatggttttaatctaaggaacgtacttttataaaaaggcagctggaattttgtataacaggttttaaaggtaccttctctcacctcccccaaagaaaatggtttttacttaatagtttgtcaaagtttgtaaattgtacccatggacttttgccagattccaactttaagggtatgaaagagggctagaaatagacctttacttttcatttggaagtatttgacaactttctaaacttttcttcctattttggggattttcaagtaatatattctctgtgtgtataacgtgtggttcactcctgtaaaatgaaattgctggaatcaatcaagccagtgcaccagtagagttatttgtaaggaacgattgtgtttgacagtaatagtcaagtctggaactatattctacagtcacccacttctgttttagaagcattttgaaacactttttggggttatagaaataagactcatgattcaatatatttatttatatttttaaagtataatatgacctcaaatcaatggaggaatgctgtattatgcaggtttgtgtcaatttcatgacattaaaattgtctgattttgtccgtttcttaaaattatgattagtgagtggtctaacagtttaaggcattgataacttacaagtagaatggggctctcaaagcattttaactcagttgctttagggtccatttttttatgtaatcacttactcagtgataaatgaatctctgaaaacaaatgcttttacattttaatttaaaaagaaaacaggtgcaggccacagaaaagttttaaagtatgccttcttaccagcaatagttcattttaaaaatcatgccagatttttgccaagatcagtgtttcctcaacatgaagatagaaatagatttgtatagtgtgctcttgtacctctacatagattattatataattttgagcagttacacatttatctaaaggaaataaatcaactgtgaataaatgcatgtttaccaaaatggctgtttacagtgcatttagttctgatatttataaagatgacatttcacagaataactttaaaatagtttgaaattctatatagtttagacatcgatcacatctggagacaaaataaaatgtgcaatattttttatgtaggcgagctaacacagtgtacctaattgcagaattatctgattaatttgtaatagataagttgtataacattttcatatcttaaaatgttttttagatcaatcttgaagtgaaatattttcaaaataaaattctacaga

SEQ ID NO: 357634 - DNA, 1402 bp, Homo sapiens
ggcgggagtgtttctaggagggaacatacttccccttaaaggaagatcacgttgctaaagtaaaaaatttgaaggcgccctatgtgtagaacacttacgttcttggctttctggccactataaagatgggtcgggaatggcgccagctacgttaaaaagtaacgtgcaggaatggttcagttgcccggtgttgaccagagtagagatggttttgcccacaaaaaaaatggcgccgaaacatgtcaatccgcacaatcacgtgttcacaaacctggatgagagatggtatggcttcagatgacaaacggatgttattattctttacttccgggtgagacaaatcgggcgccatcttgtcttgttcccgaagaagtagaagcatcgaaagcgttggagaggtgttaccggaacggcggcgacaagggtgttcccgaactagagtggggcatacataatcttgctgctatgcttcgaagctgtagtctgaatcaacctaagttttaaacagaaggtgaacctctgagatagaaaatcaagtatattttaaaagaagggatgtgggatcaaggaggacagccttggcagcagtggcccttgaaccagcaacaatggatgcagtcattccagcaccaacaggatccaagccagattgattgggctgcattggcccaagcttggattgcccaaagagaagcttcaggacagcaaagcatggtagaacaaccaccaggaatgatgccaaatggacaagatatgtctacaatggaatctggtccaaacaatcatgggaatttccaaggggattcaaacttcaacagaatgtggcaaccagaatggggaatgcatcagcaacccccacacccccctccagatcagccatggatgccaccaacaccaggcccaatggacattgttcctccttctgaagacagcaacagtcaggacagtggggaatttgcccctgacaacaggcatatatttaaccagaacaatcacaactttggtggaccacccgataattttgcagtggggccagtgaaccagtttgactatcagcatggggctgcttttggtccaccgcaaggtggatttcatcctccttattggcaaccaggacctccaggacctccagcacctccccagaatcgaagagaaaggccatcatcattcagggatcgtcagcgttcacctattgcacttcctgtgaagcaggagcctccacaaattgacgcagtaaaacgcaggactcttcccgcttggattcgcgaaggtcttgaaaaaatggaacgtgaaaagcagaagaaattggaggtcctggaggtcctggttgccaataaggaggatgaaatccaccttgcggtggaccaaaagcagccccatgctgaaagagtattgcagttta

SEQ ID NO: 357635 - DNA, 1593 bp, Homo sapiens
ggcgggagtgtttctaggagggaacatacttccccttaaaggaagatcacgttgctaaagtaaaaaatttgaaggcgccctatgtgtagaacacttacgttcttggctttctggccactataaagatgggtcgggaatggcgccagctacgttaaaaagtaacgtgcaggaatggttcagttgcccggtgttgaccagagtagagatggttttgcccacaaaaaaaatggcgccgaaacatgtcaatccgcacaatcacgtgttcacaaacctggatgagagatggtatggcttcagatgacaaacggatgttattattctttacttccgggtgagacaaatcgggcgccatcttgtcttgttcccgaagaagtagaagcatcgaaagcgttggagaggtgttaccggaacggcggcgacaagggtgttcccgaactagagtggggcatacataatcttgctgctatgcttcgaagctgtagtctgaatcaacctaagttttaaacagaaggtgaacctctgagatagaaaatcaagtatattttaaaagaagggatgtgggatcaaggaggacagccttggcagcagtggcccttgaaccagcaacaatggatgcagtcattccagcaccaacaggatccaagccagattgattgggctgcattggcccaagcttggattgcccaaagagaagcttcaggacagcaaagcatggtagaacaaccaccaggaatgatgccaaatggacaagatatgtctacaatggaatctggtccaaacaatcatgggaatttccaaggggattcaaacttcaacagaatgtggcaaccaggtttgttgtttatgttttcacaattttaagacttttaaaaaacagaatgaagattattattaaattttttaatttgcttagttgtatgacttctggaaattaatgcttcttaaagaataggcagttttcaatttgatttgactttgacattttgtggttaaaattattctgtactcattctgctagctttgtggcactcagtttgattcttttcttggttcttcattcctaggctgacaggggctgggaacactctggaaacctcacttggcatctagggaagagagcattctttgtctctctattgcaacctctggccttttcagaagcagcactggcagagtaaaacatgtctagcctctaattaaagaaaaattgtgtcactgtgtgacaaattagtctgtcaaatatactctgcccctaccatccgcctacctttttcttccctttttttttttcagatagtgaagatctttcataagtttttgtgtgttttacttttttgtttgttttatttcacagtatgatgtagatttcttgatgctaattcagtcttccatggcttgtgttattcctttttaatagtcacttgaaactatggaggaatcagcctctcatttgggtatgctgatggtgaagtcataacctcctttccctattaatactttttgtttctccttataagaatggagacctcagtcgagaccagcctgggcaacatagcaaggccctgtctctacaaaaaaaaaaaaaaaaaacct

SEQ ID NO: 357636 - DNA, 1361 bp, Homo sapiens
ggcgggagtgtttctaggagggaacatacttccccttaaaggaagatcacgttgctaaagtaaaaaatttgaaggcgccctatgtgtagaacacttacgttcttggctttctggccactataaagatgggtcgggaatggcgccagctacgttaaaaagtaacgtgcaggaatggttcagttgcccggtgttgaccagagtagagatggttttgcccacaaaaaaaatggcgccgaaacatgtcaatccgcacaatcacgtgttcacaaacctggatgagagatggtatggcttcagatgacaaacggatgttattattctttacttccgggtgagacaaatcgggcgccatcttgtcttgttcccgaagaagtagaagcatcgaaagcgttggagaggtgttaccggaacggcggcgacaagggtgttcccgaactagagtggggcatacataatcttgctgctatgcttcgaagctgtagtctgaatcaacctaagttttaaacagaaggtgaacctctgagatagaaaatcaagtatattttaaaagaagggatgtgggatcaaggaggacagccttggcagcagtggcccttgaaccagcaacaatggatgcagtcattccagcaccaacaggatccaagccagattgattgggctgcattggcccaagcttggattgcccaaagagaagcttcaggacagcaaagcatggtagaacaaccaccaggaatgatgccaaatggacaagatatgtctacaatggaatctggtccaaacaatcatgggaatttccaaggggattcaaacttcaacagaatgtggcaaccaggctgacaggggctgggaacactctggaaacctcacttggcatctagggaagagagcattctttgtctctctattgcaacctctggccttttcagaagcagcactggcagagtaaaacatgtctagcctctaattaaagaaaaattgtgtcactgtgtgacaaattagtctgtcaaatatactctgcccctaccatccgcctacctttttcttccctttttttttttcagatagtgaagatctttcataagtttttgtgtgttttacttttttgtttgttttatttcacagtatgatgtagatttcttgatgctaattcagtcttccatggcttgtgttattcctttttaatagtcacttgaaactatggaggaatcagcctctcatttgggtatgctgatggtgaagtcataacctcctttccctattaatactttttgtttctccttataagaatggagacctcagtcgagaccagcctgggcaacatagcaaggccctgtctctacaaaaaaaaaaaaaaaaaacct

SEQ ID NO: 357637 - DNA, 1281 bp, Homo sapiens
ggcgggagtgtttctaggagggaacatacttccccttaaaggaagatcacgttgctaaagtaaaaaatttgaaggcgccctatgtgtagaacacttacgttcttggctttctggccactataaagatgggtcgggaatggcgccagctacgttaaaaagtaacgtgcaggaatggttcagttgcccggtgttgaccagagtagagatggttttgcccacaaaaaaaatggcgccgaaacatgtcaatccgcacaatcacgtgttcacaaacctggatgagagatggtatggcttcagatgacaaacggatgttattattctttacttccgggtgagacaaatcgggcgccatcttgtcttgttcccgaagaagtagaagcatcgaaagcgttggagaggtgttaccggaacggcggcgacaagggtgttcccgaactagagtggatagaaaatcaagtatattttaaaagaagggatgtgggatcaaggaggacagccttggcagcagtggcccttgaaccagcaacaatggatgcagtcattccagcaccaacaggatccaagccagattgattgggctgcattggcccaagcttggattgcccaaagagaagcttcaggacagcaaagcatggtagaacaaccaccaggaatgatgccaaatggacaagatatgtctacaatggaatctggtccaaacaatcatgggaatttccaaggggattcaaacttcaacagaatgtggcaaccaggctgacaggggctgggaacactctggaaacctcacttggcatctagggaagagagcattctttgtctctctattgcaacctctggccttttcagaagcagcactggcagagtaaaacatgtctagcctctaattaaagaaaaattgtgtcactgtgtgacaaattagtctgtcaaatatactctgcccctaccatccgcctacctttttcttccctttttttttttcagatagtgaagatctttcataagtttttgtgtgttttacttttttgtttgttttatttcacagtatgatgtagatttcttgatgctaattcagtcttccatggcttgtgttattcctttttaatagtcacttgaaactatggaggaatcagcctctcatttgggtatgctgatggtgaagtcataacctcctttccctattaatactttttgtttctccttataagaatggagacctcagtcgagaccagcctgggcaacatagcaaggccctgtctctacaaaaaaaaaaaaaaaaaacct

SEQ ID NO: 357638 - DNA, 485 bp, Homo sapiens
  misc_feature (469)..(469): n is a, c, g, or t
taggagaagatgtacgaggccgtcccccgtttttaatttcagtacatcgtgactgcgcttaagttcgtaattacatggtccctcggcttacaatttaccaaaggtgtcccgaactaatggcatacataatcttgctgctatgcttcgaagctgtagtctgaatcaacctaagttttaaacagaaggtgaacctctgagaaaatccagttcttagaggaaaagataaaagctaacagtaagatgtcagctgtggatttatcatatatggccattattatgttgaggtactttccttctgcacctaatttattgagagtttttatcacgaagggatgttgaatattatcaaatgattttcctgtcctttaaactcttgaaataatggttagaaatgtcatcctttttttttttttgttctagagacagagcgagacctccccccaaaaaaaaataattaaaggaaggaagnaaagttacccttaccc

SEQ ID NO: 357639 - DNA, 5571 bp, Homo sapiens
  misc_feature (2159)..(2159): n is a, c, g, or t
ggcgggagtgtttctaggagggaacatacttccccttaaaggaagatcacgttgctaaagtaaaaaatttgaaggcgccctatgtgtagaacacttacgttcttggctttctggccactataaagatgggtcgggaatggcgccagctacgttaaaaagtaacgtgcaggaatggttcagttgcccggtgttgaccagagtagagatggttttgcccacaaaaaaaatggcgccgaaacatgtcaatccgcacaatcacgtgttcacaaacctggatgagagatggtatggcttcagatgacaaacggatgttattattctttacttccgggtgagacaaatcgggcgccatcttgtcttgttcccgaagaagtagaagcatcgaaagcgttggagaggtgttaccggaacggcggcgacaagggtgttcccgaactagagtggggcatacataatcttgctgctatgcttcgaagctgtagtctgaatcaacctaagttttaaacagaaggtgaacctctgagatagaaaatcaagtatattttaaaagaagggatgtgggatcaaggaggacagccttggcagcagtggcccttgaaccagcaacaatggatgcagtcattccagcaccaacaggatccaagccagattgattgggctgcattggcccaagcttggattgcccaaagagaagcttcaggacagcaaagcatggtagaacaaccaccaggaatgatgccaaatggacaagatatgtctacaatggaatctggtccaaacaatcatgggaatttccaaggggattcaaacttcaacagaatgtggcaaccagaatggggaatgcatcagcaacccccacacccccctccagatcagccatggatgccaccaacaccaggcccaatggacattgttcctccttctgaagacagcaacagtcaggacagtggggaatttgcccctgacaacaggcatatatttaaccagaacaatcacaactttggtggaccacccgataattttgcagtggggccagtgaaccagtttgactatcagcatggggctgcttttggtccaccgcaaggtggatttcatcctccttattggcaaccaggacctccaggacctccagcacctccccagaatcgaagagaaaggccatcatcattcagggatcgtcagcgttcacctattgcacttcctgtgaagcaggagcctccacaaattgacgcagtaaaacgcaggactcttcccgcttggattcgcgaaggtcttgaaaaaatggaacgtgaaaagcagaagaaattggagaaagaaagaatggaacaacaacgttcacaattgtccaaaaaagaaaaaaaggccacagaagatgctgaaggaggggatggccctcgtttacctcagagaagtaaatttgatagtgatgaggaagaagaagacactgaaaatgttgaggctgcaagtagtgggaaagtcaccagaagtccatccccagttcctcaagaagagcacagtgaccctgagatgactgaagaggagaaagagtatcaaatgatgttgctgacaaaaatgcttctaacagaaattctgctggatgtcacagatgaagaaatttattacgtagccaaagatgcacaccgcaaagcaacgaaaggtatattttggtgtttctggttttgcttttcctggggtattttggttctgatgactattttggcctttttttgttgtccttgttggatttctaccagatatttgaatattctcttgcatgttttaactcttaaagattagattcgtagacaccatattaaagctatacaaatatttttgttttatctgacctacatgagtacaaattagcaatcatgctgttttcctctaaaatgtattgtggaaaattccaggtgttcagtttatttcacctgattttttttaatagataacatggcattgttgtgtgacttctgatacagtttattttgactaatgaattttgaattatctacctacaatttttagtttaccacttatctcttacagaagcaagtgatttcctacccctagatttttagtaacaccttaaaaatgtattgaaaacaaaaattaagttacatgtcataatctcagaagtagacatacagatatacctgtcnacattttttctcattataaaccaatttcagctcacatcagagttataatttcaaagccagacatgatactggtttaaaatgaatgttatgtttttaatgtttcttctctccccaaaaagcagcaatagtagtagatttaacaataccatagactcatgactatgaaatcgtggctatttgtgttaacatgttgttcctgttgttgatgtgatacaaagctcctgcaaaacagctggcacagtccagtgcactggcttccctcactggactcggtggactgggtggttatggatcaggagacagtgaagatgagaggagtgacagaggatctgagtcatctgacactgatgatgaagaattacggcatcgaatccggcaaaaacaggaagctttttggagaaaagaaaaagaacagcagctattacatgataaacagatggaagaagaaaagcagcaaacagaaagggttacaaaagagatgaatgaatttatccataaagagcaaaatagtttatcactactagaagcaagagaagcagacggtgatgtggttaatgaaaagaagagaactccaaatgaaaccacatcagttttagaaccaaaaaaagagcataaagaaaaagaaaaacaaggaaggagtaggtcgggaagttctagtagtggtagttccagtagcaatagcagaactagtagtactagtagtactgtctctagctcttcatacagttctagctcaggtagtagtcgtacttcttctcggtcttcttctcctaaaaggaaaaagagacacagtaggagtagatctccaacaatcaaagctagacgtagcaggagtagaagctattctcgcagaattaaaatagagagcaatagggctagggtaaagattagagatagaaggagatctaatagaaatagcattgaaagagaaagacgacgaaatcggagtccttcccgagagagacgtagaagtagaagtcgctcaagggatagacgaaccaatcgtgccagtcgcagtaggagtcgagataggcgtaaaattgatgatcaacgtggaaatcttagtgggaacagtcataagcataaaggtgaggctaaagaacaagagaggaaaaaggagaggagtcgaagtatagataaagataggaaaaagaaagacaaagaaagggaacgtgaacaggataaaagaaaagagaaacaaaaaagggaagaaaaagattttaagttcagtagtcaggatgatagattaaaaaggaaacgagaaagtgaaagaacattttctaggagtggttctatatctgttaaaatcataagacatgattctagacaggatagtaagaaaagtactaccaaagatagtaaaaaacattcaggctctgattctagtggaaggagcagttctgagtctccaggaagtagcaaagaaaagaaggctaagaagcctaaacatagtcgatcgcgatccgtggagaaatctcaaaggtctggtaagaaggcaagccgcaaacacaagtctaagtcccgatcaaggtagtatactttttaaagtattttgtctgatttttaaaaaaaattgactgaatttattcaaagttgaaagtgtcctttctctctctctttaataaactcagtttggtacttgataaataatcatagtcttaaatgttagaaatcctatataatattatttatttaaaattgcagatttttaatttaaaatacatttttatttttaaattttgtcttttcccttttttttcagatcaacaacccctccccgtcgtaaacgctgaggaatgatgtggcaagaatgccatgatgttctttaaaaaaattccatgagttttaagggcttgtctcattatagaggcacattgtggctgtgtaggtgaaaccagaatcttttttttttttaatctgtaaataggtgtactttttccaatgctgctccaagttacttaataggatttctttgtattacgtttttttcaaaaaatatagtgcataataagactataaacatgccattctctttcagctgtaatgttcttaaaattattcttgaatgtactgtgatgtcaataaagctctttagttcatttttgttaaactcttgcaccttaattttatggttttaatctaaggaacgtacttttataaaaaggcagctggaattttgtataacaggttttaaaggtaccttctctcacctcccccaaagaaaatggtttttacttaatagtttgtcaaagtttgtaaattgtacccatggacttttgccagattccaactttaagggtatgaaagagggctagaaatagacctttacttttcatttggaagtatttgacaactttctaaacttttcttcctattttggggattttcaagtaatatattctctgtgtgtataacgtgtggttcactcctgtaaaatgaaattgctggaatcaatcaagccagtgcaccagtagagttatttgtaaggaacgattgtgtttgacagtaatagtcaagtctggaactatattctacagtcacccacttctgttttagaagcattttgaaacactttttggggttatagaaataagactcatgattcaatatatttatttatatttttaaagtataatatgacctcaaatcaatggaggaatgctgtattatgcaggtttgtgtcaatttcatgacattaaaattgtctgattttgtccgtttcttaaaattatgattagtgagtggtctaacagtttaaggcattgataacttacaagtagaatggggctctcaaagcattttaactcagttgctttagggtccatttttttatgtaatcacttactcagtgataaatgaatctctgaaaacaaatgcttttacattttaatttaaaaagaaaacaggtgcaggccacagaaaagttttaaagtatgccttcttaccagcaatagttcattttaaaaatcatgccagatttttgccaagatcagtgtttcctcaacatgaagatagaaatagatttgtatagtgtgctcttgtacctctacatagattattatataattttgagcagttacacatttatctaaaggaaataaatcaactgtgaataaatgcatgtttaccaaaatggctgtttacagtgcatttagttctgatatttataaagatgacatttcacagaataactttaaaatagtttgaaattctatatagtttagacatcgatcacatctggagacaaaataaaatgtgcaatattttttatgtaggcgagctaacacagtgtacctaattgcagaattatctgattaatttgtaatagataagttgtataacattttcatatcttaaaatgttttttagatcaatcttgaagtgaaatattttcaaaataaaattctacaga

SEQ ID NO: 357640 - DNA, 4797 bp, Homo sapiens
ggcgggagtgtttctaggagggaacatacttccccttaaaggaagatcacgttgctaaagtaaaaaatttgaaggcgccctatgtgtagaacacttacgttcttggctttctggccactataaagatgggtcgggaatggcgccagctacgttaaaaagtaacgtgcaggaatggttcagttgcccggtgttgaccagagtagagatggttttgcccacaaaaaaaatggcgccgaaacatgtcaatccgcacaatcacgtgttcacaaacctggatgagagatggtatggcttcagatgacaaacggatgttattattctttacttccgggtgagacaaatcgggcgccatcttgtcttgttcccgaagaagtagaagcatcgaaagcgttggagaggtgttaccggaacggcggcgacaagggtgttcccgaactagagtggggcatacataatcttgctgctatgcttcgaagctgtagtctgaatcaacctaagttttaaacagaaggtgaacctctgagatagaaaatcaagtatattttaaaagaagggatgtgggatcaaggaggacagccttggcagcagtggcccttgaaccagcaacaatggatgcagtcattccagcaccaacaggatccaagccagattgattgggctgcattggcccaagcttggattgcccaaagagaagcttcaggacagcaaagcatggtagaacaaccaccaggaatgatgccaaatggacaagatatgtctacaatggaatctggtccaaacaatcatgggaatttccaaggggattcaaacttcaacagaatgtggcaaccagaatggggaatgcatcagcaacccccacacccccctccagatcagccatggatgccaccaacaccaggcccaatggacattgttcctccttctgaagacagcaacagtcaggacagtggggaatttgcccctgacaacaggcatatatttaaccagaacaatcacaactttggtggaccacccgataattttgcagtggggccagtgaaccagtttgactatcagcatggggctgcttttggtccaccgcaaggtggatttcatcctccttattggcaaccaggacctccaggacctccagcacctccccagaatcgaagagaaaggccatcatcattcagggatcgtcagcgttcacctattgcacttcctgtgaagcaggagcctccacaaattgacgcagtaaaacgcaggactcttcccgcttggattcgcgaaggtcttgaaaaaatggaacgtgaaaagcagaagaaattggagaaagaaagaatggaacaacaacgttcacaattgtccaaaaaagaaaaaaaggccacagaagatgctgaaggaggggatggccctcgtttacctcagagaagtaaatttgatagtgatgaggaagaagaagacactgaaaatgttgaggctgcaagtagtgggaaagtcaccagaagtccatccccagttcctcaagaagagcacagtgaccctgagatgactgaagaggagaaagagtatcaaatgatgttgctgacaaaaatgcttctaacagaaattctgctggatgtcacagatgaagaaatttattacgtagccaaagatgcacaccgcaaagcaacgaaaggtggactgggtggttatggatcaggagacagtgaagatgagaggagtgacagaggatctgagtcatctgacactgatgatgaagaattacggcatcgaatccggcaaaaacaggaagctttttggagaaaagaaaaagaacagcagctattacatgataaacagatggaagaagaaaagcagcaaacagaaagggttacaaaagagatgaatgaatttatccataaagagcaaaatagtttatcactactagaagcaagagaagcagacggtgatgtggttaatgaaaagaagagaactccaaatgaaaccacatcagttttagaaccaaaaaaagagcataaagaaaaagaaaaacaaggaaggagtaggtcgggaagttctagtagtggtagttccagtagcaatagcagaactagtagtactagtagtactgtctctagctcttcatacagttctagctcaggtagtagtcgtacttcttctcggtcttcttctcctaaaaggaaaaagagacacagtaggagtagatctccaacaatcaaagctagacgtagcaggagtagaagctattctcgcagaattaaaatagagagcaatagggctagggtaaagattagagatagaaggagatctaatagaaatagcattgaaagagaaagacgacgaaatcggagtccttcccgagagagacgtagaagtagaagtcgctcaagggatagacgaaccaatcgtgccagtcgcagtaggagtcgagataggcgtaaaattgatgatcaacgtggaaatcttagtgggaacagtcataagcataaaggtgaggctaaagaacaagagaggaaaaaggagaggagtcgaagtatagataaagataggaaaaagaaagacaaagaaagggaacgtgaacaggataaaagaaaagagaaacaaaaaagggaagaaaaagattttaagttcagtagtcaggatgatagattaaaaaggaaacgagaaagtgaaagaacattttctaggagtggttctatatctgttaaaatcataagacatgattctagacaggatagtaagaaaagtactaccaaagatagtaaaaaacattcaggctctgattctagtggaaggagcagttctgagtctccaggaagtagcaaagaaaagaaggctaagaagcctaaacatagtcgatcgcgatccgtggagaaatctcaaaggtctggtaagaaggcaagccgcaaacacaagtctaagtcccgatcaaggtagtatactttttaaagtattttgtctgatttttaaaaaaaattgactgaatttattcaaagttgaaagtgtcctttctctctctctttaataaactcagtttggtacttgataaataatcatagtcttaaatgttagaaatcctatataatattatttatttaaaattgcagatttttaatttaaaatacatttttatttttaaattttgtcttttcccttttttttcagatcaacaacccctccccgtcgtaaacgctgaggaatgatgtggcaagaatgccatgatgttctttaaaaaaattccatgagttttaagggcttgtctcattatagaggcacattgtggctgtgtaggtgaaaccagaatcttttttttttttaatctgtaaataggtgtactttttccaatgctgctccaagttacttaataggatttctttgtattacgtttttttcaaaaaatatagtgcataataagactataaacatgccattctctttcagctgtaatgttcttaaaattattcttgaatgtactgtgatgtcaataaagctctttagttcatttttgttaaactcttgcaccttaattttatggttttaatctaaggaacgtacttttataaaaaggcagctggaattttgtataacaggttttaaaggtaccttctctcacctcccccaaagaaaatggtttttacttaatagtttgtcaaagtttgtaaattgtacccatggacttttgccagattccaactttaagggtatgaaagagggctagaaatagacctttacttttcatttggaagtatttgacaactttctaaacttttcttcctattttggggattttcaagtaatatattctctgtgtgtataacgtgtggttcactcctgtaaaatgaaattgctggaatcaatcaagccagtgcaccagtagagttatttgtaaggaacgattgtgtttgacagtaatagtcaagtctggaactatattctacagtcacccacttctgttttagaagcattttgaaacactttttggggttatagaaataagactcatgattcaatatatttatttatatttttaaagtataatatgacctcaaatcaatggaggaatgctgtattatgcaggtttgtgtcaatttcatgacattaaaattgtctgattttgtccgtttcttaaaattatgattagtgagtggtctaacagtttaaggcattgataacttacaagtagaatggggctctcaaagcattttaactcagttgctttagggtccatttttttatgtaatcacttactcagtgataaatgaatctctgaaaacaaatgcttttacattttaatttaaaaagaaaacaggtgcaggccacagaaaagttttaaagtatgccttcttaccagcaatagttcattttaaaaatcatgccagatttttgccaagatcagtgtttcctcaacatgaagatagaaatagatttgtatagtgtgctcttgtacctctacatagattattatataattttgagcagttacacatttatctaaaggaaataaatcaactgtgaataaatgcatgtttaccaaaatggctgtttacagtgcatttagttctgatatttataaagatgacatttcacagaataactttaaaatagtttgaaattctatatagtttagacatcgatcacatctggagacaaaataaaatgtgcaatattttttatgtaggcgagctaacacagtgtacctaattgcagaattatctgattaatttgtaatagataagttgtataacattttcatatcttaaaatgttttttagatcaatcttgaagtgaaatattttcaaaataaaattctacaga

SEQ ID NO: 357641 - DNA, 4797 bp, Homo sapiens
ggcgggagtgtttctaggagggaacatacttccccttaaaggaagatcacgttgctaaagtaaaaaatttgaaggcgccctatgtgtagaacacttacgttcttggctttctggccactataaagatgggtcgggaatggcgccagctacgttaaaaagtaacgtgcaggaatggttcagttgcccggtgttgaccagagtagagatggttttgcccacaaaaaaaatggcgccgaaacatgtcaatccgcacaatcacgtgttcacaaacctggatgagagatggtatggcttcagatgacaaacggatgttattattctttacttccgggtgagacaaatcgggcgccatcttgtcttgttcccgaagaagtagaagcatcgaaagcgttggagaggtgttaccggaacggcggcgacaagggtgttcccgaactagagtggggcatacataatcttgctgctatgcttcgaagctgtagtctgaatcaacctaagttttaaacagaaggtgaacctctgagatagaaaatcaagtatattttaaaagaagggatgtgggatcaaggaggacagccttggcagcagtggcccttgaaccagcaacaatggatgcagtcattccagcaccaacaggatccaagccagattgattgggctgcattggcccaagcttggattgcccaaagagaagcttcaggacagcaaagcatggtagaacaaccaccaggaatgatgccaaatggacaagatatgtctacaatggaatctggtccaaacaatcatgggaatttccaaggggattcaaacttcaacagaatgtggcaaccagaatggggaatgcatcagcaacccccacacccccctccagatcagccatggatgccaccaacaccaggcccaatggacattgttcctccttctgaagacagcaacagtcaggacagtggggaatttgcccctgacaacaggcatatatttaaccagaacaatcacaactttggtggaccacccgataattttgcagtggggccagtgaaccagtttgactatcagcatggggctgcttttggtccaccgcaaggtggatttcatcctccttattggcaaccaggacctccaggacctccagcacctccccagaatcgaagagaaaggccatcatcattcagggatcgtcagcgttcacctattgcacttcctgtgaagcaggagcctccacaaattgacgcagtaaaacgcaggactcttcccgcttggattcgcgaaggtcttgaaaaaatggaacgtgaaaagcagaagaaattggagaaagaaagaatggaacaacaacgttcacaattgtccaaaaaagaaaaaaaggccacagaagatgctgaaggaggggatggccctcgtttacctcagagaagtaaatttgatagtgatgaggaagaagaagacactgaaaatgttgaggctgcaagtagtgggaaagtcaccagaagtccatccccagttcctcaagaagagcacagtgaccctgagatgactgaagaggagaaagagtatcaaatgatgttgctgacaaaaatgcttctaacagaaattctgctggatgtcacagatgaagaaatttattacgtagccaaagatgcacaccgcaaagcaacgaaagctcctgcaaaacagctggcacagtccagtgcactggcttccctcactggactcggtggactgggtggttatggatcaggagacagtgaagatgagaggagtgacagaggatctgagtcatctgacactgatgatgaagaattacggcatcgaatccggcaaaaacaggaagctttttggagaaaagaaaaagaacagcagctattacatgataaacagatggaagaagaaaagcagcaaacagaaagggttacaaaagagatgaatgaatttatccataaagagcaaaatagtttatcactactagaagcaagagaagcagacggtgatgtggttaatgaaaagaagagaactccaaatgaaaccacatcagttttagaaccaaaaaaagagcataaagaaaaagaaaaacaaggaaggagtaggtcgggaagttctagtagtggtagttccagtagcaatagcagaactagtagtactagtagtactgtctctagctcttcatacagttctagctcaggtagtagtcgtacttcttctcggtcttcttctcctaaaaggaaaaagagacacagtaggagtagatctccaacaatcaaagctagacgtagcaggagtagaagctattctcgcagaattaaaatagagagcaatagggctagggtaaagattagagatagaaggagatctaatagaaatagcattgaaagagaaagacgacgaaatcggagtccttcccgagagagacgtagaagtagaagtcgctcaagggatagacgaaccaatcgtgccagtcgcagtaggagtcgagataggcgtaaaattgatgatcaacgtggaaatcttagtgggaacagtcataagcataaaggtgaggctaaagaacaagagaggaaaaaggagaggagtcgaagtatagataaagataggaaaaagaaagacaaagaaagggaacgtgaacaggataaaagaaaagagaaacaaaaaagggaagaaaaagattttaagttcagtagtcaggatgatagattaaaaaggaaacgagaaagtgaaagaacattttctaggagtggttctatatctgttaaaatcataagacatgattctagacaggatagtaagaaaagtactaccaaagatagtaaaaaacattcaggctctgattctagtggaaggagcagttctgagtctccaggaagtagcaaagaaaagaaggctaagaagcctaaacatagtcgatcgcgatccgtggagaaatctcaaaggtctggtaagaaggcaagccgcaaacacaagtctaagtcccgatcaaggtagtatactttttaaagtattttgtctgatttttaaaaaaaatcagtttggtacttgataaataatcatagtcttaaatgttagaaatcctatataatattatttatttaaaattgcagatttttaatttaaaatacatttttatttttaaattttgtcttttcccttttttttcagatcaacaacccctccccgtcgtaaacgctgaggaatgatgtggcaagaatgccatgatgttctttaaaaaaattccatgagttttaagggcttgtctcattatagaggcacattgtggctgtgtaggtgaaaccagaatcttttttttttttaatctgtaaataggtgtactttttccaatgctgctccaagttacttaataggatttctttgtattacgtttttttcaaaaaatatagtgcataataagactataaacatgccattctctttcagctgtaatgttcttaaaattattcttgaatgtactgtgatgtcaataaagctctttagttcatttttgttaaactcttgcaccttaattttatggttttaatctaaggaacgtacttttataaaaaggcagctggaattttgtataacaggttttaaaggtaccttctctcacctcccccaaagaaaatggtttttacttaatagtttgtcaaagtttgtaaattgtacccatggacttttgccagattccaactttaagggtatgaaagagggctagaaatagacctttacttttcatttggaagtatttgacaactttctaaacttttcttcctattttggggattttcaagtaatatattctctgtgtgtataacgtgtggttcactcctgtaaaatgaaattgctggaatcaatcaagccagtgcaccagtagagttatttgtaaggaacgattgtgtttgacagtaatagtcaagtctggaactatattctacagtcacccacttctgttttagaagcattttgaaacactttttggggttatagaaataagactcatgattcaatatatttatttatatttttaaagtataatatgacctcaaatcaatggaggaatgctgtattatgcaggtttgtgtcaatttcatgacattaaaattgtctgattttgtccgtttcttaaaattatgattagtgagtggtctaacagtttaaggcattgataacttacaagtagaatggggctctcaaagcattttaactcagttgctttagggtccatttttttatgtaatcacttactcagtgataaatgaatctctgaaaacaaatgcttttacattttaatttaaaaagaaaacaggtgcaggccacagaaaagttttaaagtatgccttcttaccagcaatagttcattttaaaaatcatgccagatttttgccaagatcagtgtttcctcaacatgaagatagaaatagatttgtatagtgtgctcttgtacctctacatagattattatataattttgagcagttacacatttatctaaaggaaataaatcaactgtgaataaatgcatgtttaccaaaatggctgtttacagtgcatttagttctgatatttataaagatgacatttcacagaataactttaaaatagtttgaaattctatatagtttagacatcgatcacatctggagacaaaataaaatgtgcaatattttttatgtaggcgagctaacacagtgtacctaattgcagaattatctgattaatttgtaatagataagttgtataacattttcatatcttaaaatgttttttagatcaatcttgaagtgaaatattttcaaaataaaattctacaga

SEQ ID NO: 357642 - DNA, 3496 bp, Homo sapiens
ggcgggagtgtttctaggagggaacatacttccccttaaaggaagatcacgttgctaaagtaaaaaatttgaaggcgccctatgtgtagaacacttacgttcttggctttctggccactataaagatgggtcgggaatggcgccagctacgttaaaaagtaacgtgcaggaatggttcagttgcccggtgttgaccagagtagagatggttttgcccacaaaaaaaatggcgccgaaacatgtcaatccgcacaatcacgtgttcacaaacctggatgagagatggtatggcttcagatgacaaacggatgttattattctttacttccgggtgagacaaatcgggcgccatcttgtcttgttcccgaagaagtagaagcatcgaaagcgttggagaggtgttaccggaacggcggcgacaagggtgttcccgaactagagtggggcatacataatcttgctgctatgcttcgaagctgtagtctgaatcaacctaagttttaaacagaaggtgaacctctgagatagaaaatcaagtatattttaaaagaagggatgtgggatcaaggaggacagccttggcagcagtggcccttgaaccagcaacaatggatgcagtcattccagcaccaacaggatccaagccagattgattgggctgcattggcccaagcttggattgcccaaagagaagcttcaggacagcaaagcatggtagaacaaccaccaggaatgatgccaaatggacaagatatgtctacaatggaatctggtccaaacaatcatgggaatttccaaggggattcaaacttcaacagaatgtggcaaccagaatggggaatgcatcagcaacccccacacccccctccagatcagccatggatgccaccaacaccaggcccaatggacattgttcctccttctgaagacagcaacagtcaggacagtggggaatttgcccctgacaacaggcatatatttaaccagaacaatcacaactttggtggaccacccgataattttgcagtggggccagtgaaccagtttgactatcagcatggggctgcttttggtccaccgcaaggtggatttcatcctccttattggcaaccaggacctccaggacctccagcacctccccagaatcgaagagaaaggccatcatcattcagggatcgtcagcgttcacctattgcacttcctgtgaagcaggagcctccacaaattgacgcagtaaaacgcaggactcttcccgcttggattcgcgaaggtcttgaaaaaatggaacgtgaaaagcagaagaaattggagaaagaaagaatggaacaacaacgttcacaattgtccaaaaaagaaaaaaaggccacagaagatgctgaaggaggggatggccctcgtttacctcagagaagtaaatttgatagtgatgaggaagaagaagacactgaaaatgttgaggctgcaagtagtgggaaagtcaccagaagtccatccccagttcctcaagaagagcacagtgaccctgagatgactgaagaggagaaagagtatcaaatgatgttgctgacaaaaatgcttctaacagaaattctgctggatgtcacagatgaagaaatttattacgtagccaaagatgcacaccgcaaagcaacgaaagctcctgcaaaacagctggcacagtccagtgcactggcttccctcactggactcggtggactgggtggttatggatcaggagacagtgaagatgagaggagtgacagaggatctgagtcatctgacactgatgatgaagaattacggcatcgaatccggcaaaaacaggaagctttttggagaaaagaaaaagaacagcagctattacatgataaacagatggaagaagaaaagcagcaaacagaaagggttacaaaagagatgaatgaatttatccataaagagcaaaatagtttatcactactagaagcaagagaagcagacggtgatgtggttaatgaaaagaagagaactccaaatgaaaccacatcagttttagaaccaaaaaaagagcataaagaaaaagaaaaacaaggaaggagtaggtcgggaagttctagtagtggtagttccagtagcaatagcagaactagtagtactagtagtactgtctctagctcttcatacagttctagctcaggtagtagtcgtacttcttctcggtcttcttctcctaaaaggaaaaagagacacagtaggagtagatctccaacaatcaaagctagacgtagcaggagtagaagctattctcgcagaattaaaatagagagcaatagggctagggtaaagattagagatagaaggagatctaatagaaatagcattgaaagagaaagacgacgaaatcggagtccttcccgagagagacgtagaagtagaagtcgctcaagggatagacgaaccaatcgtgccagtcgcagtaggagtcgagataggcgtaaaattgatgatcaacgtggaaatcttagtgggaacagtcataagcataaaggtgaggctaaagaacaagagaggaaaaaggagaggagtcgaagtatagataaagataggaaaaagaaagacaaagaaagggaacgtgaacaggataaaagaaaagagaaacaaaaaagggaagaaaaagattttaagttcagtagtcaggatgatagattaaaaaggaaacgagaaagtgaaagaacattttctaggagtggttctatatctgttaaaatcataagacatgattctagacaggatagtaagaaaagtactaccaaagatagtaaaaaacattcaggctctgattctagtggaaggagcagttctgagtctccaggaagtagcaaagaaaagaaggctaagaagcctaaacatagtcgatcgcgatccgtggagaaatctcaaaggtctggtaagaaggcaagccgcaaacacaagtctaagtcccgatcaaggtagtatactttttaaagtattttgtctgatttttaaaaaaaatcagtttggtacttgataaataatcatagtcttaaatgttagaaatcctatataatattatttatttaaaattgcagatttttaatttaaaatacatttttatttttaaattttgtcttttcccttttttttcagatcaacaacccctccccgtcgtaaacgctgaggaatgatgtggcaagaatgccatgatgttctttaaaaaaattccatgagttttaagggcttgtctcattatagaggcacattgtggctgtgtaggtgaaaccagaatcttttttttttttaatctgtaaataggtgtactttttccaatgctgctccaagttacttaataggatttctttgtattacgtttttttcaaaaaatatagtgcataataagactataaacatgccattctctttcagctgtaatgttcttaaaattattcttgaatgtactgtgatgtcaataaagctctttagttcatttttgttaaac

SEQ ID NO: 357643 - DNA, 3077 bp, Homo sapiens
ggcgggagtgtttctaggagggaacatacttccccttaaaggaagatcacgttgctaaagtaaaaaatttgaaggcgccctatgtgtagaacacttacgttcttggctttctggccactataaagatgggtcgggaatggcgccagctacgttaaaaagtaacgtgcaggaatggttcagttgcccggtgttgaccagagtagagatggttttgcccacaaaaaaaatggcgccgaaacatgtcaatccgcacaatcacgtgttcacaaacctggatgagagatggtatggcttcagatgacaaacggatgttattattctttacttccgggtgagacaaatcgggcgccatcttgtcttgttcccgaagaagtagaagcatcgaaagcgttggagaggtgttaccggaacggcggcgacaagggtgttcccgaactagagtggggcatacataatcttgctgctatgcttcgaagctgtagtctgaatcaacctaagttttaaacagaaggtgaacctctgagatagaaaatcaagtatattttaaaagaagggatgtgggatcaaggaggacagccttggcagcagtggcccttgaaccagcaacaatggatgcagtcattccagcaccaacaggatccaagccagattgattgggctgcattggcccaagcttggattgcccaaagagaagcttcaggacagcaaagcatggtagaacaaccaccaggaatgatgccaaatggacaagatatgtctacaatggaatctggtccaaacaatcatgggaatttccaaggggattcaaacttcaacagaatgtggcaaccagaatggggaatgcatcagcaacccccacacccccctccagatcagccatggatgccaccaacaccaggcccaatggacattgttcctccttctgaagacagcaacagtcaggacagtggggaatttgcccctgacaacaggcatatatttaaccagaacaatcacaactttggtggaccacccgataattttgcagtggggccagtgaaccagtttgactatcagcatggggctgcttttggtccaccgcaaggtggatttcatcctccttattggcaaccaggacctccaggacctccagcacctccccagaatcgaagagaaaggccatcatcattcagggatcgtcagcgttcacctattgcacttcctgtgaagcaggagcctccacaaattgacgcagtaaaacgcaggactcttcccgcttggattcgcgaaggtcttgaaaaaatggaacgtgaaaagcagaagaaattggagaaagaaagaatggaacaacaacgttcacaattgtccaaaaaagaaaaaaaggccacagaagatgctgaaggaggggatggccctcgtttacctcagagaagtaaatttgatagtgatgaggaagaagaagacactgaaaatgttgaggctgcaagtagtgggaaagtcaccagaagtccatccccagttcctcaagaagagcacagtgaccctgagatgactgaagaggagaaagagtatcaaatgatgttgctgacaaaaatgcttctaacagaaattctgctggatgtcacagatgaagaaatttattacgtagccaaagatgcacaccgcaaagcaacgaaagctcctgcaaaacagctggcacagtccagtgcactggcttccctcactggactcggtggactgggtggttatggatcaggagacagtgaagatgagaggagtgacagaggatctgagtcatctgacactgatgatgaagaattacggcatcgaatccggcaaaaacaggaagctttttggagaaaagaaaaagaacagcagctattacatgataaacagatggaagaagaaaagcagcaaacagaaagggttacaaaagagatgaatgaatttatccataaagagcaaaatagtttatcactactagaagcaagagaagcagacggtgatgtggttaatgaaaagaagagaactccaaatgaaaccacatcagttttagaaccaaaaaaagagcataaagaaaaagaaaaacaaggaaggagtaggtcgggaagttctagtagtggtagttccagtagcaatagcagaactagtagtactagtagtactgtctctagctcttcatacagttctagctcaggtagtagtcgtacttcttctcggtcttcttctcctaaaaggaaaaagagacacagtaggagtagatctccaacaatcaaagctagacgtagcaggagtagaagctattctcgcagaattaaaatagagagcaatagggctagggtaaagattagagatagaaggagatctaatagaaatagcattgaaagagaaagacgacgaaatcggagtccttcccgagagagacgtagaagtagaagtcgctcaagggatagacgaaccaatcgtgccagtcgcagtaggagtcgagataggcgtaaaattgatgatcaacgtggaaatcttagtgggaacagtcataagcataaaggtgaggctaaagaacaagagaggaaaaaggagaggagtcgaagtatagataaagataggaaaaagaaagacaaagaaagggaacgtgaacaggataaaagaaaagagaaacaaaaaagggaagaaaaagattttaagttcagtagtcaggatgatagattaaaaaggaaacgagaaagtgaaagaacattttctaggagtggttctatatctgttaaaatcataagacatgattctagacaggatagtaagaaaagtactaccaaagatagtaaaaaacattcaggctctgattctagtggaaggagcagttctgagtctccaggaagtagcaaagaaaagaaggctaagaagcctaaacatagtcgatcgcgatccgtggagaaatctcaaaggtctggtaagaaggcaagccgcaaacacaagtctaagtcccgatcaaggtagtatactttttaaagtattttgtctgatttttaaaaaaaattgactgaaaattttaattttttccccacccccaaagggggggagtgttttttttttgggggggc

SEQ ID NO: 357644 - DNA, 6247 bp, Homo sapiens
ggcgggagtgtttctaggagggaacatacttccccttaaaggaagatcacgttgctaaagtaaaaaatttgaaggcgccctatgtgtagaacacttacgttcttggctttctggccactataaagatgggtcgggaatggcgccagctacgttaaaaagtaacgtgcaggaatggttcagttgcccggtgttgaccagagtagagatggttttgcccacaaaaaaaatggcgccgaaacatgtcaatccgcacaatcacgtgttcacaaacctggatgagagatggtatggcttcagatgacaaacggatgttattattctttacttccgggtgagacaaatcgggcgccatcttgtcttgttcccgaagaagtagaagcatcgaaagcgttggagaggtgttaccggaacggcggcgacaagggtgttcccgaactagagtggggcatacataatcttgctgctatgcttcgaagctgtagtctgaatcaacctaagttttaaacagaaggtgaacctctgagatagaaaatcaagtatattttaaaagaagggatgtgggatcaaggaggacagccttggcagcagtggcccttgaaccagcaacaatggatgcagtcattccagcaccaacaggatccaagccagattgattgggctgcattggcccaagcttggattgcccaaagagaagcttcaggacagcaaagcatggtagaacaaccaccaggaatgatgccaaatggacaagatatgtctacaatggaatctggtccaaacaatcatgggaatttccaaggggattcaaacttcaacagaatgtggcaaccagaatggggaatgcatcagcaacccccacacccccctccagatcagccatggatgccaccaacaccaggcccaatggacattgttcctccttctgaagacagcaacagtcaggacagtggggaatttgcccctgacaacaggcatatatttaaccagaacaatcacaactttggtggaccacccgataattttgcagtggggccagtgaaccagtttgactatcaggtgaaagatattttgttgctttaatattgtagatgtgcacgtaatccattctttggaagtgtctcatcaagaatacctaagatacgtgtttcacttttcagacttgtataaataagcacattctgtctcagttatcaatttttgagtattaaaataattagaatttgttttctgatttttttatttcattaggaaaatggtataaaagatcattacggaaaacttttgaaaaaattaaaaatgtataagtgcaatagctatatgatgttttattttctaatttatatttcaaaatggtatatttaaatgttaaagactagagaatgcacagtaattgaatatagctcatggttaagacatgaataaaaaatatagatcattttcctaagtgtaattccttgtgctatgtagaattatgactgtttttctagtgtcattttttttccattctgacatgacatgttaatggaattgtatataatttcctctgtagcatccaattcattcctagggacatagaactctgtggggaatagtgttgtatgttgggctttatttacttcattccctctgccagggtctacccttaaattatagtgctaggtgtcattttgaaataactgattgcaattattaacttataaactgctatcataatttaaaattttgaaagaattatttcatgaattctagggtagatttgataatggacatctagtattcaccttgagatggtaatcctctcattaataaatattcagatacttgtatacttggtatacagatacaacagtttttatgttgtttgaagaaatataatggcagggagcatctgcttaccctacttttgcatggtagatcccatgtaaacaagacaaagagctgtattggcagctggcctagaaaagcctctgaaaatagcaaaattgcagaaaatatttaatgattcattaacttctatctttgcttataaatgaatatatctgcaagattatagaaacagcttaagttgtttagttcactttttgttcactgtaagtaggatgttgaaattgacaaaaatgtctagttaaagagaaattagtatctatttgatgtcttagtgttggtaggattagcttgtaaatggattcagaatgaaaaatttcatatacttcttgaaagtagcttatcagctggcttttagaagcctctttgcatttacatagccggaaaatcttaagacaagtaagcctaggttcttgggaccatagaagtatcggtggatattagagccatggaattcttggatgtgctgcacacatggatttctactgtcccagttcataacacacgtgtgtcccagagagtatattgtattaatttgaagaaaaaataaactgcaatactctttcagcatggggctgcttttggtccaccgcaaggtggatttcatcctccttattggcaaccaggacctccaggacctccagcacctccccagaatcgaagagaaaggccatcatcattcagggatcgtcagcgttcacctattgcacttcctgtgaagcaggagcctccacaaattgacgcagtaaaacgcaggactcttcccgcttggattcgcgaaggtcttgaaaaaatggaacgtgaaaagcagaagaaattggagaaagaaagaatggaacaacaacgttcacaattgtccaaaaaagaaaaaaaggccacagaagatgctgaaggaggggatggccctcgtttacctcagagaagtaaatttgatagtgatgaggaagaagaagacactgaaaatgttgaggctgcaagtagtgggaaagtcaccagaagtccatccccagttcctcaagaagagcacagtgaccctgagatgactgaagaggagaaagagtatcaaatgatgttgctgacaaaaatgcttctaacagaaattctgctggatgtcacagatgaagaaatttattacgtagccaaagatgcacaccgcaaagcaacgaaagctcctgcaaaacagctggcacagtccagtgcactggcttccctcactggactcggtggactgggtggttatggatcaggagacagtgaagatgagaggagtgacagaggatctgagtcatctgacactgatgatgaagaattacggcatcgaatccggcaaaaacaggaagctttttggagaaaagaaaaagaacagcagctattacatgataaacagatggaagaagaaaagcagcaaacagaaagggttacaaaagagatgaatgaatttatccataaagagcaaaatagtttatcactactagaagcaagagaagcagacggtgatgtggttaatgaaaagaagagaactccaaatgaaaccacatcagttttagaaccaaaaaaagagcataaagaaaaagaaaaacaaggaaggagtaggtcgggaagttctagtagtggtagttccagtagcaatagcagaactagtagtactagtagtactgtctctagctcttcatacagttctagctcaggtagtagtcgtacttcttctcggtcttcttctcctaaaaggaaaaagagacacagtaggagtagatctccaacaatcaaagctagacgtagcaggagtagaagctattctcgcagaattaaaatagagagcaatagggctagggtaaagattagagatagaaggagatctaatagaaatagcattgaaagagaaagacgacgaaatcggagtccttcccgagagagacgtagaagtagaagtcgctcaagggatagacgaaccaatcgtgccagtcgcagtaggagtcgagataggcgtaaaattgatgatcaacgtggaaatcttagtgggaacagtcataagcataaaggtgaggctaaagaacaagagaggaaaaaggagaggagtcgaagtatagataaagataggaaaaagaaagacaaagaaagggaacgtgaacaggataaaagaaaagagaaacaaaaaagggaagaaaaagattttaagttcagtagtcaggatgatagattaaaaaggaaacgagaaagtgaaagaacattttctaggagtggttctatatctgttaaaatcataagacatgattctagacaggatagtaagaaaagtactaccaaagatagtaaaaaacattcaggctctgattctagtggaaggagcagttctgagtctccaggaagtagcaaagaaaagaaggctaagaagcctaaacatagtcgatcgcgatccgtggagaaatctcaaaggtctggtaagaaggcaagccgcaaacacaagtctaagtcccgatcaaggtagtatactttttaaagtattttgtctgatttttaaaaaaaattgactgaatttattcaaagttgaaagtgtcctttctctctctctttaataaactcagtttggtacttgataaataatcatagtcttaaatgttagaaatcctatataatattatttatttaaaattgcagatttttaatttaaaatacatttttatttttaaattttgtcttttcccttttttttcagatcaacaacccctccccgtcgtaaacgctgaggaatgatgtggcaagaatgccatgatgttctttaaaaaaattccatgagttttaagggcttgtctcattatagaggcacattgtggctgtgtaggtgaaaccagaatcttttttttttttaatctgtaaataggtgtactttttccaatgctgctccaagttacttaataggatttctttgtattacgtttttttcaaaaaatatagtgcataataagactataaacatgccattctctttcagctgtaatgttcttaaaattattcttgaatgtactgtgatgtcaataaagctctttagttcatttttgttaaactcttgcaccttaattttatggttttaatctaaggaacgtacttttataaaaaggcagctggaattttgtataacaggttttaaaggtaccttctctcacctcccccaaagaaaatggtttttacttaatagtttgtcaaagtttgtaaattgtacccatggacttttgccagattccaactttaagggtatgaaagagggctagaaatagacctttacttttcatttggaagtatttgacaactttctaaacttttcttcctattttggggattttcaagtaatatattctctgtgtgtataacgtgtggttcactcctgtaaaatgaaattgctggaatcaatcaagccagtgcaccagtagagttatttgtaaggaacgattgtgtttgacagtaatagtcaagtctggaactatattctacagtcacccacttctgttttagaagcattttgaaacactttttggggttatagaaataagactcatgattcaatatatttatttatatttttaaagtataatatgacctcaaatcaatggaggaatgctgtattatgcaggtttgtgtcaatttcatgacattaaaattgtctgattttgtccgtttcttaaaattatgattagtgagtggtctaacagtttaaggcattgataacttacaagtagaatggggctctcaaagcattttaactcagttgctttagggtccatttttttatgtaatcacttactcagtgataaatgaatctctgaaaacaaatgcttttacattttaatttaaaaagaaaacaggtgcaggccacagaaaagttttaaagtatgccttcttaccagcaatagttcattttaaaaatcatgccagatttttgccaagatcagtgtttcctcaacatgaagatagaaatagatttgtatagtgtgctcttgtacctctacatagattattatataattttgagcagttacacatttatctaaaggaaataaatcaactgtgaataaatgcatgtttaccaaaatggctgtttacagtgcatttagttctgatatttataaagatgacatttcacagaataactttaaaatagtttgaaattctatatagtttagacatcgatcacatctggagacaaaataaaatgtgcaatattttttatgtaggcgagctaacacagtgtacctaattgcagaattatctgattaatttgtaatagataagttgtataacattttcatatcttaaaatgttttttagatcaatcttgaagtgaaatattttcaaaataaaattctacaga

SEQ ID NO: 357645 - DNA, 4771 bp, Homo sapiens
ggcgggagtgtttctaggagggaacatacttccccttaaaggaagatcacgttgctaaagtaaaaaatttgaaggcgccctatgtgtagaacacttacgttcttggctttctggccactataaagatgggtcgggaatggcgccagctacgttaaaaagtaacgtgcaggaatggttcagttgcccggtgttgaccagagtagagatggttttgcccacaaaaaaaatggcgccgaaacatgtcaatccgcacaatcacgtgttcacaaacctggatgagagatggtatggcttcagatgacaaacggatgttattattctttacttccgggtgagacaaatcgggcgccatcttgtcttgttcccgaagaagtagaagcatcgaaagcgttggagaggtgttaccggaacggcggcgacaagggtgttcccgaactagagtggatagaaaatcaagtatattttaaaagaagggatgtgggatcaaggaggacagccttggcagcagtggcccttgaaccagcaacaatggatgcagtcattccagcaccaacaggatccaagccagattgattgggctgcattggcccaagcttggattgcccaaagagaagcttcaggacagcaaagcatggtagaacaaccaccaggaatgatgccaaatggacaagatatgtctacaatggaatctggtccaaacaatcatgggaatttccaaggggattcaaacttcaacagaatgtggcaaccagaatggggaatgcatcagcaacccccacacccccctccagatcagccatggatgccaccaacaccaggcccaatggacattgttcctccttctgaagacagcaacagtcaggacagtggggaatttgcccctgacaacaggcatatatttaaccagaacaatcacaactttggtggaccacccgataattttgcagtggggccagtgaaccagtttgactatcagcatggggctgcttttggtccaccgcaaggtggatttcatcctccttattggcaaccaggacctccaggacctccagcacctccccagaatcgaagagaaaggccatcatcattcagggatcgtcagcgttcacctattgcacttcctgtgaagcaggagcctccacaaattgacgcagtaaaacgcaggactcttcccgcttggattcgcgaaggtcttgaaaaaatggaacgtgaaaagcagaagaaattggagaaagaaagaatggaacaacaacgttcacaattgtccaaaaaagaaaaaaaggccacagaagatgctgaaggaggggatggccctcgtttacctcagagaagtaaatttgatagtgatgaggaagaagaagacactgaaaatgttgaggctgcaagtagtgggaaagtcaccagaagtccatccccagttcctcaagaagagcacagtgaccctgagatgactgaagaggagaaagagtatcaaatgatgttgctgacaaaaatgcttctaacagaaattctgctggatgtcacagatgaagaaatttattacgtagccaaagatgcacaccgcaaagcaacgaaagctcctgcaaaacagctggcacagtccagtgcactggcttccctcactggactcggtggactgggtggttatggatcaggagacagtgaagatgagaggagtgacagaggatctgagtcatctgacactgatgatgaagaattacggcatcgaatccggcaaaaacaggaagctttttggagaaaagaaaaagaacagcagctattacatgataaacagatggaagaagaaaagcagcaaacagaaagggttacaaaagagatgaatgaatttatccataaagagcaaaatagtttatcactactagaagcaagagaagcagacggtgatgtggttaatgaaaagaagagaactccaaatgaaaccacatcagttttagaaccaaaaaaagagcataaagaaaaagaaaaacaaggaaggagtaggtcgggaagttctagtagtggtagttccagtagcaatagcagaactagtagtactagtagtactgtctctagctcttcatacagttctagctcaggtagtagtcgtacttcttctcggtcttcttctcctaaaaggaaaaagagacacagtaggagtagatctccaacaatcaaagctagacgtagcaggagtagaagctattctcgcagaattaaaatagagagcaatagggctagggtaaagattagagatagaaggagatctaatagaaatagcattgaaagagaaagacgacgaaatcggagtccttcccgagagagacgtagaagtagaagtcgctcaagggatagacgaaccaatcgtgccagtcgcagtaggagtcgagataggcgtaaaattgatgatcaacgtggaaatcttagtgggaacagtcataagcataaaggtgaggctaaagaacaagagaggaaaaaggagaggagtcgaagtatagataaagataggaaaaagaaagacaaagaaagggaacgtgaacaggataaaagaaaagagaaacaaaaaagggaagaaaaagattttaagttcagtagtcaggatgatagattaaaaaggaaacgagaaagtgaaagaacattttctaggagtggttctatatctgttaaaatcataagacatgattctagacaggatagtaagaaaagtactaccaaagatagtaaaaaacattcaggctctgattctagtggaaggagcagttctgagtctccaggaagtagcaaagaaaagaaggctaagaagcctaaacatagtcgatcgcgatccgtggagaaatctcaaaggtctggtaagaaggcaagccgcaaacacaagtctaagtcccgatcaaggtagtatactttttaaagtattttgtctgatttttaaaaaaaattgactgaatttattcaaagttgaaagtgtcctttctctctctctttaataaactcagtttggtacttgataaataatcatagtcttaaatgttagaaatcctatataatattatttatttaaaattgcagatttttaatttaaaatacatttttatttttaaattttgtcttttcccttttttttcagatcaacaacccctccccgtcgtaaacgctgaggaatgatgtggcaagaatgccatgatgttctttaaaaaaattccatgagttttaagggcttgtctcattatagaggcacattgtggctgtgtaggtgaaaccagaatcttttttttttttaatctgtaaataggtgtactttttccaatgctgctccaagttacttaataggatttctttgtattacgtttttttcaaaaaatatagtgcataataagactataaacatgccattctctttcagctgtaatgttcttaaaattattcttgaatgtactgtgatgtcaataaagctctttagttcatttttgttaaactcttgcaccttaattttatggttttaatctaaggaacgtacttttataaaaaggcagctggaattttgtataacaggttttaaaggtaccttctctcacctcccccaaagaaaatggtttttacttaatagtttgtcaaagtttgtaaattgtacccatggacttttgccagattccaactttaagggtatgaaagagggctagaaatagacctttacttttcatttggaagtatttgacaactttctaaacttttcttcctattttggggattttcaagtaatatattctctgtgtgtataacgtgtggttcactcctgtaaaatgaaattgctggaatcaatcaagccagtgcaccagtagagttatttgtaaggaacgattgtgtttgacagtaatagtcaagtctggaactatattctacagtcacccacttctgttttagaagcattttgaaacactttttggggttatagaaataagactcatgattcaatatatttatttatatttttaaagtataatatgacctcaaatcaatggaggaatgctgtattatgcaggtttgtgtcaatttcatgacattaaaattgtctgattttgtccgtttcttaaaattatgattagtgagtggtctaacagtttaaggcattgataacttacaagtagaatggggctctcaaagcattttaactcagttgctttagggtccatttttttatgtaatcacttactcagtgataaatgaatctctgaaaacaaatgcttttacattttaatttaaaaagaaaacaggtgcaggccacagaaaagttttaaagtatgccttcttaccagcaatagttcattttaaaaatcatgccagatttttgccaagatcagtgtttcctcaacatgaagatagaaatagatttgtatagtgtgctcttgtacctctacatagattattatataattttgagcagttacacatttatctaaaggaaataaatcaactgtgaataaatgcatgtttaccaaaatggctgtttacagtgcatttagttctgatatttataaagatgacatttcacagaataactttaaaatagtttgaaattctatatagtttagacatcgatcacatctggagacaaaataaaatgtgcaatattttttatgtaggcgagctaacacagtgtacctaattgcagaattatctgattaatttgtaatagataagttgtataacattttcatatcttaaaatgttttttagatcaatcttgaagtgaaatattttcaaaataaaattctacaga

SEQ ID NO: 357646 - DNA, 2929 bp, Homo sapiens
  misc_feature (1969)..(1969): n is a, c, g, or t
  misc_feature (1993)..(1993): n is a, c, g, or t
  misc_feature (1997)..(1997): n is a, c, g, or t
  misc_feature (2005)..(2005): n is a, c, g, or t
  misc_feature (2007)..(2007): n is a, c, g, or t
  misc_feature (2011)..(2011): n is a, c, g, or t
  misc_feature (2013)..(2013): n is a, c, g, or t
  misc_feature (2017)..(2017): n is a, c, g, or t
  misc_feature (2024)..(2024): n is a, c, g, or t
  misc_feature (2026)..(2027): n is a, c, g, or t
  misc_feature (2031)..(2031): n is a, c, g, or t
  misc_feature (2035)..(2035): n is a, c, g, or t
  misc_feature (2041)..(2041): n is a, c, g, or t
  misc_feature (2047)..(2047): n is a, c, g, or t
  misc_feature (2051)..(2051): n is a, c, g, or t
  misc_feature (2057)..(2057): n is a, c, g, or t
ggcgggagtgtttctaggagggaacatacttccccttaaaggaagatcacgttgctaaagtaaaaaatttgaaggcgccctatgtgtagaacacttacgttcttggctttctggccactataaagatgggtcgggaatggcgccagctacgttaaaaagtaacgtgcaggaatggttcagttgcccggtgttgaccagagtagagatggttttgcccacaaaaaaaatggcgccgaaacatgtcaatccgcacaatcacgtgttcacaaacctggatgagagatggtatggcttcagatgacaaacggatgttattattctttacttccgggtgagacaaatcgggcgccatcttgtcttgttcccgaagaagtagaagcatcgaaagcgttggagaggtgttaccggaacggcggcgacaagggtgttcccgaactagagtggggcatacataatcttgctgctatgcttcgaagctgtagtctgaatcaacctaagttttaaacagaaggtgaacctctgagatagaaaatcaagtatattttaaaagaagggatgtgggatcaaggaggacagccttggcagcagtggcccttgaaccagcaacaatggatgcagtcattccagcaccaacaggatccaagccagattgattgggctgcattggcccaagcttggattgcccaaagagaagcttcaggacagcaaagcatggtagaacaaccaccaggaatgatgccaaatggacaagatatgtctacaatggaatctggtccaaacaatcatgggaatttccaaggggattcaaacttcaacagaatgtggcaaccagaatggggaatgcatcagcaacccccacacccccctccagatcagccatggatgccaccaacaccaggcccaatggacattgttcctccttctgaagacagcaacagtcaggacagtggggaatttgcccctgacaacaggcatatatttaaccagaacaatcacaactttggtggaccacccgataattttgcagtggggccagtgaaccagtttgactatcagcatggggctgcttttggtccaccgcaaggtggatttcatcctccttattggcaaccaggacctccaggacctccagcacctccccagaatcgaagagaaaggccatcatcattcagggatcgtcagcgttcacctattgcacttcctgtgaagcaggagcctccacaaattgacgcagtaaaacgcaggactcttcccgcttggattcgcgaaggtcttgaaaaaatggaacgtgaaaagcagaagaaattggagaaagaaagaatggaacaacaacgttcacaattgtccaaaaaagaaaaaaaggccacagaagatgctgaaggaggggatggccctcgtttacctcagagaagtaaatttgatagtgatgaggaagaagaagacactgaaaatgttgaggctgcaagtagtgggaaagtcaccagaagtccatccccagttcctcaagaagagcacagtgaccctgagatgactgaagaggagaaagagtatcaaatgatgttgctgacaaaaatgcttctaacagaaattctgctggatgtcacagatgaagaaatttattacgtagccaaagatgcacaccgcaaagcaacgaaagctcctgcaaaacagctggcacagtccagtgcactggcttccctcactggactcggtggactgggtggttatggatcaggagacagtgaagatgagaggagtgacagaggatctgagtcatctgacactgatgatgaagaattacggcatcgaatccggcaaaaacaggaagctttttggagaaaagaaaaagaacagcagctattacatgataaacagatggaagaagaaaagcagcaaacagaaagggagggagagacagagagagacagacagacaggcagagaaagagagtaagacagaagataggcanagagagagagagagagagagaganaganagagagananagananaganagagagngnnaganaganagaganagaganaganagaganagagagagagaaacaaaaaagggaagaaaaagattttaagttcagtagtcaggatgatagattaaaaaggaaacgagaaagtgaaagaacattttctaggagtggttctatatctgttaaaatcataagacatgattctagacaggatagtaagaaaagtactaccaaagatagtaaaaaacattcaggctctgattctagtggaaggagcagttctgagtctccaggaagtagcaaagaaaggtctggtaagaaggcaagccgcaaacacaagtctaagtcccgatcaaggtagtatactttttaaagtattttgtctgatttttaaaaaaaattgactgaatttattcaaagttgaaagtgtcctttctctctctctttaataaactcagtttggtacttgataaataatcatagtcttaaatgttagaaatcctatataatattatttatttaaaattgcagatttttaatttaaaatacatttttatttttaaattttgtcttttcccttttttttcagatcaacaacccctccccgtcgtaaacgctgaggaatgatgtggcaagaatgccatgatgttctttaaaaaaattccatgagttttaagggcttgtctcattatagaggcacattgtggctgtgtaggtgaaaccagaatcttttttttttttaatctgtaaataggtgtactttttccaatgctgctccaagttacttaataggatttctttgtattacgtttttttcaaaaaatatagtgcataataagactataaacatgccattctctttcagctgtaatgttcttaaaattattcttgaatgtactgtgatgtcaataaagctctttagttcatttttgttaaac

SEQ ID NO: 357647 - DNA, 4435 bp, Homo sapiens
gtatctctgatgtgttaggaattgacactttattttttatggtcataaagcttaaaattacaaaaatgatactggtctgaaattaaaaggtttaaataattttatttaaacctttacattaaattccagattttgtgatgaagtgaaaatttatgctagccatagcatgttggtattttcttcagtgtaggcatttcagtacattatacagatatatgagcccttctccttttaaatctaattgttcaatctctgtccactcttagttcatctgatgcactgctgtcagattaattttcctctggttatttcacttcccttaagtattttggcagaaaatttcaattttttaaataacattatagagccagcctatttcaagtgacaaatacatatttatgccactttatatctggaaagttctaaattgttcagtatttaatggacaggagcatttgttaataaatctttactttttacattttaggaagattctaactttactccttttttaacttactagcaaatcacttaattttttcgagtctcagtttcctcacctgtggaaaaaagtggagtaatagtagtgatctctgagggcttttgtaaggattaaattagatgatggtttaacatgctttcattgtgtcctggcagattgtaagcactagagcagtggtccctgctgttactaaaagtgatggcattgaagaaaggcatgatatttaatgggatattttttaaatttactcacaagtttgtagaaatattttacttaactgacttgcgtatatttttcccacgtgaaacagacgcagtaaaacgcaggactcttcccgcttggattcgcgaaggtcttgaaaaaatggaacgtgaaaagcagaagaaattggagaaagaaagaatggaacaacaacgttcacaattgtccaaaaaagaaaaaaaggccacagaagatgctgaaggaggggatggccctcgtttacctcagagaagtaaatttgatagtgatgaggaagaagaagacactgaaaatgttgaggctgcaagtagtgggaaagtcaccagaagtccatccccagttcctcaagaagagcacagtgaccctgagatgactgaagaggagaaagagtatcaaatgatgttgctgacaaaaatgcttctaacagaaattctgctggatgtcacagatgaagaaatttattacgtagccaaagatgcacaccgcaaagcaacgaaagctcctgcaaaacagctggcacagtccagtgcactggcttccctcactggactcggtggactgggtggttatggatcaggagacagtgaagatgagaggagtgacagaggatctgagtcatctgacactgatgatgaagaattacggcatcgaatccggcaaaaacaggaagctttttggagaaaagaaaaagaacagcagctattacatgataaacagatggaagaagaaaagcagcaaacagaaagggttacaaaagagatgaatgaatttatccataaagagcaaaatagtttatcactactagaagcaagagaagcagacggtgatgtggttaatgaaaagaagagaactccaaatgaaaccacatcagttttagaaccaaaaaaagagcataaagaaaaagaaaaacaaggaaggagtaggtcgggaagttctagtagtggtagttccagtagcaatagcagaactagtagtactagtagtactgtctctagctcttcatacagttctagctcaggtagtagtcgtacttcttctcggtcttcttctcctaaaaggaaaaagagacacagtaggagtagatctccaacaatcaaagctagacgtagcaggagtagaagctattctcgcagaattaaaatagagagcaatagggctagggtaaagattagagatagaaggagatctaatagaaatagcattgaaagagaaagacgacgaaatcggagtccttcccgagagagacgtagaagtagaagtcgctcaagggatagacgaaccaatcgtgccagtcgcagtaggagtcgagataggcgtaaaattgatgatcaacgtggaaatcttagtgggaacagtcataagcataaaggtgaggctaaagaacaagagaggaaaaaggagaggagtcgaagtatagataaagataggaaaaagaaagacaaagaaagggaacgtgaacaggataaaagaaaagagaaacaaaaaagggaagaaaaagattttaagttcagtagtcaggatgatagattaaaaaggaaacgagaaagtgaaagaacattttctaggagtggttctatatctgttaaaatcataagacatgattctagacaggatagtaagaaaagtactaccaaagatagtaaaaaacattcaggctctgattctagtggaaggagcagttctgagtctccaggaagtagcaaagaaaagaaggctaagaagcctaaacatagtcgatcgcgatccgtggagaaatctcaaaggtctggtaagaaggcaagccgcaaacacaagtctaagtcccgatcaaggtagtatactttttaaagtattttgtctgatttttaaaaaaaattgactgaatttattcaaagttgaaagtgtcctttctctctctctttaataaactcagtttggtacttgataaataatcatagtcttaaatgttagaaatcctatataatattatttatttaaaattgcagatttttaatttaaaatacatttttatttttaaattttgtcttttcccttttttttcagatcaacaacccctccccgtcgtaaacgctgaggaatgatgtggcaagaatgccatgatgttctttaaaaaaattccatgagttttaagggcttgtctcattatagaggcacattgtggctgtgtaggtgaaaccagaatcttttttttttttaatctgtaaataggtgtactttttccaatgctgctccaagttacttaataggatttctttgtattacgtttttttcaaaaaatatagtgcataataagactataaacatgccattctctttcagctgtaatgttcttaaaattattcttgaatgtactgtgatgtcaataaagctctttagttcatttttgttaaactcttgcaccttaattttatggttttaatctaaggaacgtacttttataaaaaggcagctggaattttgtataacaggttttaaaggtaccttctctcacctcccccaaagaaaatggtttttacttaatagtttgtcaaagtttgtaaattgtacccatggacttttgccagattccaactttaagggtatgaaagagggctagaaatagacctttacttttcatttggaagtatttgacaactttctaaacttttcttcctattttggggattttcaagtaatatattctctgtgtgtataacgtgtggttcactcctgtaaaatgaaattgctggaatcaatcaagccagtgcaccagtagagttatttgtaaggaacgattgtgtttgacagtaatagtcaagtctggaactatattctacagtcacccacttctgttttagaagcattttgaaacactttttggggttatagaaataagactcatgattcaatatatttatttatatttttaaagtataatatgacctcaaatcaatggaggaatgctgtattatgcaggtttgtgtcaatttcatgacattaaaattgtctgattttgtccgtttcttaaaattatgattagtgagtggtctaacagtttaaggcattgataacttacaagtagaatggggctctcaaagcattttaactcagttgctttagggtccatttttttatgtaatcacttactcagtgataaatgaatctctgaaaacaaatgcttttacattttaatttaaaaagaaaacaggtgcaggccacagaaaagttttaaagtatgccttcttaccagcaatagttcattttaaaaatcatgccagatttttgccaagatcagtgtttcctcaacatgaagatagaaatagatttgtatagtgtgctcttgtacctctacatagattattatataattttgagcagttacacatttatctaaaggaaataaatcaactgtgaataaatgcatgtttaccaaaatggctgtttacagtgcatttagttctgatatttataaagatgacatttcacagaataactttaaaatagtttgaaattctatatagtttagacatcgatcacatctggagacaaaataaaatgtgcaatattttttatgtaggcgagctaacacagtgtacctaattgcagaattatctgattaatttgtaatagataagttgtataacattttcatatcttaaaatgttttttagatcaatcttgaagtgaaatattttcaaaataaaattctacaga

SEQ ID NO: 357648 - DNA, 3912 bp, Homo sapiens
tggggggggggtttggttatttttttaaacccacttgtagtttgggttcagcgtggaaagcaggacataccgaccgagggagggtggtcgcactagcggggttccccggactatcagcatggggctgcttttggtccaccgcaaggtggatttcatcctccttattggcaaccaggacctccaggacctccagcacctccccagaatcgaagagaaaggccatcatcattcagggatcgtcagcgttcacctattgcacttcctgtgaagcaggagcctccacaaattgacgcagtaaaacgcaggactcttcccgcttggattcgcgaaggtcttgaaaaaatggaacgtgaaaagcagaagaaattggagaaagaaagaatggaacaacaacgttcacaattgtccaaaaaagaaaaaaaggccacagaagatgctgaaggaggggatggccctcgtttacctcagagaagtaaatttgatagtgatgaggaagaagaagacactgaaaatgttgaggctgcaagtagtgggaaagtcaccagaagtccatccccagttcctcaagaagagcacagtgaccctgagatgactgaagaggagaaagagtatcaaatgatgttgctgacaaaaatgcttctaacagaaattctgctggatgtcacagatgaagaaatttattacgtagccaaagatgcacaccgcaaagcaacgaaagctcctgcaaaacagctggcacagtccagtgcactggcttccctcactggactcggtggactgggtggttatggatcaggagacagtgaagatgagaggagtgacagaggatctgagtcatctgacactgatgatgaagaattacggcatcgaatccggcaaaaacaggaagctttttggagaaaagaaaaagaacagcagctattacatgataaacagatggaagaagaaaagcagcaaacagaaagggttacaaaagagatgaatgaatttatccataaagagcaaaatagtttatcactactagaagcaagagaagcagacggtgatgtggttaatgaaaagaagagaactccaaatgaaaccacatcagttttagaaccaaaaaaagagcataaagaaaaagaaaaacaaggaaggagtaggtcgggaagttctagtagtggtagttccagtagcaatagcagaactagtagtactagtagtactgtctctagctcttcatacagttctagctcaggtagtagtcgtacttcttctcggtcttcttctcctaaaaggaaaaagagacacagtaggagtagatctccaacaatcaaagctagacgtagcaggagtagaagctattctcgcagaattaaaatagagagcaatagggctagggtaaagattagagatagaaggagatctaatagaaatagcattgaaagagaaagacgacgaaatcggagtccttcccgagagagacgtagaagtagaagtcgctcaagggatagacgaaccaatcgtgccagtcgcagtaggagtcgagataggcgtaaaattgatgatcaacgtggaaatcttagtgggaacagtcataagcataaaggtgaggctaaagaacaagagaggaaaaaggagaggagtcgaagtatagataaagataggaaaaagaaagacaaagaaagggaacgtgaacaggataaaagaaaagagaaacaaaaaagggaagaaaaagattttaagttcagtagtcaggatgatagattaaaaaggaaacgagaaagtgaaagaacattttctaggagtggttctatatctgttaaaatcataagacatgattctagacaggatagtaagaaaagtactaccaaagatagtaaaaaacattcaggctctgattctagtggaaggagcagttctgagtctccaggaagtagcaaagaaaagaaggctaagaagcctaaacatagtcgatcgcgatccgtggagaaatctcaaaggtctggtaagaaggcaagccgcaaacacaagtctaagtcccgatcaaggtagtatactttttaaagtattttgtctgatttttaaaaaaaattgactgaatttattcaaagttgaaagtgtcctttctctctctctttaataaactcagtttggtacttgataaataatcatagtcttaaatgttagaaatcctatataatattatttatttaaaattgcagatttttaatttaaaatacatttttatttttaaattttgtcttttcccttttttttcagatcaacaacccctccccgtcgtaaacgctgaggaatgatgtggcaagaatgccatgatgttctttaaaaaaattccatgagttttaagggcttgtctcattatagaggcacattgtggctgtgtaggtgaaaccagaatcttttttttttttaatctgtaaataggtgtactttttccaatgctgctccaagttacttaataggatttctttgtattacgtttttttcaaaaaatatagtgcataataagactataaacatgccattctctttcagctgtaatgttcttaaaattattcttgaatgtactgtgatgtcaataaagctctttagttcatttttgttaaactcttgcaccttaattttatggttttaatctaaggaacgtacttttataaaaaggcagctggaattttgtataacaggttttaaaggtaccttctctcacctcccccaaagaaaatggtttttacttaatagtttgtcaaagtttgtaaattgtacccatggacttttgccagattccaactttaagggtatgaaagagggctagaaatagacctttacttttcatttggaagtatttgacaactttctaaacttttcttcctattttggggattttcaagtaatatattctctgtgtgtataacgtgtggttcactcctgtaaaatgaaattgctggaatcaatcaagccagtgcaccagtagagttatttgtaaggaacgattgtgtttgacagtaatagtcaagtctggaactatattctacagtcacccacttctgttttagaagcattttgaaacactttttggggttatagaaataagactcatgattcaatatatttatttatatttttaaagtataatatgacctcaaatcaatggaggaatgctgtattatgcaggtttgtgtcaatttcatgacattaaaattgtctgattttgtccgtttcttaaaattatgattagtgagtggtctaacagtttaaggcattgataacttacaagtagaatggggctctcaaagcattttaactcagttgctttagggtccatttttttatgtaatcacttactcagtgataaatgaatctctgaaaacaaatgcttttacattttaatttaaaaagaaaacaggtgcaggccacagaaaagttttaaagtatgccttcttaccagcaatagttcattttaaaaatcatgccagatttttgccaagatcagtgtttcctcaacatgaagatagaaatagatttgtatagtgtgctcttgtacctctacatagattattatataattttgagcagttacacatttatctaaaggaaataaatcaactgtgaataaatgcatgtttaccaaaatggctgtttacagtgcatttagttctgatatttataaagatgacatttcacagaataactttaaaatagtttgaaattctatatagtttagacatcgatcacatctggagacaaaataaaatgtgcaatattttttatgtaggcgagctaacacagtgtacctaattgcagaattatctgattaatttgtaatagataagttgtataacattttcatatcttaaaatgttttttagatcaatcttgaagtgaaatattttcaaaataaaattctacaga

SEQ ID NO: 357649 - DNA, 3301 bp, Homo sapiens
caagctatagagaacttgaaatgtggctaggcatgtgctgtgggtataaattacatgctagatttcaaaaactttacttgaaaaagagaacagaatttttttaaatttattatgtgttgaaatgataatatttttggtatattgggttattttacctgtttctttttacttttttaatgtggttactaaaaaattttgaattacttacatggcttgcatcgtaattctattgaaaatggtgttctattgttacagtctggtagcttgacatttggtagtatgagaattttacatgaacattttcttagtgtttttgtctttttctgtttcagaagaaaagcagcaaacagaaagggttacaaaagagatgaatgaatttatccataaagagcaaaatagtttatcactactagaagcaagagaagcagacggtgatgtggttaatgaaaagaagagaactccaaatgaaaccacatcagttttagaaccaaaaaaagagcataaagaaaaagaaaaacaaggaaggagtaggtcgggaagttctagtagtggtagttccagtagcaatagcagaactagtagtactagtagtactgtctctagctcttcatacagttctagctcaggtagtagtcgtacttcttctcggtcttcttctcctaaaaggaaaaagagacacagtaggagtagatctccaacaatcaaagctagacgtagcaggagtagaagctattctcgcagaattaaaatagagagcaatagggctagggtaaagattagagatagaaggagatctaatagaaatagcattgaaagagaaagacgacgaaatcggagtccttcccgagagagacgtagaagtagaagtcgctcaagggatagacgaaccaatcgtgccagtcgcagtaggagtcgagataggcgtaaaattgatgatcaacgtggaaatcttagtgggaacagtcataagcataaaggtgaggctaaagaacaagagaggaaaaaggagaggagtcgaagtatagataaagataggaaaaagaaagacaaagaaagggaacgtgaacaggataaaagaaaagagaaacaaaaaagggaagaaaaagattttaagttcagtagtcaggatgatagattaaaaaggaaacgagaaagtgaaagaacattttctaggagtggttctatatctgttaaaatcataagacatgattctagacaggatagtaagaaaagtactaccaaagatagtaaaaaacattcaggctctgattctagtggaaggagcagttctgagtctccaggaagtagcaaagaaaagaaggctaagaagcctaaacatagtcgatcgcgatccgtggagaaatctcaaaggtctggtaagaaggcaagccgcaaacacaagtctaagtcccgatcaaggtagtatactttttaaagtattttgtctgatttttaaaaaaaattgactgaatttattcaaagttgaaagtgtcctttctctctctctttaataaactcagtttggtacttgataaataatcatagtcttaaatgttagaaatcctatataatattatttatttaaaattgcagatttttaatttaaaatacatttttatttttaaattttgtcttttcccttttttttcagatcaacaacccctccccgtcgtaaacgctgaggaatgatgtggcaagaatgccatgatgttctttaaaaaaattccatgagttttaagggcttgtctcattatagaggcacattgtggctgtgtaggtgaaaccagaatcttttttttttttaatctgtaaataggtgtactttttccaatgctgctccaagttacttaataggatttctttgtattacgtttttttcaaaaaatatagtgcataataagactataaacatgccattctctttcagctgtaatgttcttaaaattattcttgaatgtactgtgatgtcaataaagctctttagttcatttttgttaaactcttgcaccttaattttatggttttaatctaaggaacgtacttttataaaaaggcagctggaattttgtataacaggttttaaaggtaccttctctcacctcccccaaagaaaatggtttttacttaatagtttgtcaaagtttgtaaattgtacccatggacttttgccagattccaactttaagggtatgaaagagggctagaaatagacctttacttttcatttggaagtatttgacaactttctaaacttttcttcctattttggggattttcaagtaatatattctctgtgtgtataacgtgtggttcactcctgtaaaatgaaattgctggaatcaatcaagccagtgcaccagtagagttatttgtaaggaacgattgtgtttgacagtaatagtcaagtctggaactatattctacagtcacccacttctgttttagaagcattttgaaacactttttggggttatagaaataagactcatgattcaatatatttatttatatttttaaagtataatatgacctcaaatcaatggaggaatgctgtattatgcaggtttgtgtcaatttcatgacattaaaattgtctgattttgtccgtttcttaaaattatgattagtgagtggtctaacagtttaaggcattgataacttacaagtagaatggggctctcaaagcattttaactcagttgctttagggtccatttttttatgtaatcacttactcagtgataaatgaatctctgaaaacaaatgcttttacattttaatttaaaaagaaaacaggtgcaggccacagaaaagttttaaagtatgccttcttaccagcaatagttcattttaaaaatcatgccagatttttgccaagatcagtgtttcctcaacatgaagatagaaatagatttgtatagtgtgctcttgtacctctacatagattattatataattttgagcagttacacatttatctaaaggaaataaatcaactgtgaataaatgcatgtttaccaaaatggctgtttacagtgcatttagttctgatatttataaagatgacatttcacagaataactttaaaatagtttgaaattctatatagtttagacatcgatcacatctggagacaaaataaaatgtgcaatattttttatgtaggcgagctaacacagtgtacctaattgcagaattatctgattaatttgtaatagataagttgtataacattttcatatcttaaaatgttttttagatcaatcttgaagtgaaatattttcaaaataaaattctacaga

SEQ ID NO: 357650 - DNA, 768 bp, Homo sapiens
cccatggccctagttttaaacatacatccaatctcaaatgatctcatctatgcatttgctcacttataatctttttctccttattagaatttaagccacttgagggcaagaagccagtggatctcatccaccgacgtatccctcgcaccattgaccgaaacacaggagcgctatcgacatgtgccgaatgaatgaatgaatgaatgaatgagccccaggtgtttaggagaccctaacagaggtgcccccgttgtagggacgactctcacctgcagatggcctcctcaggcccttcgggtggcactggggagcccagggcctcccagcgaagtggccagattcaggaacccttcgcacagcgggcactaggaccctgcgcggcgccgcgtctcgcggggggcgggcgggcggagggggttgggggatccgctctttctccctcctagagcctggttgcagccacttgtgcgatcccggaccttgccgcggcgcctggctcctttccgcgccatgagccgcaggttcacggtcacctcgctgccccccgcagggcccgccagaagccctgacccagagtcccgccggcattcggtcgcagacccccgccacctcccgggggaagacgtcaaaggagctaataatcagaggctgctgaggggcatggatatgactgcatccttgtctcttctatggaggcaagacgacttttataagttctatcaatgaagagagtcctaaactggagtaaagcaaactggatgctagacc

SEQ ID NO: 357651 - DNA, 1082 bp, Homo sapiens
cccatggccctagttttaaacatacatccaatctcaaatgatctcatctatgcatttgctcacttataatctttttctccttattagaatttaagccacttgagggcaagaagccagtggatctcatccaccgacgtatccctcgcaccattgaccgaaacacaggagcgctatcgacatgtgccgaatgaatgaatgaatgaatgaatgagccccaggtgtttaggagaccctaacagaggtgcccccgttgtagggacgactctcacctgcagatggcctcctcaggcccttcgggtggcactggggagcccagggcctcccagcgaagtggccagattcaggaacccttcgcacagcgggcactaggaccctgcgcggcgccgcgtctcgcggggggcgggcgggcggagggggttgggggatccgctctttctccctcctagagcctggttgcagccacttgtgcgatcccggaccttgccgcggcgcctggctcctttccgcgccatgagccgcaggttcacggtcacctcgctgccccccgcagggcccgccagaagccctgacccagagtcccgccggcattcggtcgcagacccccgccacctcccgggggaagacgtcaaagtctcccctcagggggcactcatcaggggtcctctccctggctctgaggccctcgggtctggaaggaacaaggcgaatcggcttgtagtggccccagcgaggggaggaggaggaggaggaggaggaggaggaggaagaggaggaggaggaagaggaggaggaagaggaggaggaggagaaggaggaggagaagcctccccagaccgccaggggtcgctgccgagccgcagcaaatccaactgatccccacgtcttggccattcacctctgaaacttatcctgaatctggcagcatcggtcccccctctgtcatcatcgccctgctccaagcctcacatggccacgaccacatcctctccactggcctccctgcctccagtccttccctagccctcctccacagaagccccccatcacttgcaaaataaaggccaaagccttaagtctgtcat

SEQ ID NO: 357652 - DNA, 585 bp, Homo sapiens
ggttgggggcgtcttcctcgcgggccctgtgcagggtcttgtaatggaagttacacgcagggcacagagtataggggaggggaaagatccttctggccttcggtggagaagtagcatcctgggcgcgtgcacagtctcccctcagggggcactcatcaggggtcctctccctggctctgaggccctcgggtctggaaggaacaaggcgaatcggcttgtagtggccccagcgaggggaggaggaggaggaggaggaggaggaggaggaagaggaggaggaggaagaggaggaggaagaggaggaggaggagaaggaggaggagaagcctccccagaccgccaggggtcgctgccgagccgcagcaaatccaactgatccccacgtcttggccattcacctctgaaacttatcctgaatctggcagcatcggtcccccctctgtcatcatcgccctgctccaagcctcacatggccacgaccacatcctctccactggcctccctgcctccagtccttccctagccctcctccacagaagccccccatcacttgcaaaataaaggccaaagccttaagtctgtcat

SEQ ID NO: 357653 - DNA, 958 bp, Homo sapiens
atattatggtagataactggatagtacttttttactttctgagtctgtacagtctaatcttcctgaatgtttgggctgtttaatttctttaaagatgataaatattacccggtcatccatcatgctctatctataggctataccattcatatgttgggcaatgctgtattataaaacacatgtaaacatgtatgtaacccatgtttaacccagcgtagttgtagcatgtggttgtattaatgaacgttacaggagagctttataatcatttataaatctgtaacattcaataaagaaacacatgttgcaatgattaattatgttcccaattccatgttatttagcatctttgtgaaccgggcatttttgttcctgatctgcttgatgcttttcatgttcctttggaccactgtaaaatatgtgtgtaagctgatgtatatcctctaatgagtcctgcgagctgtggtaggcaagttgtgattttgtgaaagatgaactggcatgttatgcaaaagactatatgacaaatgaacttaaaatgatattttaaactccagttgaattagctgtttacatctgccaaccccatgcagaagcagtgtacagtattttataaatatgttcatttagtaacactatgttgtttctagataaagtgatactagtgtgtaggtggttatatatttggcctagatattgcattataactcactatcctttaacaataacaatgtgactgaaatgaagtaatctctctccaaacctggtcttaattttgtgtcaacaaaatgcatgcactgctttatgcatttcttttgacttttctaaggcacttaacattttactattgcctgctgtgacgcttaagccagttaagaattcactcaaacagttgggcttcttactatggggattatgttcagttttgaaaaattaaaaacaaaaaaaaagtaaccaa

SEQ ID NO: 357654 - DNA, 212 bp, Homo sapiens
cctgtcacctaggtagtgagcatagtaccccataggtagtttttcaccccacttccccccaccatactcccccttcactgacaactacttttataactgccctttttcaaaaacttttgctgccttctctgagaccctgcctgatatggcaccatcagggtccctcgtccctggtccctggtccctgtcctttttttttttttttttttttt

SEQ ID NO: 357655 - DNA, 318 bp, Homo sapiens
cataaggccagccagttctagctctctattacctgtccccactcaactgactcatacctgtttccggctgcatcactgtgtgccccacagagaacgatgatcgtcacctctgtgcctgagttctccctgttgtctcaaagcggtacccatcctcccccagaagctgtccccagcgagcctcccttctttgtttgaattctctaataagagcaacagcagctcccatttctagaacacatttacagtattactattttctaggatataaagtgccatatatatttttaattccaatattaataaatgtatgccaaacaa

SEQ ID NO: 357656 - DNA, 1967 bp, Homo sapiens
cgggatcaatttgatttgacagtcggtataactgatcctgagcgtcgggtggtggtggctgtagcgcttcggagagactgcctccgcccttccccggcctggagccggagtccgagggggcggccgggggatcagaacccgaggctggggacagcgacaccgagggggaggacattttcaccggcgccgcggtggtcagtaaacatcagtctccaaagataactacatcccttcttcccatcaacaatggctccaaagaaaatgggatccatgaagaacaagaccaagagccacaggatctctttgcagatgccacagtggagctatccttggacagcacacaaaataatcagaagaaggtgctagccaaaacactcatttctcttcctcctcaggaagccacaaattcttcgaagccccagccaacctatgaggagctagaggaagaagaacaggaggatcaatttgatttgacagtcggtataactgatcctgagaagataggggatggtatgaatgcatatgtagcctacaaagttacaacacagacaagcttaccattgttcagaagcaaacagtttgcagtaaaaagaagatttagtgactttctgggtctttatgagaagctttccgagaagcactctcagaatggcttcattgtccctccacccccggagaagagcctcatagggatgacaaaagtgaaagttgggaaggaagattcttcttctgcagaatttcttgaaaaacggagggccgctttagaaaggtaccttcagaggattgtaaatcatcctaccatgttacaggaccctgacgtcagagagttcttggaaaaagaagagctgccacgtgccgtgggtacccagacattgagtggtgctggtctcctcaagatgttcaacaaagccacagatgccgtcagcaaaatgaccatcaagatgaatgaatcagacatttggtttgaggagaagctccaggaggtagagtgtgaggagcagcgcttacggaaactgcatgctgttgtagaaactctagtcaaccataggaaagagctagcgctgaacacagcccagtttgcaaagagtctagccatgcttgggagctctgaggacaacacggcattgtcacgggcactctcccagctggctgaggtggaagaaaaaattgagcagctccaccaggaacaggccaacaatgacttcttcctccttgctgagctcctgagtgactacattcgcctcctggccatagtccgcgctgccttcgaccagcgcatgaagacatggcagcgctggcaggatgcccaagccacactgcagaagaagcgggaggccgaggctcggctgctgtgggccaacaagcctgataagctgcagcaggccaaggacgagatcctcgagtgggagtctcgggtgactcaatatgaaagggacttcgagaggatttcaacagtggtccgaaaagaagtgatacggtttgagaaagagaaatccaaggacttcaagaaccacgtgatcaagtaccttgagacactcctttactcacagcagcagctggcaaagtactgggaagccttccttcctgaggcaaaggccatctcctaatggaccaaggaccccagagcccacctgtgtgacgctgcctttttatacactgtcctcctccaccttgatggacccctagtgatgcatcctgcctaggctggacttaaccccttcctccctgtccccacgaccaactgtccccagttactctaaccgttatttcatttagcttccatatatattttcttacctaagagaatagtttcctgctttaagcaaaagacctacaataggtggtggaattatgggatggggtggagtattgatataaatatataaatacaaatgtatatttttcaggatgtggtttaggaactgggaataacgttttcatggcaccatcaggagtaacagaaaacc

SEQ ID NO: 357657 - DNA, 152 bp, Homo sapiens
ggatttgctggtgcagtacaactaggcttgatccatgaagaacaagaccaagagccacaggatctctttgcaggcaagtttggactcaaaagttactctaggaacctcctaaatggctttgttaagttgctgagttaaagtcaaaaccaaaa

SEQ ID NO: 357658 - DNA, 1884 bp, Homo sapiens
  misc_feature (1884)..(1884): n is a, c, g, or t
ctcgataaagtgttgttgcggcttccgccgcgggtggaagaagatggcgtcgggtggtggtggctgtagcgcttcggagagactgcctccgcccttccccggcctggagccggagtccgagggggcggccgggggatcagaacccgaggctggggacagcgacaccgagggggaggacattttcaccggcgccgcggtggtcagtaaacatcagtctccaaagataactacatcccttcttcccatcaacaatggctccaaagaaaatgggatccatgaagaacaagaccaagagccacaggatctctttgcagatgccacagtggagctatccttggacagcacacaaaataatcagaagaaggtgctagccaaaacactcatttctcttcctcctcaggaagccacaaattcttcgaagccccagccaacctatgaggagctagaggaagaagaacaggaggatcaatttgatttgacagtcggtataactgatcctgagaagataggggatggtatgaatgcatatgtagcctacaaagttacaacacagacaagcttaccattgttcagaagcaaacagtttgcagtaaaaagaagatttagtgactttctgggtctttatgagaagctttccgagaagcactctcagaatggcttcattgtccctccacccccggagaagagcctcatagggatgacaaaagtgaaagttgggaaggaagattcttcttctgcagaatttcttgaaaaacggagggccgctttagaaaggtaccttcagaggattgtaaatcatcctaccatgttacaggaccctgacgtcagagagttcttggaaaaagaagagctgccacgtgccgtgggtacccagacattgagtggtgctggtctcctcaagatgttcaacaaagccacagatgccgtcagcaaaatgaccatcaagatgaatgaatcagacatttggtttgaggagaagctccaggaggtagagtgtgaggagcagcgcttacggaaactgcatgctgttgtagaaactctagtcaaccataggaaagagctagcgctgaacacagcccagtttgcaaagagtctagccatgcttgggagctctgaggacaacacggcattgtcacgggcactctcccagctggctgaggtggaagaaaaaattgagcagctccaccaggaacaggccaacaatgacttcttcctccttgctgagctcctgagtgactacattcgcctcctggccatagtccgcgctgccttcgaccagcgcatgaagacatggcagcgctggcaggatgcccaagccacactgcagaagaagcgggaggccgaggctcggctgctgtgggccaacaagcctgataagctgcagcaggccaaggacgagatcctcgagtgggagtcttactcacagcagcagctggcaaagtactgggaagccttccttcctgaggcaaaggccatctcctaatggaccaaggaccccagagcccacctgtgtgacgctgcctttttatacactgtcctcctccaccttgatggacccctagtgatgcatcctgcctaggctggacttaaccccttcctccctgtccccacgaccaactgtccccagttactctaaccgttatttcatttagcttccatatatattttcttacctaagagaatagtttcctgctttaagcaaaagacctacaataggtggtggaattatgggatggggtggagtattgatataaatatataaatacaaatgtatatttttcaggatgtggtttaggaactgggaataacgttttctgttactcctgatggtgccatgaaaaggttatgtaataaaatattttaaaatcaggtaaaaaaaaaaan

SEQ ID NO: 357659 - DNA, 2056 bp, Homo sapiens
  misc_feature (2056)..(2056): n is a, c, g, or t
ctcgataaagtgttgttgcggcttccgccgcgggtggaagaagatggcgtcgggtggtggtggctgtagcgcttcggagagactgcctccgcccttccccggcctggagccggagtccgagggggcggccgggggatcagaacccgaggctggggacagcgacaccgagggggaggacattttcaccggcgccgcggtggtcagtaaacatcagtctccaaagataactacatcccttcttcccatcaacaatggctccaaagaaaatgggatccatgaagaacaagaccaagagccacaggatctctttgcagatgccacagtggagctatccttggacagcacacaaaataatcagaagaaggtgctagccaaaacactcatttctcttcctcctcaggaagccacaaattcttcgaagccccagccaacctatgaggagctagaggaagaagaacaggaggatcaatttgatttgacagtcggtataactgatcctgagaagataggggatggtatgaatgcatatgtagcctacaaagttacaacacagacaagcttaccattgttcagaagcaaacagtttgcagtaaaaagaagatttagtgactttctgggtctttatgagaagctttccgagaagcactctcagaatggcttcattgtccctccacccccggagaagagcctcatagggatgacaaaagtgaaagttgggaaggaagattcttcttctgcagaatttcttgaaaaacggagggccgctttagaaaggtaccttcagaggattgtaaatcatcctaccatgttacaggaccctgacgtcagagagttcttggaaaaagaagaggggcagcagataacttgccatccctgccttcttggtcttgtagctgccacgtgccgtgggtacccagacattgagtggtgctggtctcctcaagatgttcaacaaagccacagatgccgtcagcaaaatgaccatcaagatgaatgaatcagacatttggtttgaggagaagctccaggaggtagagtgtgaggagcagcgcttacggaaactgcatgctgttgtagaaactctagtcaaccataggaaagagctagcgctgaacacagcccagtttgcaaagagtctagccatgcttgggagctctgaggacaacacggcattgtcacgggcactctcccagctggctgaggtggaagaaaaaattgagcagctccaccaggaacaggccaacaatgacttcttcctccttgctgagctcctgagtgactacattcgcctcctggccatagtccgcgctgccttcgaccagcgcatgaagacatggcagcgctggcaggatgcccaagccacactgcagaagaagcgggaggccgaggctcggctgctgtgggccaacaagcctgataagctgcagcaggccaaggacgagatcctcgagtgggagtctcgggtgactcaatatgaaagggacttcgagaggatttcaacagtggtccgaaaagaagtgatacggtttgagaaagagaaatccaaggacttcaagaaccacgtgatcaagtaccttgagacactcctttactcacagcagcagctggcaaagtactgggaagccttccttcctgaggcaaaggccatctcctaatggaccaaggaccccagagcccacctgtgtgacgctgcctttttatacactgtcctcctccaccttgatggacccctagtgatgcatcctgcctaggctggacttaaccccttcctccctgtccccacgaccaactgtccccagttactctaaccgttatttcatttagcttccatatatattttcttacctaagagaatagtttcctgctttaagcaaaagacctacaataggtggtggaattatgggatggggtggagtattgatataaatatataaatacaaatgtatatttttcaggatgtggtttaggaactgggaataacgttttctgttactcctgatggtgccatgaaaaggttatgtaataaaatattttaaaatcaggtaaaaaaaaaaan

SEQ ID NO: 357660 - DNA, 2271 bp, Homo sapiens
  misc_feature (2271)..(2271): n is a, c, g, or t
aggttcaggagagcagagaaaaggcggggccagacggagtagctcgaaggacctagggaaggggcctcaaggactacaagttccagcgtgctttgctcgatttcggcgggacaaaaacaatcttcgcggctcgtcagcacattgcatgctgggatgcgtgagctattttcttcggaaggcagcgaattgtattctgggacttgtagtgtccgcctggtagaagtggatgtaacggtctgttaaccgcgactgactcactcagtatccgtgataagttaaagatgaatcctgaaggggtaggggaaaggagatcttgagttctccagcacggagactctttacaattatttctccgcgggatccgctgacagccaacgtctttcttacttcctgatcggacaggaagtaggtttcagttgctgtgaaaagggatgtcatgggaagccagtgaggtagtcagagtaaacatcagtctccaaagataactacatcccttcttcccatcaacaatggctccaaagaaaatgggatccatgaagaacaagaccaagagccacaggatctctttgcagatgccacagtggagctatccttggacagcacacaaaataatcagaagaaggtgctagccaaaacactcatttctcttcctcctcaggaagccacaaattcttcgaagccccagccaacctatgaggagctagaggaagaagaacaggaggatcaatttgatttgacagtcggtataactgatcctgagaagataggggatggtatgaatgcatatgtagcctacaaagttacaacacagacaagcttaccattgttcagaagcaaacagtttgcagtaaaaagaagatttagtgactttctgggtctttatgagaagctttccgagaagcactctcagaatggcttcattgtccctccacccccggagaagagcctcatagggatgacaaaagtgaaagttgggaaggaagattcttcttctgcagaatttcttgaaaaacggagggccgctttagaaaggtaccttcagaggattgtaaatcatcctaccatgttacaggaccctgacgtcagagagttcttggaaaaagaagagctgccacgtgccgtgggtacccagacattgagtggtgctggtctcctcaagatgttcaacaaagccacagatgccgtcagcaaaatgaccatcaagatgaatgaatcagacatttggtttgaggagaagctccaggaggtagagtgtgaggagcagcgcttacggaaactgcatgctgttgtagaaactctagtcaaccataggaaagagctagcgctgaacacagcccagtttgcaaagagtctagccatgcttgggagctctgaggacaacacggcattgtcacgggcactctcccagctggctgaggtggaagaaaaaattgagcagctccaccaggaacaggccaacaatgacttcttcctccttgctgagctcctgagtgactacattcgcctcctggccatagtccgcgctgccttcgaccagcgcatgaagacatggcagcgctggcaggatgcccaagccacactgcagaagaagcgggaggccgaggctcggctgctgtgggccaacaagcctgataagctgcagcaggccaaggacgagatcctcgagtgggagtctcgggtgactcaatatgaaagggacttcgagaggatttcaacagtggtccgaaaagaagtgatacggtttgagaaagagaaatccaaggacttcaagaaccacgtgatcaagtaccttgagacactcctttactcacagcagcagctggcaaagtactgggaagccttccttcctgaggcaaaggccatctcctaatggaccaaggaccccagagcccacctgtgtgacgctgcctttttatacactgtcctcctccaccttgatggacccctagtgatgcatcctgcctaggctggacttaaccccttcctccctgtccccacgaccaactgtccccagttactctaaccgttatttcatttagcttccatatatattttcttacctaagagaatagtttcctgctttaagcaaaagacctacaataggtggtggaattatgggatggggtggagtattgatataaatatataaatacaaatgtatatttttcaggatgtggtttaggaactgggaataacgttttctgttactcctgatggtgccatgaaaaggttatgtaataaaatattttaaaatcaggtaaaaaaaaaaan

SEQ ID NO: 357661 - DNA, 1851 bp, Homo sapiens
  misc_feature (1851)..(1851): n is a, c, g, or t
gtccctgtttgcagatgacatgattgtatatttagaagctagtaaacatcagtctccaaagataactacatcccttcttcccatcaacaatggctccaaagaaaatgggatccatgaagaacaagaccaagagccacaggatctctttgcagatgccacagtggagctatccttggacagcacacaaaataatcagaagaaggtgctagccaaaacactcatttctcttcctcctcaggaagccacaaattcttcgaagccccagccaacctatgaggagctagaggaagaagaacaggaggatcaatttgatttgacagtcggtataactgatcctgagaagataggggatggtatgaatgcatatgtagcctacaaagttacaacacagacaagcttaccattgttcagaagcaaacagtttgcagtaaaaagaagatttagtgactttctgggtctttatgagaagctttccgagaagcactctcagaatggcttcattgtccctccacccccggagaagagcctcatagggatgacaaaagtgaaagttgggaaggaagattcttcttctgcagaatttcttgaaaaacggagggccgctttagaaaggtaccttcagaggattgtaaatcatcctaccatgttacaggaccctgacgtcagagagttcttggaaaaagaagagctgccacgtgccgtgggtacccagacattgagtggtgctggtctcctcaagatgttcaacaaagccacagatgccgtcagcaaaatgaccatcaagatgaatgaatcagacatttggtttgaggagaagctccaggaggtagagtgtgaggagcagcgcttacggaaactgcatgctgttgtagaaactctagtcaaccataggaaagagctagcgctgaacacagcccagtttgcaaagagtctagccatgcttgggagctctgaggacaacacggcattgtcacgggcactctcccagctggctgaggtggaagaaaaaattgagcagctccaccaggaacaggccaacaatgacttcttcctccttgctgagctcctgagtgactacattcgcctcctggccatagtccgcgctgccttcgaccagcgcatgaagacatggcagcgctggcaggatgcccaagccacactgcagaagaagcgggaggccgaggctcggctgctgtgggccaacaagcctgataagctgcagcaggccaaggacgagatcctcgagtgggagtctcgggtgactcaatatgaaagggacttcgagaggatttcaacagtggtccgaaaagaagtgatacggtttgagaaagagaaatccaaggacttcaagaaccacgtgatcaagtaccttgagacactcctttactcacagcagcagctggcaaagtactgggaagccttccttcctgaggcaaaggccatctcctaatggaccaaggaccccagagcccacctgtgtgacgctgcctttttatacactgtcctcctccaccttgatggacccctagtgatgcatcctgcctaggctggacttaaccccttcctccctgtccccacgaccaactgtccccagttactctaaccgttatttcatttagcttccatatatattttcttacctaagagaatagtttcctgctttaagcaaaagacctacaataggtggtggaattatgggatggggtggagtattgatataaatatataaatacaaatgtatatttttcaggatgtggtttaggaactgggaataacgttttctgttactcctgatggtgccatgaaaaggttatgtaataaaatattttaaaatcaggtaaaaaaaaaaan

SEQ ID NO: 357662 - DNA, 2131 bp, Homo sapiens
  misc_feature (2131)..(2131): n is a, c, g, or t
ctcgataaagtgttgttgcggcttccgccgcgggtggaagaagatggcgtcgggtggtggtggctgtagcgcttcggagagactgcctccgcccttccccggcctggagccggagtccgagggggcggccgggggatcagaacccgaggctggggacagcgacaccgagggggaggacattttcaccggcgccgcggtggtcagtaaacatcagtctccaaagataactacatcccttcttcccatcaacaatggctccaaagaaaatgggatccatgaagaacaagaccaagagccacaggatctctttgcagggtctcactctgttgcccaggctggagtgcagtggtgtggtcatggctcactgcagccccgacctcccaggctcaagtgatcttcccacctcaaccttctgagtagctaggaccacagatgccacagtggagctatccttggacagcacacaaaataatcagaagaaggtgctagccaaaacactcatttctcttcctcctcaggaagccacaaattcttcgaagccccagccaacctatgaggagctagaggaagaagaacaggaggatcaatttgatttgacagtcggtataactgatcctgagaagataggggatggtatgaatgcatatgtagcctacaaagttacaacacagacaagcttaccattgttcagaagcaaacagtttgcagtaaaaagaagatttagtgactttctgggtctttatgagaagctttccgagaagcactctcagaatggcttcattgtccctccacccccggagaagagcctcatagggatgacaaaagtgaaagttgggaaggaagattcttcttctgcagaatttcttgaaaaacggagggccgctttagaaaggtaccttcagaggattgtaaatcatcctaccatgttacaggaccctgacgtcagagagttcttggaaaaagaagagctgccacgtgccgtgggtacccagacattgagtggtgctggtctcctcaagatgttcaacaaagccacagatgccgtcagcaaaatgaccatcaagatgaatgaatcagacatttggtttgaggagaagctccaggaggtagagtgtgaggagcagcgcttacggaaactgcatgctgttgtagaaactctagtcaaccataggaaagagctagcgctgaacacagcccagtttgcaaagagtctagccatgcttgggagctctgaggacaacacggcattgtcacgggcactctcccagctggctgaggtggaagaaaaaattgagcagctccaccaggaacaggccaacaatgacttcttcctccttgctgagctcctgagtgactacattcgcctcctggccatagtccgcgctgccttcgaccagcgcatgaagacatggcagcgctggcaggatgcccaagccacactgcagaagaagcgggaggccgaggctcggctgctgtgggccaacaagcctgataagctgcagcaggccaaggacgagatcctcgagtgggagtctcgggtgactcaatatgaaagggacttcgagaggatttcaacagtggtccgaaaagaagtgatacggtttgagaaagagaaatccaaggacttcaagaaccacgtgatcaagtaccttgagacactcctttactcacagcagcagctggcaaagtactgggaagccttccttcctgaggcaaaggccatctcctaatggaccaaggaccccagagcccacctgtgtgacgctgcctttttatacactgtcctcctccaccttgatggacccctagtgatgcatcctgcctaggctggacttaaccccttcctccctgtccccacgaccaactgtccccagttactctaaccgttatttcatttagcttccatatatattttcttacctaagagaatagtttcctgctttaagcaaaagacctacaataggtggtggaattatgggatggggtggagtattgatataaatatataaatacaaatgtatatttttcaggatgtggtttaggaactgggaataacgttttctgttactcctgatggtgccatgaaaaggttatgtaataaaatattttaaaatcaggtaaaaaaaaaaan

SEQ ID NO: 357663 - DNA, 1945 bp, Homo sapiens
  misc_feature (1945)..(1945): n is a, c, g, or t
ctcgataaagtgttgttgcggcttccgccgcgggtggaagaagatggcgtcgggtggtggtggctgtagcgcttcggagagactgcctccgcccttccccggcctggagccggagtccgagggggcggccgggggatcagaacccgaggctggggacagcgacaccgagggggaggacattttcaccggcgccgcggtggtcagtaaacatcagtctccaaagataactacatcccttcttcccatcaacaatggctccaaagaaaatgggatccatgaagaacaagaccaagagccacaggatctctttgcagatgccacagtggagctatccttggacagcacacaaaataatcagaagaaggtgctagccactagaggaagaagaacaggaggatcaatttgatttgacagtcggtataactgatcctgagaagataggggatggtatgaatgcatatgtagcctacaaagttacaacacagacaagcttaccattgttcagaagcaaacagtttgcagtaaaaagaagatttagtgactttctgggtctttatgagaagctttccgagaagcactctcagaatggcttcattgtccctccacccccggagaagagcctcatagggatgacaaaagtgaaagttgggaaggaagattcttcttctgcagaatttcttgaaaaacggagggccgctttagaaaggtaccttcagaggattgtaaatcatcctaccatgttacaggaccctgacgtcagagagttcttggaaaaagaagagctgccacgtgccgtgggtacccagacattgagtggtgctggtctcctcaagatgttcaacaaagccacagatgccgtcagcaaaatgaccatcaagatgaatgaatcagacatttggtttgaggagaagctccaggaggtagagtgtgaggagcagcgcttacggaaactgcatgctgttgtagaaactctagtcaaccataggaaagagctagcgctgaacacagcccagtttgcaaagagtctagccatgcttgggagctctgaggacaacacggcattgtcacgggcactctcccagctggctgaggtggaagaaaaaattgagcagctccaccaggaacaggccaacaatgacttcttcctccttgctgagctcctgagtgactacattcgcctcctggccatagtccgcgctgccttcgaccagcgcatgaagacatggcagcgctggcaggatgcccaagccacactgcagaagaagcgggaggccgaggctcggctgctgtgggccaacaagcctgataagctgcagcaggccaaggacgagatcctcgagtgggagtctcgggtgactcaatatgaaagggacttcgagaggatttcaacagtggtccgaaaagaagtgatacggtttgagaaagagaaatccaaggacttcaagaaccacgtgatcaagtaccttgagacactcctttactcacagcagcagctggcaaagtactgggaagccttccttcctgaggcaaaggccatctcctaatggaccaaggaccccagagcccacctgtgtgacgctgcctttttatacactgtcctcctccaccttgatggacccctagtgatgcatcctgcctaggctggacttaaccccttcctccctgtccccacgaccaactgtccccagttactctaaccgttatttcatttagcttccatatatattttcttacctaagagaatagtttcctgctttaagcaaaagacctacaataggtggtggaattatgggatggggtggagtattgatataaatatataaatacaaatgtatatttttcaggatgtggtttaggaactgggaataacgttttctgttactcctgatggtgccatgaaaaggttatgtaataaaatattttaaaatcaggtaaaaaaaaaaan

SEQ ID NO: 357664 - DNA, 682 bp, Homo sapiens
agtgttataccttcctttgcgtgtcagatgggtcagtaatatccacacagctgggcttcagttaacagtttagctgaggctacagagtaagcatgggtcagagcttgagttctggactccagtgtagtatcctggtcactagaatgtgcacagtcagcatttgaaagaataaaggtcatcagctgagaaagagaaatacatttggacatgttcttttgaaaattatctgtgtgtacacatacccatgttggtatcatgtgctttggggtagggcatttgagcgaggttatgctgttagaaattaaccctaaaatgtatggacttatttttgctctgtcatgacttgggcagcacttattttactaataacgatttgctgcttattgaactggctgactggtggcaactgagggaggcattaaaagttgctttctaggcaagttgggtttgtttttcatggtaatgttttattcagagtatctctttgttttcagagtaaacatcagtctccaaagataactacatcccttcttcccatcaacaatggctccaaagaaaatgggatccatgaagaacaagaccaagagccacaggatctctttgcaggcaagtttggactcaaaagttactctaggaacctcctaaatggctttgttaagttgctgagttaaagtcaaaacca

SEQ ID NO: 357665 - DNA, 2013 bp, Homo sapiens
  misc_feature (2013)..(2013): n is a, c, g, or t
ctcgataaagtgttgttgcggcttccgccgcgggtggaagaagatggcgtcgggtggtggtggctgtagcgcttcggagagactgcctccgcccttccccggcctggagccggagtccgagggggcggccgggggatcagaacccgaggctggggacagcgacaccgagggggaggacattttcaccggcgccgcggtggtcagtaaacatcagtctccaaagataactacatcccttcttcccatcaacaatggctccaaagaaaatgggatccatgaagaacaagaccaagagccacaggatctctttgcagatgccacagtggagctatccttggacagcacacaaaataatcagaagaaggtgctagccaaaacactcatttctcttcctcctcaggaagccacaaattcttcgaagccccagccaacctatgaggagctagaggaagaagaacaggaggatcaatttgatttgacagtcggtataactgatcctgagaagataggggatggtatgaatgcatatgtagcctacaaagttacaacacagacaagcttaccattgttcagaagcaaacagtttgcagtaaaaagaagatttagtgactttctgggtctttatgagaagctttccgagaagcactctcagaatggcttcattgtccctccacccccggagaagagcctcatagggatgacaaaagtgaaagttgggaaggaagattcttcttctgcagaatttcttgaaaaacggagggccgctttagaaaggtaccttcagaggattgtaaatcatcctaccatgttacaggaccctgacgtcagagagttcttggaaaaagaagagctgccacgtgccgtgggtacccagacattgagtggtgctggtctcctcaagatgttcaacaaagccacagatgccgtcagcaaaatgaccatcaagatgaatgaatcagacatttggtttgaggagaagctccaggaggtagagtgtgaggagcagcgcttacggaaactgcatgctgttgtagaaactctagtcaaccataggaaagagctagcgctgaacacagcccagtttgcaaagagtctagccatgcttgggagctctgaggacaacacggcattgtcacgggcactctcccagctggctgaggtggaagaaaaaattgagcagctccaccaggaacaggccaacaatgacttcttcctccttgctgagctcctgagtgactacattcgcctcctggccatagtccgcgctgccttcgaccagcgcatgaagacatggcagcgctggcaggatgcccaagccacactgcagaagaagcgggaggccgaggctcggctgctgtgggccaacaagcctgataagctgcagcaggccaaggacgagatcctcgagtgggagtctcgggtgactcaatatgaaagggacttcgagaggatttcaacagtggtccgaaaagaagtgatacggtttgagaaagagaaatccaaggacttcaagaaccacgtgatcaagtaccttgagacactcctttactcacagcagcagctggcaaagtactgggaagccttccttcctgaggcaaaggccatctcctaatggaccaaggaccccagagcccacctgtgtgacgctgcctttttatacactgtcctcctccaccttgatggacccctagtgatgcatcctgcctaggctggacttaaccccttcctccctgtccccacgaccaactgtccccagttactctaaccgttatttcatttagcttccatatatattttcttacctaagagaatagtttcctgctttaagcaaaagacctacaataggtggtggaattatgggatggggtggagtattgatataaatatataaatacaaatgtatatttttcaggatgtggtttaggaactgggaataacgttttctgttactcctgatggtgccatgaaaaggttatgtaataaaatattttaaaatcaggtaaaaaaaaaaan

SEQ ID NO: 357666 - DNA, 815 bp, Homo sapiens
ggctgtaccggcccggaaggtcttacgacgtcgggtggtggtggctgtagcgcttcggagagactgcctccgcccttccccggcctggagccggagtccgagggggcggccgggggatcagaacccgaggctggggacagcgacaccgagggggaggacattttcaccggcgccgcggtggtcagtaaacatcagtctccaaagataactacatcccttcttcccatcaacaatggctccaaagaaaatgggatccatgaagaacaagaccaagagccacaggatctctttgcagatgccacagtggagctatccttggacagcacacaaaataatcagaagaaggtgctagccagggattacaggcgtgagccaccacacccggccctaagttgttttcttaaagacctgaaggcatccacacagtaagcctgttaaggacaagtcccatttggatacccacctgacctggtaagcattggagcttctctgacccctgcaagacattctttccccagatgggcaggggttgcccagtggcagtagtagcagaggctggaagcacagaagcatcttaggtgagtagctggggaccttaatggcagacatgacaaaactccacttgctgagaagccaccgacagcaccctggggacagctagcatatgaggcagggccactcccttccagacctcgaggctggagctcctgccatcctggcttctgcctgttgccccagttcttggtccctcagctctcttcacagtgaacccctgttacttgagggaccaagtgtgtctttgatgcttgaacccc

SEQ ID NO: 357667 - DNA, 1196 bp, Homo sapiens
ctcgataaagtgttgttgcggcttccgccgcgggtggaagaagatggcgtcgggtggtggtggctgtagcgcttcggagagactgcctccgcccttccccggcctggagccggagtccgagggggcggccgggggatcagaacccgaggctggggacagcgacaccgagggggaggacattttcaccggcgccgcggtggtcagtaaacatcagtctccaaagataactacatcccttcttcccatcaacaatggctccaaagaaaatgggatccatgaagaacaagaccaagagccacaggatctctttgcagatgccacagtggagctatccttggacagcacacaaaataatcagaagaaggtgctagccaaaacactcatttctcttcctcctcaggaagccacaaattcttcgaagccccagccaacctatgaggagctagaggaagaagaacaggaggatcaatttgatttgacagtcggtataactgatcctgagaagataggggatggtatgaatgcatatgtagcctacaaagttacaacacagacaagcttaccattgttcagaagcaaacagtttgcagtaaaaagaagatttagtgactttctgggtctttatgagaagctttccgagaagcactctcagaatggcttcattgtccctccacccccggagaagagcctcatagggatgacaaaagtgaaagttgggaaggaagattcttcttctgcagaatttcttgaaaaacggagggccgctttagaaaggtaccttcagaggattgtaaatcatcctaccatgttacaggaccctgacgtcagagagttcttggaaaaagaagagctgccacgtgccgtgggtacccagacattgagtggtgctggtctcctcaagatgttcaacaaagccacagatgccgtcagcaaaatgaccatcaagatgaatgaatcagacatttggtttgaggagaagctccaggaggtagagtgtgaggagcagcgcttacggaaactgcatgctgttgtagaaactctagtcaaccataggaaaggtaacaagctctgaaatgcacttggagctaggggaaattgttgtctctagtgaactggagatgcgagggcatgctgttccaatcctctcagccatccaagttgaaattctcagcccacctggtccttgatgttctgat

SEQ ID NO: 357668 - DNA, 1818 bp, Homo sapiens
  misc_feature (1818)..(1818): n is a, c, g, or t
ctcgataaagtgttgttgcggcttccgccgcgggtggaagaagatggcgtcgggtggtggtggctgtagcgcttcggagagactgcctccgcccttccccggcctggagccggagtccgagggggcggccgggggatcagaacccgaggctggggacagcgacaccgagggggaggacattttcaccggcgccgcggtggtcagtaaacatcagtctccaaagataactacatcccttcttcccatcaacaatggctccaaagaaaatgggatccatgaagaacaagaccaagagccacaggatctctttgcaggggatggtatgaatgcatatgtagcctacaaagttacaacacagacaagcttaccattgttcagaagcaaacagtttgcagtaaaaagaagatttagtgactttctgggtctttatgagaagctttccgagaagcactctcagaatggcttcattgtccctccacccccggagaagagcctcatagggatgacaaaagtgaaagttgggaaggaagattcttcttctgcagaatttcttgaaaaacggagggccgctttagaaaggtaccttcagaggattgtaaatcatcctaccatgttacaggaccctgacgtcagagagttcttggaaaaagaagagctgccacgtgccgtgggtacccagacattgagtggtgctggtctcctcaagatgttcaacaaagccacagatgccgtcagcaaaatgaccatcaagatgaatgaatcagacatttggtttgaggagaagctccaggaggtagagtgtgaggagcagcgcttacggaaactgcatgctgttgtagaaactctagtcaaccataggaaagagctagcgctgaacacagcccagtttgcaaagagtctagccatgcttgggagctctgaggacaacacggcattgtcacgggcactctcccagctggctgaggtggaagaaaaaattgagcagctccaccaggaacaggccaacaatgacttcttcctccttgctgagctcctgagtgactacattcgcctcctggccatagtccgcgctgccttcgaccagcgcatgaagacatggcagcgctggcaggatgcccaagccacactgcagaagaagcgggaggccgaggctcggctgctgtgggccaacaagcctgataagctgcagcaggccaaggacgagatcctcgagtgggagtctcgggtgactcaatatgaaagggacttcgagaggatttcaacagtggtccgaaaagaagtgatacggtttgagaaagagaaatccaaggacttcaagaaccacgtgatcaagtaccttgagacactcctttactcacagcagcagctggcaaagtactgggaagccttccttcctgaggcaaaggccatctcctaatggaccaaggaccccagagcccacctgtgtgacgctgcctttttatacactgtcctcctccaccttgatggacccctagtgatgcatcctgcctaggctggacttaaccccttcctccctgtccccacgaccaactgtccccagttactctaaccgttatttcatttagcttccatatatattttcttacctaagagaatagtttcctgctttaagcaaaagacctacaataggtggtggaattatgggatggggtggagtattgatataaatatataaatacaaatgtatatttttcaggatgtggtttaggaactgggaataacgttttctgttactcctgatggtgccatgaaaaggttatgtaataaaatattttaaaatcaggtaaaaaaaaaaan

SEQ ID NO: 357669 - DNA, 2230 bp, Homo sapiens
  misc_feature (2230)..(2230): n is a, c, g, or t
aggttcaggagagcagagaaaaggcggggccagacggagtagctcgaaggacctagggaaggggcctcaaggactacaagttccagcgtgctttgctcgatttcggcgggacaaaaacaatcttcgcggctcgtcagcacattgcatgctgggatgcgtgagctattttcttcggaaggcagcgaattgtattctgggacttgtagtgtccgcctggtagaagtggatgtaacggtctgttaaccgcgactgactcactcagtatccgtgataagttaaagatgaatcctgaaggggtaggggaaaggagatcttgagttctccagcacggagactctttacaattatttctccgcgggatccgctgacagccaacgtctttcttacttcctgatcggacaggaagtaggtttcagttgagtaaacatcagtctccaaagataactacatcccttcttcccatcaacaatggctccaaagaaaatgggatccatgaagaacaagaccaagagccacaggatctctttgcagatgccacagtggagctatccttggacagcacacaaaataatcagaagaaggtgctagccaaaacactcatttctcttcctcctcaggaagccacaaattcttcgaagccccagccaacctatgaggagctagaggaagaagaacaggaggatcaatttgatttgacagtcggtataactgatcctgagaagataggggatggtatgaatgcatatgtagcctacaaagttacaacacagacaagcttaccattgttcagaagcaaacagtttgcagtaaaaagaagatttagtgactttctgggtctttatgagaagctttccgagaagcactctcagaatggcttcattgtccctccacccccggagaagagcctcatagggatgacaaaagtgaaagttgggaaggaagattcttcttctgcagaatttcttgaaaaacggagggccgctttagaaaggtaccttcagaggattgtaaatcatcctaccatgttacaggaccctgacgtcagagagttcttggaaaaagaagagctgccacgtgccgtgggtacccagacattgagtggtgctggtctcctcaagatgttcaacaaagccacagatgccgtcagcaaaatgaccatcaagatgaatgaatcagacatttggtttgaggagaagctccaggaggtagagtgtgaggagcagcgcttacggaaactgcatgctgttgtagaaactctagtcaaccataggaaagagctagcgctgaacacagcccagtttgcaaagagtctagccatgcttgggagctctgaggacaacacggcattgtcacgggcactctcccagctggctgaggtggaagaaaaaattgagcagctccaccaggaacaggccaacaatgacttcttcctccttgctgagctcctgagtgactacattcgcctcctggccatagtccgcgctgccttcgaccagcgcatgaagacatggcagcgctggcaggatgcccaagccacactgcagaagaagcgggaggccgaggctcggctgctgtgggccaacaagcctgataagctgcagcaggccaaggacgagatcctcgagtgggagtctcgggtgactcaatatgaaagggacttcgagaggatttcaacagtggtccgaaaagaagtgatacggtttgagaaagagaaatccaaggacttcaagaaccacgtgatcaagtaccttgagacactcctttactcacagcagcagctggcaaagtactgggaagccttccttcctgaggcaaaggccatctcctaatggaccaaggaccccagagcccacctgtgtgacgctgcctttttatacactgtcctcctccaccttgatggacccctagtgatgcatcctgcctaggctggacttaaccccttcctccctgtccccacgaccaactgtccccagttactctaaccgttatttcatttagcttccatatatattttcttacctaagagaatagtttcctgctttaagcaaaagacctacaataggtggtggaattatgggatggggtggagtattgatataaatatataaatacaaatgtatatttttcaggatgtggtttaggaactgggaataacgttttctgttactcctgatggtgccatgaaaaggttatgtaataaaatattttaaaatcaggtaaaaaaaaaaan

SEQ ID NO: 357670 - DNA, 1019 bp, Homo sapiens
  misc_feature (1019)..(1019): n is a, c, g, or t
cagctgatttgtcccttttccttgtgagatcagagaggcctctgctgtcttttcctccttccagagctagcgctgaacacagcccagtttgcaaagagtctagccatgcttgggagctctgaggacaacacggcattgtcacgggcactctcccagctggctgaggtggaagaaaaaattgagcagctccaccaggaacaggccaacaatgacttcttcctccttgctgagctcctgagtgactacattcgcctcctggccatagtccgcgctgccttcgaccagcgcatgaagacatggcagcgctggcaggatgcccaagccacactgcagaagaagcgggaggccgaggctcggctgctgtgggccaacaagcctgataagctgcagcaggccaaggacgagatcctcgagtgggagtctcgggtgactcaatatgaaagggacttcgagaggatttcaacagtggtccgaaaagaagtgatacggtttgagaaagagaaatccaaggacttcaagaaccacgtgatcaagtaccttgagacactcctttactcacagcagcagctggcaaagtactgggaagccttccttcctgaggcaaaggccatctcctaatggaccaaggaccccagagcccacctgtgtgacgctgcctttttatacactgtcctcctccaccttgatggacccctagtgatgcatcctgcctaggctggacttaaccccttcctccctgtccccacgaccaactgtccccagttactctaaccgttatttcatttagcttccatatatattttcttacctaagagaatagtttcctgctttaagcaaaagacctacaataggtggtggaattatgggatggggtggagtattgatataaatatataaatacaaatgtatatttttcaggatgtggtttaggaactgggaataacgttttctgttactcctgatggtgccatgaaaaggttatgtaataaaatattttaaaatcaggtaaaaaaaaaaan

SEQ ID NO: 357671 - DNA, 1011 bp, Homo sapiens
aaagcatatatccatcccagtaattgtacacaaatgttcatagcactttattttctgtattagccccaaactggaaacaatccgcttatttatcagcagatgaatgtataaacacactattagaatatccaaacaatgtaaatattactaataaaaatgaacggactattgttacagcaatatggatggatctcaaaataattctactgaggacaagaagccagacaaaaaagaaagcacacaataattagaattacaaaagggcagaagtaaacttttgggagagatggatatgttcatgatttttattgtggctgctgttttacaagtatatacctatgttaatatgtatccaagtggatactaaatatgtgcagcttattgagtaattattgagcaattacgccttaatacatctgctaaaaaaaatctggcagacttttacccagaatatacaaagaactctcacacctcaataagaatcaacacaaaatttggcaaaatatttgaatagaaatttcaccaaagaagatattttgaatcatccataaccatactataatgattaaaattacaaaaactgatacaacttaaactctcatgcattgttggtggaaatggaaaatggtgcatctactctggaaaacagttttgaacttgcttataaagataaatccacacttaatcatacataaccatgcaacccagcaattccactcctaggtgtttccctaagagaaatgataacatatgtccacaaaaagccttgtccatgaatgtttatagtggcattgttcatggtcaccaaaaactcaaaacatctcaaatgttcattaacttgcaaatggataaacaaattgtgttctctatatacaatgaaatattatttagcaacaaaaaggaaggaactactgaaccacaacagaagttgtaggaactacagctcagatatgagtatcaaaaacatgctatggtaaagaagccaaaaatgaaaagactacataatatatt

SEQ ID NO: 357672 - DNA, 754 bp, Homo sapiens
gatcctaaatgtgtctctagcaaacctcaaagtacacaaaacaaaactgattgagctgaaaagagaaaagcacatttttaattgtatttggaaaattcatcacttcactgttagcaattggtagaattactagccatgattactagcagatacagaagaacaggacagcatcatcagccaacaggactgaagcaacattgtagaatagtgctcaacaaggccgggtgcggtggtccatgcctttaatcccagcactttgggaagcagaggcgggcagattgcttgaggtcaggaattcaagagtagcctggataacatggtgaaaccctgtctctactaaaaatacaaaaattagccaggcatggtggcgcatgcctgtattcccagctacttaagaagctgaggtaggagaatcgcttgaactgggaggcgaaggttgcagtaagccaagattgtgttacaaagcttgggttacagaataagactctgtctcaaaaaagaaaagaaaaaaaaagagtagtgcccaacaacagcaaaataaaatttttttctcaagtgtccatggaatattcagaaagatagaccatattctgggccataaataagccttggcagatttaaaagaattgaaatcattctgagtatgtatgttttctggccataatgaaaccaaactacaaatcagtaatagagtgacaataggaaaatatctaatcatttagaaattaaacatcagacttctaaataaagtctg

SEQ ID NO: 357673 - DNA, 489 bp, Homo sapiens
tgagcagcggaattcggaattctcagttcaccctcgagcgtcttaacgtgggcctggacgcctgtctgacgccctccagaggctggaagcagcaggaagagcccaggactgtggccttgagcagcccggagggcccaggaccaggctgcctcagcctctgaggtcccatcgtggcgggctgtggggcgttggtcggataggcagggcaggcacagaacagaccaggtgtccgcctctggccccgtggccttgctgagctctgtgtggagccaggcagcagaagaagcccctctgagtgaggggctgcggctcctccttgcggcagtgtggcctgctctttggttttccactggagttcacagctacctccttggctgaggtcaagggagccacgtgtgcagtgttctgtgtgaagtgtgccgtgtacagacccgttctcctctgtaacattcaggaaataaaactctttgctgtaaactgcctgcgttg

SEQ ID NO: 357674 - DNA, 323 bp, Homo sapiens
atgatgaaaccccgtctctactaaaaatactaaaagccgggcgtggtggcgcatacctgtaatcccagctacttgggaggctgaggcaggagaatcacttgaacccaggaggcagaggttgcagtgagccgagatcgcaccacagcactccagcctgggctatagagcaagactccttctcaaaaaaaaaaaaacaaaaaacagtatttcctgcttttgttatacatagcaacagccttgtctttatgtgtagggaaaagaaatgtttgatcctatattcaggctttattagtcaataataaagataaatatttgttgacaag

SEQ ID NO: 357675 - DNA, 1043 bp, Homo sapiens
ttagtgcttgagtaagggggacaggtctgcggcaatccctgtccactccggcaggaaggctgcctctggcttaaagattttgaggaaaggggagtcggggagggtgtaattggccaggtagatggtgtctccgcccgtgaggtatgcggcccagatcccgaacgtcccaatggtcatgatggtgtggttacactgtgtgagtagagcaaaatctttggcaggtgagccctcaatgccatcgccagcaaacaccacatcaccgtgggaggtgtcaatgttctcccgacaccaggccatgccattactggtgaccacgaagatgagggagctgtagcgagctcggaaccagtccagggcctgctgtaggtatcgccggtcggccaccacccccttccacacttttggcatgacatggacatagtcccctcggcgaacatggacccctacaaaggtgcccggccggctcccgttcacctgcaggccccgcaggaacttctgggcctcctcccgcacgtggtcgtgcagggtgaactcctggaggatctcctggcggaggtggtggtagaaggtccaggagcaggggtagccggtgaagcggacgtactcccccgggatgtggcggtattcctcctccatccagtcgttcaggtggtagttctgccaggggatcctgctggccgtggcgctgtgcagcaccggcagggtgattctgaagatgggggccagggtgctgtgcatctgggccgggatgaaggcgggccgcccgttcatcttggccagggcgtacagcgtggcgtactcgcccatctggttccccaggcggcccttggagttgatagtgaacaggtcctcccggggcaggtgtctgggggccaggaccacacgggctgagtatgcccagggcgcaggcaccagagccaggtgctggtggcagtgaaagatggtggacaccacaaaaatggcaaagacgaagtagaaggtggagaaggaagggcgggtggcccagaatcccttgacggggctgtggggaggagagaggacat

SEQ ID NO: 357676 - DNA, 368 bp, Homo sapiens
ccacacccccccccccccatgaagaccttcaagtagttcagcctactgctgaatctggacgtcccgattcccccctcctattggcttcttgtggttcagcccagtgcttctcgacctggtacattctggttccccgctcgcagacttccgacggtagggcccagcgcggcgcagcccacgccccctgcacaccccccgccccttccatcctatactgacgccccctgccgttgttctcttacatggatggtgtcccccatggtcgctgagactccccttcgaggattgcacccgcccgtcctaagcctccccacaaggcgaggggagttacccctaaaacaaagctattaaagggacagaatacttcc

SEQ ID NO: 357677 - DNA, 1911 bp, Homo sapiens
gcctgtgttgggttgacagtgagggtaataatgacttgttggttgattgtagatattgggctgttaattgtcagttcagtgttttaatctgacgcaggcttatgcggaggagaatgttttcatgttacttatactaacattagttcttctatagggtgatagattggtccaattgggtgtgaggagttcagttatatgtttgggattttttaggtagtgggtgttgagcttgaacgctttcttaattggtggctgcttttaggcctactatggggcagaagcaggaagcaggtgaagaaggagagaggggagaagaggcaggagctggaaaggagagagggaggaggaggaggagatgcgggatggagacctggagttaggtggcttgggagagcttaatgaaaagagaacggagaggaggtgtgggttaggaaccaagaggtagccctgggggcagcagaaggctgagaggagtaggaagatcaggagctagagggagactggagggttccgggaaaagagcagaggaaagaggaaagacacagagagacgggagagagaagaagagtgggtttgaagggcggatctcagtccctggctgctttggcatttggggaactgggactccctgtggggaggagaggaaagctggaagtcctggagggacagggtcccagaaggaggggacagaggagctgagagaggggggcagggcgttgggcaggggtccctcggaggcctcctggggatgggggctgcagctcgtctgagcgcccctcgagcgctggtactctgggctgcactgggggcagcagctcacatcggaccagcacctgaccccgaggactggtggagctacaaggataatctccagggaaacttcgtgccagggcctcctttctggggcctggtgaatgcagcgtggagtctgtgtgctgtggggaagcggcagagccccgtggatgtggagctgaagagggttctttatgacccctttctgcccccattaaggctcagcactggaggagagaagctccggggaaccttgtacaacaccggccgacatgtctccttcctgcctgcaccccgacctgtggtcaatgtgtctggaggtcccctcctttacagccaccgactcagtgaactgcggctgctgtttggagctcgcgacggagccggctcggaacatcagatcaaccaccagggcttctctgctgaggtgcagctcattcacttcaaccaggaactctacgggaatttcagcgctgcctcccgcggccccaatggcctggccattctcagcctctttgtcaacgttgccagtacctctaacccattcctcagtcgcctccttaaccgcgacaccatcactcgcatctcctacaagaatgatgcctactttcttcaagacctgagcctggagctcctgttccctgaatccttcggcttcatcacctatcagggctctctcagcaccccgccctgctccgagactgtcacctggatcctcattgaccgggccctcaatatcacctcccttcagatgcactccctgagactcctgagccagaatcctccatctcagatcttccagagcctcagcggtaacagccggcccctgcagcccttggcccacagggcactgaggggcaacagggacccccggcaccccgagaggcgctgccgaggccccaactaccgcctgcatgtggatggtgtcccccatggtcgctgagactccccttcgaggattgcacccgcccgtcctaagcctccccacaaggcgaggggagttacccctaaaacaaagctattaaagggacagaatacttcctgttttctcagtggtctgattctaggcgcggtggggaaacatttgggtattaaagaacagacttcttccggaaacca

SEQ ID NO: 357678 - DNA, 1834 bp, Homo sapiens
gcctgtgttgggttgacagtgagggtaataatgacttgttggttgattgtagatattgggctgttaattgtcagttcagtgttttaatctgacgcaggcttatgcggaggagaatgttttcatgttacttatactaacattagttcttctatagggtgatagattggtccaattgggtgtgaggagttcagttatatgtttgggattttttaggtagtgggtgttgagcttgaacgctttcttaattggtggctgcttttaggcctactatggggcagaagcaggaagcaggtgaagaaggagagaggggagaagaggcaggagctggaaaggagagagggaggaggaggaggagatgcgggatggagacctggagttaggtggcttgggagagcttaatgaaaagagaacggagaggaggtgtgggttaggaaccaagaggtagccctgggggcagcagaaggctgagaggagtaggaagatcaggagctagagggagactggagggttccgggaaaagagcagaggaaagaggaaagacacagagagacgggagagagaagaagagtgggtttgaagggcggatctcagtccctggctgctttggcatttggggaactgggactccctgtggggaggagaggaaagctggaagtcctggagggacagggtcccagaaggaggggacagaggagctgagagaggggggcagggcgttgggcaggggtccctcggaggcctcctggggatgggggctgcagctcgtctgagcgcccctcgagcgctggtactctgggctgcactgggggcagcagctcacatcggaccagcacctgaccccgaggactggtggagctacaaggataatctccagggaaacttcgtgccagggcctcctttctggggcctggtgaatgcagcgtggagtctgtgtgctgtggggaagcggcagagccccgtggatgtggagctgaagagggttctttatgacccctttctgcccccattaaggctcagcactggaggagagaagctccggggaaccttgtacaacaccggccgacatgtctccttcctgcctgcaccccgacctgtggtcaatgtgtctggaggtcccctcctttacagccaccgactcagtgaactgcggctgctgtttggagctcgcgacggagccggctcggaacatcagatcaaccaccagggcttctctgctgaggtgcagctcattcacttcaaccaggaactctacgggaatttcagcgctgcctcccgcggccccaatggcctggccattctcagcctctttgtcaacgttgccagtacctctaacccattcctcagtcgcctccttaaccgcgacaccatcactcgcatctcctacaagaatgatgcctactttcttcaagacctgagcctggagctcctgttccctgaatccttcggcttcatcacctatcagggctctctcagcaccccgccctgctccgagactgtcacctggatcctcattgaccgggccctcaatatcacctcccttcagatgcactccctgagactcctgagccagaatcctccatctcagatcttccagagcctcagcggtaacagccggcccctgcagcccttggcccacagggcactgaggggcaacagggacccccggcaccccgagaggcgctgccgaggccccaactaccgcctgcatgtggatggtgtcccccatggtcgctgagactccccttcgaggattgcacccgcccgtcctaagcctccccacaaggcgaggggagttacccctaaaacaaagctattaaagggacagaatacttcc

SEQ ID NO: 357679 - DNA, 1888 bp, Homo sapiens
gcctgtgttgggttgacagtgagggtaataatgacttgttggttgattgtagatattgggctgttaattgtcagttcagtgttttaatctgacgcaggcttatgcggaggagaatgttttcatgttacttatactaacattagttcttctatagggtgatagattggtccaattgggtgtgaggagttcagttatatgtttgggattttttaggtagtgggtgttgagcttgaacgctttcttaattggtggctgcttttaggcctactatggggcagaagcaggaagcaggtgaagaaggagagaggggagaagaggcaggagctggaaaggagagagggaggaggaggaggagatgcgggatggagacctggagttaggtggcttgggagagcttaatgaaaagagaacggagaggaggtgtgggttaggaaccaagaggtagccctgggggcagcagaaggctgagaggagtaggaagatcaggagctagagggagactggagggttccgggaaaagagcagaggaaagaggaaagacacagagagacgggagagagaagaagagtgggtttgaagggcggatctcagtccctggctgctttggcatttggggaactgggactccctgtggggaggagaggaaagctggaagtcctggagggacagggtcccagaaggaggggacagaggagctgagagaggggggcagggcgttgggcaggggtccctcggaggcctcctggggatgggggctgcagctcgtctgagcgcccctcgagcgctggtactctgggctgcactgggggcagcagctcacatcggaccagcacctgaccccgaggactggtggagctacaaggataatctccagggaaacttcgtgccagggcctcctttctggggcctggtgaatgcagcgtggagtctgtgtgctgtggggaagcggcagagccccgtggatgtggagctgaagagggttctttatgacccctttctgcccccattaaggctcagcactggaggagagaagctccggggaaccttgtacaacaccggccgacatgtctccttcctgcctgcaccccgacctgtggtcaatgtgtctggaggtcccctcctttacagccaccgactcagtgaactgcggctgctgtttggagctcgcgacggagccggctcggaacatcagatcaaccaccagggcttctctgctgaggtgcagctcattcacttcaaccaggaactctacgggaatttcagcgctgcctcccgcggccccaatggcctggccattctcagcctctttgtcaacgttgccagtacctctaacccattcctcagtcgcctccttaaccgcgacaccatcactcgcatctcctacaagaatgatgcctactttcttcaagacctgagcctggagctcctgttccctgaatccttcggcttcatcacctatcagggctctctcagcaccccgccctgctccgagactgtcacctggatcctcattgaccgggccctcaatatcacctcccttcagatgcactccctgagactcctgagccagaatcctccatctcagatcttccagagcctcagcggtaacagccggcccctgcagcccttggcccacagggcactgaggggcaacagggacccccggcaccccgagaggcgctgccgaggccccaactaccgcctgcatgcccagtgcttctcgacctggtacattctggttccccgctcgcagacttccgacgtggatggtgtcccccatggtcgctgagactccccttcgaggattgcacccgcccgtcctaagcctccccacaaggcgaggggagttacccctaaaacaaagctattaaagggacagaatacttcc

SEQ ID NO: 357680 - DNA, 2082 bp, Homo sapiens
gcctgtgttgggttgacagtgagggtaataatgacttgttggttgattgtagatattgggctgttaattgtcagttcagtgttttaatctgacgcaggcttatgcggaggagaatgttttcatgttacttatactaacattagttcttctatagggtgatagattggtccaattgggtgtgaggagttcagttatatgtttgggattttttaggtagtgggtgttgagcttgaacgctttcttaattggtggctgcttttaggcctactatggggcagaagcaggaagcaggtgaagaaggagagaggggagaagaggcaggagctggaaaggagagagggaggaggaggaggagatgcgggatggagacctggagttaggtggcttgggagagcttaatgaaaagagaacggagaggaggtgtgggttaggaaccaagaggtagccctgggggcagcagaaggctgagaggagtaggaagatcaggagctagagggagactggagggttccgggaaaagagcagaggaaagaggaaagacacagagagacgggagagagaagaagagtgggtttgaagggcggatctcagtccctggctgctttggcatttggggaactgggactccctgtggggaggagaggaaagctggaagtcctggagggacagggtcccagaaggaggggacagaggagctgagagaggggggcagggcgttgggcaggggtccctcggaggcctcctggggatgggggctgcagctcgtctgagcgcccctcgagcgctggtactctgggctgcactgggggcagcagctcacatcggaccagcacctgaccccgaggactggtggagctacaaggataatctccagggaaacttcgtgccagggcctcctttctggggcctggtgaatgcagcgtggagtctgtgtgctgtggggaagcggcagagccccgtggatgtggagctgaagagggttctttatgacccctttctgcccccattaaggctcagcactggaggagagaagctccggggaaccttgtacaacaccggccgacatgtctccttcctgcctgcaccccgacctgtggtcaatgtgtctggaggtcccctcctttacagccaccgactcagtgaactgcggctgctgtttggagctcgcgacggagccggctcggaacatcagatcaaccaccagggcttctctgctgaggtgcagctcattcacttcaaccaggaactctacgggaatttcagcgctgcctcccgcggccccaatggcctggccattctcagcctctttgtcaacgttgccagtacctctaacccattcctcagtcgcctccttaaccgcgacaccatcactcgcatctcctacaagaatgatgcctactttcttcaagacctgagcctggagctcctgttccctgaatccttcggcttcatcacctatcagggctctctcagcaccccgccctgctccgagactgtcacctggatcctcattgaccgggccctcaatatcacctcccttcagatgcactccctgagactcctgagccagaatcctccatctcagatcttccagagcctcagcggtaacagccggcccctgcagcccttggcccacagggcactgaggggcaacagggacccccggcaccccgagaggcgctgccgaggccccaactaccgcctgcatggtatggtccagtctgcaccccctctaagtcttgggctaaccctcttatatgtgtctccccttggtgtctcagtgtgattcagtcccatcctccttcctgcgtctatatggtctagcctcgtgagctgtctctttttctctctttccctacatgtctatgtggtacagtccacctgccagccctaggccattgctagcccacgatttgtctttcctcttcactgctttgtaacttggtctataacccttgacccctgccttcctatggtccaattacctactgttctgtgcttcctattactgtgaatttccaaaatggtacaatttggatcctctctccctttccaagtcgtactaccttacgctgttccaca

SEQ ID NO: 357681 - DNA, 1185 bp, Homo sapiens
cctggccaacttggtgaaacccgtctctgctaaacttggaaactattccaagattcttctaggacccagaattctggatctgagcccagtcctccctcagacccaggagtctaggtccctagcccctcctcccctgggatctgggagtccagaccacagcccactcagcagataccagccctgggatccagtctctatttctgactccttgtcctcctactccgaccccacccccagggccggcctcctttctggggcctggtgaatgcagcgtggagtctgtgtgctgtggggaagcggcagagccccgtggatgtggagctgaagagggttctttatgacccctttctgcccccattaaggctcagcactggaggagagaagctccggggaaccttgtacaacaccggccgacatgtctccttcctgcctgcaccccgacctgtggtcaatgtgtctggaggtcccctcctttacagccaccgactcagtgaactgcggctgctgtttggagctcgcgacggagccggctcggaacatcagatcaaccaccagggcttctctgctgaggtgcagctcattcacttcaaccaggaactctacgggaatttcagcgctgcctcccgcggccccaatggcctggccattctcagcctctttgtcaacgttgccagtacctctaacccattcctcagtcgcctccttaaccgcgacaccatcactcgcatctcctacaagaatgatgcctactttcttcaagacctgagcctggagctcctgttccctgaatccttcggcttcatcacctatcagggctctctcagcaccccgccctgctccgagactgtcacctggatcctcattgaccgggccctcaatatcacctcccttcagatgcactccctgagactcctgagccagaatcctccatctcagatcttccagagcctcagcggtaacagccggcccctgcagcccttggcccacagggcactgaggggcaacagggacccccggcaccccgagaggcgctgccgaggccccaactaccgcctgcatgtggatggtgtcccccatggtcgctgagactccccttcgaggattgcacccgcccgtcctaagcctccccacaaggcgaggggagttacccctaaaacaaagctattaaagggacagaatacttcc

SEQ ID NO: 357682 - DNA, 1588 bp, Homo sapiens
gcctgtgttgggttgacagtgagggtaataatgacttgttggttgattgtagatattgggctgttaattgtcagttcagtgttttaatctgacgcaggcttatgcggaggagaatgttttcatgttacttatactaacattagttcttctatagggtgatagattggtccaattgggtgtgaggagttcagttatatgtttgggattttttaggtagtgggtgttgagcttgaacgctttcttaattggtggctgcttttaggcctactatggggcagaagcaggaagcaggtgaagaaggagagaggggagaagaggcaggagctggaaaggagagagggaggaggaggaggagatgcgggatggagacctggagttaggtggcttgggagagcttaatgaaaagagaacggagaggaggtgtgggttaggaaccaagaggtagccctgggggcagcagaaggctgagaggagtaggaagatcaggagctagagggagactggagggttccgggaaaagagcagaggaaagaggaaagacacagagagacgggagagagaagaagagtgggtttgaagggcggatctcagtccctggctgctttggcatttggggaactgggactccctgtggggaggagaggaaagctggaagtcctggagggacagggtcccagaaggaggggacagaggagctgagagaggggggcagggcgttgggcaggggtccctcggaggcctcctggggatgggggctgcagctcgtctgagcgcccctcgagcgctggtactctgggctgcactgggggcagcagctcacatcggaccagcacctgaccccgaggactggtggagctacaaggataatctccagggaaacttcgtgccagggcctcctttctggggcctggtgaatgcagcgtggagtctgtgtgctgtggggaagcggcagagccccgtggatgtggagctgaagagggttctttatgacccctttctgcccccattaaggctcagcactggaggagagaagctccggggaaccttgtacaacaccggccgacatgtctccttcctgcctgcaccccgacctgtggtcaatgtgtctggaggtcccctcctttacagccaccgactcagtgaactgcggctgctgtttggagctcgcgacggagccggctcggaacatcagatcaaccaccagggcttctctgctgaggtgcagctcattcacttcaaccaggaactctacgggaatttcagcgctgcctcccgcggccccaatggcctggccattctcagcctctttgtcaacgttgccagtacctctaacccattcctcagtcgcctccttaaccgcgacaccatcactcgcatctcctacaagaatgatgcctactttcttcaagacctgagcctggagctcctgttccctgaatccttcggcttcatcacctatcagggctctctcagcaccccgccctgctccgagactgtcacctggatcctcattgaccgggccctcaatatcacctcccttcagatgcactccctaagttcagaaccaggggggatccttagagcgacc

SEQ ID NO: 357683 - DNA, 1212 bp, Homo sapiens
gcctgtgttgggttgacagtgagggtaataatgacttgttggttgattgtagatattgggctgttaattgtcagttcagtgttttaatctgacgcaggcttatgcggaggagaatgttttcatgttacttatactaacattagttcttctatagggtgatagattggtccaattgggtgtgaggagttcagttatatgtttgggattttttaggtagtgggtgttgagcttgaacgctttcttaattggtggctgcttttaggcctactatggggcagaagcaggaagcaggtgaagaaggagagaggggagaagaggcaggagctggaaaggagagagggaggaggaggaggagatgcgggatggagacctggagttaggtggcttgggagagcttaatgaaaagagaacggagaggaggtgtgggttaggaaccaagaggtagccctgggggcagcagaaggctgagaggagtaggaagatcaggagctagagggagactggagggttccgggaaaagagcagaggaaagaggaaagacacagagagacgggagagagaagaagagtgggtttgaagggcggatctcagtccctggctgctttggcatttggggaactgggactccctgtggggaggagaggaaagctggaagtcctggagggacagggtcccagaaggaggggacagaggagctgagagaggggggcagggcgttgggcaggggtccctcggaggcctcctggggatgggggctgcagctcgtctgagcgcccctcgagcgctggtactctgggctgcactgggggcagcagatccttcggcttcatcacctatcagggctctctcagcaccccgccctgctccgagactgtcacctggatcctcattgaccgggccctcaatatcacctcccttcagatgcactccctgagactcctgagccagaatcctccatctcagatcttccagagcctcagcggtaacagccggcccctgcagcccttggcccacagggcactgaggggcaacagggacccccggcaccccgagaggcgctgccgaggccccaactaccgcctgcatgtggatggtgtcccccatggtcgctgagactccccttcgaggattgcacccgcccgtcctaagcctccccacaaggcgaggggagttacccctaaaacaaagctattaaagggacagaatacttcc

SEQ ID NO: 357684 - DNA, 2024 bp, Homo sapiens
ttttttgcgatggagtctcgctctgtggcccaggctggagtgcagtggtatgatctcggtttactgcaacctctgcttcccaattcaagctatcctcctgcttcagcctccggagtagctgggattaggggcacgcaccaccgtgcctggctttttgtatttttagtagagactgggtttcgccatgttggccaggctggtctcgaactcctgacctcaagtgatccaccagccttggcttcccaaagggctgggattacaggcgtgccaccgcacccggcccttccctcacattcttttgtgataaggcccactaactccaaagccaaaattcctagttgcccagaaaatcgagttcccctatccttcagggcagggatggcttcgtcctgggacgtgagtgcaaaatatctgggctctgtgctaccagtgctgccaggaaggagagggcaaaactgcgtttccattggaaagcaatgccagtgttcctgacgtgctgcatacatgtgagcagccgacacctcccacacggtcacaaggcactggctctaagcgaatttgctcagctcccaccagctgctactggtgtttagttctgtggtttgtgcattttgtggttgacatactaaggcacagaggttgagtcagttgtccaaactcactcagctatgaagtagataagcctggatccaaactgcatgagggaccgtgagtccatgccccgcacgccccactcactgcccctcgggtcacaggatgaggaccaggcacatgcagggctggctagaggccgttctgtccagcctgtccaaggtcagccgcaaggcccacccactctggcaggaaggccgcttacggcctaaagaccacgttgaaaggggagttgggcagggtgaagttggccaggtagacagtgtccccgcccgcgaggtacgcggcccagaccccgaaggtgcccacggtgatgatggtgtggttgcactgtgtgagcagtgcgaagtccttggcaggtgagccctggaggccattgccagcgaacaccacgtccccaagggagctgttgatgctctcccggcaccaggccatgtcatcgctggtgaccacaaagaccgggaggcggcagcaggcccggaaccagtccagggcccgctgcaggtagccggtcggccagcacccccttccatacgcgcggcatgacacggacatagtccccccggcgcacgtggacccccacgaaggtcgcctgccctgcccacttggcctgcaggccccgcaggaacttctgggcctcctcgcgcacgtggtcgtgcagggtgaactcctggaggatctcctggcggaggttggtggtagaaggtccaggagcaggggtagcccgtgaggcggacacagcgcccccgggatgtggcggtactcctcctccatccagtcgttcaggtggtagttctgccaggggatcctgctggccgtggcgctgtgcagcaccggcagggtgattctgaagatgggggccagggtgctgtgcatctgggccgggatgaaggcgggccgcccgttcatcttggccagggcgtacagcgtggcgtactcgcccatctggttccccaggcggcccttggagttgatagtgaacaggtcctcccggggcaggtgtctgggggccaggaccacacgggctgagtatgcccagggcgcaggcaccagagccaggtgctggtggcagtgaaagatggtggacaccacaaaaatggcaaagacgaagtagaaggtggagaaggaagggcgggtggcccagaatcccttgacggcttaaggctcggtgaacccacagctgacaaaaggttccagagaggaggaggaggggctggcttggggtcacgcagccagaggcaggggctgagcaaagtttccaacagcgattgtctcccaaaggtcagcccctgcccgatcgcgatggcggccaccacaaggcggggctgagccagtgggcaggggtggagtgggatggagcgggacccccgact

SEQ ID NO: 357685 - DNA, 1305 bp, Homo sapiens
gcctgtgttgggttgacagtgagggtaataatgacttgttggttgattgtagatattgggctgttaattgtcagttcagtgttttaatctgacgcaggcttatgcggaggagaatgttttcatgttacttatactaacattagttcttctatagggtgatagattggtccaattgggtgtgaggagttcagttatatgtttgggattttttaggtagtgggtgttgagcttgaacgctttcttaattggtggctgcttttaggcctactatggggcagaagcaggaagcaggtgaagaaggagagaggggagaagaggcaggagctggaaaggagagagggaggaggaggaggagatgcgggatggagacctggagttaggtggcttgggagagcttaatgaaaagagaacggagaggaggtgtgggttaggaaccaagaggtagccctgggggcagcagaaggctgagaggagtaggaagatcaggagctagagggagactggagggttccgggaaaagagcagaggaaagaggaaagacacagagagacgggagagagaagaagagtgggtttgaagggcggatctcagtccctggctgctttggcatttggggaactgggactccctgtggggaggagaggaaagctggaagtcctggagggacagggtcccagaaggaggggacagaggagctgagagaggggggcagggcgttgggcaggggtccctcggaggcctcctggggatgggggctgcagctcgtctgagcgcccctcgagcgctggtactctgggctgcactgggggcagcagctcacatcggaccagcacctgaccccgaggactggtggagctacaaggataatctccagggaaacttcgtgccaggtgccgccaaggcggggacccaggagtccggccctcccggcgcctccttcttcagactcaggaacctgggttcccagctccctcctcccccccaggaccaggagtcccagccccctcctctgtccctcaggagtcgggccagcttctgaaccccaggggctcaccatgggacattatacatgcgcatttcaagtagtgagtgggagtgagtggaaggaaagtgtgggggtggagattatgtgtgtgtttgccgggagaggaaggtcctggctcctgctaggaaccagaggctgggtggccccgtcccccaccttgtccagccttctcttgcagctcctctccccaacacattaataataatccagctgtgggataagagcgattaaaaaaaagaactacaactcccacggggctc

SEQ ID NO: 357686 - DNA, 2010 bp, Homo sapiens
ttttttgcgatggagtctcgctctgtggcccaggctggagtgcagtggtatgatctcggtttactgcaacctctgcttcccaattcaagctatcctcctgcttcagcctccggagtagctgggattaggggcacgcaccaccgtgcctggctttttgtatttttagtagagactgggtttcgccatgttggccaggctggtctcgaactcctgacctcaagtgatccaccagccttggcttcccaaagggctgggattacaggcgtgccaccgcacccggcccttccctcacattcttttgtgataaggcccactaactccaaagccaaaattcctagttgcccagaaaatcgagttcccctatccttcagggcagggatggcttcgtcctgggacgtgagtgcaaaatatctgggctctgtgctaccagtgctgccaggaaggagagggcaaaactgcgtttccattggaaagcaatgccagtgttcctgacgtgctgcatacatgtgagcagccgacacctcccacacggtcacaaggcactggctctaagcgaatttgctcagctcccaccagctgctactggtgtttagttctgtggtttgtgcattttgtggttgacatactaaggcacagaggttgagtcagttgtccaaactcactcagctatgaagtagataagcctggatccaaactgcatgagggaccgtgagtccatgccccgcacgccccactcactgcccctcgggtcacaggatgaggaccaggcacatgcagggctggctagaggccgttctgtccagcctgtccaaggtcagccgcaaggcccacccactctggcaggaaggccgcttacggcctaaagaccacgttgaaaggggagttgggcagggtgaagttggccaggtagacagtgtccccgcccgcgaggtacgcggcccagaccccgaaggtgcccacggtgatgatggtgtggttgcactgtgtgagcagtgcgaagtccttggcaggtgagccctggaggccattgccagcgaacaccacgtccccaagggagctgttgatgctctcccggcaccaggccatgtcatcgctggtgaccacaaagaccgggaggcggcagcaggcccggaaccagtccagggcccgctgcaggtagccggtcggccagcacccccttccatacgcgcggcatgacacggacatagtccccccggcgcacgtggacccccacgaaggtcgcctgccctgcccacttggcctgcaggccccgcaggaacttctgggcctcctcgcgcacgtggtcgtgcagggtgaactcctggaggatctcctggcggaggttggtggtagaaggtccaggagcaggggtagcccgtgaggcggacacagcgcccccgggatgtggcggtactcctcctccatccagtcgttcaggtggtagttctgccaggggatcctgctggccgtggcgctgtgcagcaccggcagggtgattctgaagatgggggccagggtgctgtgcatctgggccgggatgaaggcgggccgcccgttcatcttggccagggcgtacagcgtggcgtactcgcccatctggttccccaggcggcccttggagttgatagtgaacaggtcctcccggggcaggtgtctgggggccaggaccacacgggctgagtatgcccagggcgcaggcaccagagccaggtgctggtggcagtgaaagatggtggacaccacaaaaatggcaaagacgaagtagaaggtggagaaggaagggcgggtggcccagaatcccttgacggtggatggtgtcccccatggtcgctgagactccccttcgaggattgcacccgcccgtcctaagcctccccacaaggcgaggggagttacccctaaaacaaagctattaaagggacagaatacttcctgttttctcagtggtctgattctaggcgcggtggggaaacatttgggtattaaagaacagacttcttccggaaacca

SEQ ID NO: 357687 - DNA, 1882 bp, Homo sapiens
ttttttgcgatggagtctcgctctgtggcccaggctggagtgcagtggtatgatctcggtttactgcaacctctgcttcccaattcaagctatcctcctgcttcagcctccggagtagctgggattaggggcacgcaccaccgtgcctggctttttgtatttttagtagagactgggtttcgccatgttggccaggctggtctcgaactcctgacctcaagtgatccaccagccttggcttcccaaagggctgggattacaggcgtgccaccgcacccggcccttccctcacattcttttgtgataaggcccactaactccaaagccaaaattcctagttgcccagaaaatcgagttcccctatccttcagggcagggatggcttcgtcctgggacgtgagtgcaaaatatctgggctctgtgctaccagtgctgccaggaaggagagggcaaaactgcgtttccattggaaagcaatgccagtgttcctgacgtgctgcatacatgtgagcagccgacacctcccacacggtcacaaggcactggctctaagcgaatttgctcagctcccaccagctgctactggtgtttagttctgtggtttgtgcattttgtggttgacatactaaggcacagaggttgagtcagttgtccaaactcactcagctatgaagtagataagcctggatccaaactgcatgagggaccgtgagtccatgccccgcacgccccactcactgcccctcgggtcacaggatgaggaccaggcacatgcagggctggctagaggccgttctgtccagcctgtccaaggtcagccgcaaggcccacccactctggcaggaaggccgcttacggcctaaagaccacgttgaaaggggagttgggcagggtgaagttggccaggtagacagtgtccccgcccgcgaggtacgcggcccagaccccgaaggtgcccacggtgatgatggtgtggttgcactgtgtgagcagtgcgaagtccttggcaggtgagccctggaggccattgccagcgaacaccacgtccccaagggagctgttgatgctctcccggcaccaggccatgtcatcgctggtgaccacaaagaccgggaggcggcagcaggcccggaaccagtccagggcccgctgcaggtagccggtcggccagcacccccttccatacgcgcggcatgacacggacatagtccccccggcgcacgtggacccccacgaaggtcgcctgccctgcccacttggcctgcaggccccgcaggaacttctgggcctcctcgcgcacgtggtcgtgcagggtgaactcctggaggatctcctggcggaggttggtggtagaaggtccaggagcaggggtagcccgtgaggcggacacagcgcccccgggatgtggcggtactcctcctccatccagtcgttcaggtggtagttctgccaggggatcctgctggccgtggcgctgtgcagcaccggcagggtgattctgaagatgggggccagggtgctgtgcatctgggccgggatgaaggcgggccgcccgttcatcttggccagggcgtacagcgtggcgtactcgcccatctggttccccaggcggcccttggagttgatagtgaacaggtcctcccggggcaggtgtctgggggccaggaccacacgggctgagtatgcccagggcgcaggcaccagagccaggtgctggtggcagtgaaagatggtggacaccacaaaaatggcaaagacgaagtagaaggtggagaaggaagggcgggtggcccagaatcccttgacgggcacgtgaactttttctttttttttttttctctccttctcccatattttttcttctttttattctctttttttc

SEQ ID NO: 357688 - DNA, 728 bp, Homo sapiens
gcctgtgttgggttgacagtgagggtaataatgacttgttggttgattgtagatattgggctgttaattgtcagttcagtgttttaatctgacgcaggcttatgcggaggagaatgttttcatgttacttatactaacattagttcttctatagggtgatagattggtccaattgggtgtgaggagttcagttatatgtttgggattttttaggtagtgggtgttgagcttgaacgctttcttaattggtggctgcttttaggcctactatggggcagaagcaggaagcaggtgaagaaggagagaggggagaagaggcaggagctggaaaggagagagggaggaggaggaggagatgcgggatggagacctggagttaggtggcttgggagagcttaatgaaaagagaacggagaggaggtgtgggttaggaaccaagaggtagccctgggggcagcagaaggctgagaggagtaggaagatcaggagctagagggagactggagggttccgggaaaagagcagaggaaagaggaaagacacagagagacgggagagagaagaagagtgggtttgaagggcggatctcagtccctggctgctttggcatttggggaactgggactccctgtggggaggagaggattgcacccgcccgtcctaagcctccccacaaggcgaggggagttacccctaaaacaaagctattaaagggacagaatacttcc

SEQ ID NO: 357689 - DNA, 376 bp, Homo sapiens
tgctcccaggggcggggtttcctgcgtgacgtcaccaagaccattcactattcactcccagtttcccaccctccttccactgcagatgcactccctgagactcctgagccagaatcctccatctcagatcttccagagcctcagcggtaacagccggcccctgcagcccttggcccacagggcactgaggggcaacagggacccccggcaccccgagaggcgctgccgaggccccaactaccgcctgcatgtggatggtgtcccccatggtcgctgagactccccttcgaggattgcacccgcccgtcctaagcctccccacaaggcgaggggagttacccctaaaacaaagctattaaagggacagaatacttcc

SEQ ID NO: 357690 - DNA, 624 bp, Homo sapiens
tgctcccaggggcggggtttcctgcgtgacgtcaccaagaccattcactattcactcccagtttcccaccctccttccactgcagatgcactccctgagactcctgagccagaatcctccatctcagatcttccagagcctcagcggtaacagccggcccctgcagcccttggcccacagggcactgaggggcaacagggacccccggcaccccgagaggcgctgccgaggccccaactaccgcctgcatggtatggtccagtctgcaccccctctaagtcttgggctaaccctcttatatgtgtctccccttggtgtctcagtgtgattcagtcccatcctccttcctgcgtctatatggtctagcctcgtgagctgtctctttttctctctttccctacatgtctatgtggtacagtccacctgccagccctaggccattgctagcccacgatttgtctttcctcttcactgctttgtaacttggtctataacccttgacccctgccttcctatggtccaattacctactgttctgtgcttcctattactgtgaatttccaaaatggtacaatttggatcctctctccctttccaagtcgtactaccttacgctgttccaca

SEQ ID NO: 357691 - DNA, 1982 bp, Homo sapiens
taagtgtgcccatggcagcttgtgtatgcatatgtgcatgtatggatatgcatgtttgttggcagggatctgtgcacatttgtaggtctgcctttctacccgtcttgtgttctggactgtgcacatatctgccttgacagacttatcaatgttcacacactggctacacctgtaccttgtctatatgtgtggctgcgtgcgtgagtctgctggagctcagcacttgtgtggctgagctgtttacacctgtctgaatatgaggggtgtgttcatgtgtcccctgaacgcacactagtgcatgtgtcccttctgtgtgtgtcaaggcaggccgcacggccatgaggaccatagcccaggccttggaagttttccacgagcttagactccagcacccactgcacatggcaaatggaggaggaggaggagatgcgggatggagacctggagttaggtggcttgggagagcttaatgaaaagagaacggagaggaggtgtgggttaggaaccaagaggtagccctgggggcagcagaaggctgagaggagtaggaagatcaggagctagagggagactggagggttccgggaaaagagcagaggaaagaggaaagacacagagagacgggagagagaagaagagtgggtttgaagggcggatctcagtccctggctgctttggcatttggggaactgggactccctgtggggaggagaggaaagctggaagtcctggagggacagggtcccagaaggaggggacagaggagctgagagaggggggcagggcgttgggcaggggtccctcggaggcctcctggggatgggggctgcagctcgtctgagcgcccctcgagcgctggtactctgggctgcactgggggcagcagctcacatcggaccagcacctgaccccgaggactggtggagctacaaggataatctccagggaaacttcgtgccagggcctcctttctggggcctggtgaatgcagcgtggagtctgtgtgctgtggggaagcggcagagccccgtggatgtggagctgaagagggttctttatgacccctttctgcccccattaaggctcagcactggaggagagaagctccggggaaccttgtacaacaccggccgacatgtctccttcctgcctgcaccccgacctgtggtcaatgtgtctggaggtcccctcctttacagccaccgactcagtgaactgcggctgctgtttggagctcgcgacggagccggctcggaacatcagatcaaccaccagggcttctctgctgaggtgcagctcattcacttcaaccaggaactctacgggaatttcagcgctgcctcccgcggccccaatggcctggccattctcagcctctttgtcaacgttgccagtacctctaacccattcctcagtcgcctccttaaccgcgacaccatcactcgcatctcctacaagaatgatgcctactttcttcaagacctgagcctggagctcctgttccctgaatccttcggcttcatcacctatcagggctctctcagcaccccgccctgctccgagactgtcacctggatcctcattgaccgggccctcaatatcacctcccttcagatgcactccctgagactcctgagccagaatcctccatctcagatcttccagagcctcagcggtaacagccggcccctgcagcccttggcccacagggcactgaggggcaacagggacccccggcaccccgagaggcgctgccgaggccccaactaccgcctgcatgtggatggtgtcccccatggtcgctgagactccccttcgaggattgcacccgcccgtcctaagcctccccacaaggcgaggggagttacccctaaaacaaagctattaaagggacagaatacttcctgttttctcagtggtctgattctaggcgcggtggggaaacatttgggtattaaagaacagacttcttccggaaacca

SEQ ID NO: 357692 - DNA, 2293 bp, Homo sapiens
gcctgtgttgggttgacagtgagggtaataatgacttgttggttgattgtagatattgggctgttaattgtcagttcagtgttttaatctgacgcaggcttatgcggaggagaatgttttcatgttacttatactaacattagttcttctatagggtgatagattggtccaattgggtgtgaggagttcagttatatgtttgggattttttaggtagtgggtgttgagcttgaacgctttcttaattggtggctgcttttaggcctactatggggcagaagcaggaagcaggtgaagaaggagagaggggagaagaggcaggagctggaaaggagagagggaggaggaggaggagatgcgggatggagacctggagttaggtggcttgggagagcttaatgaaaagagaacggagaggaggtgtgggttaggaaccaagaggtagccctgggggcagcagaaggctgagaggagtaggaagatcaggagctagagggagactggagggttccgggaaaagagcagaggaaagaggaaagacacagagagacgggagagagaagaagagtgggtttgaagggcggatctcagtccctggctgctttggcatttggggaactgggactccctgtggggaggagaggaaagctggaagtcctggagggacagggtcccagaaggaggggacagaggagctgagagaggggggcagggcgttgggcaggggtccctcggaggcctcctggggatgggggctgcagctcgtctgagcgcccctcgagcgctggtactctgggctgcactgggggcagcagctcacatcggaccagcacctgaccccgaggactggtggagctacaaggataatctccagggaaacttcgtgccagggcctcctttctggggcctggtgaatgcagcgtggagtctgtgtgctgtggggaagcggcagagccccgtggatgtggagctgaagagggttctttatgacccctttctgcccccattaaggctcagcactggaggagagaagctccggggaaccttgtacaacaccggccgacatgtctccttcctgcctgcaccccgacctgtggtcaatgtgtctggaggtcccctcctttacagccaccgactcagtgaactgcggctgctgtttggagctcgcgacggagccggctcggaacatcagatcaaccaccagggcttctctgctgaggtgcagctcattcacttcaaccaggaactctacgggaatttcagcgctgcctcccgcggccccaatggcctggccattctcagcctctttgtcaacgttgccagtacctctaacccattcctcagtcgcctccttaaccgcgacaccatcactcgcatctcctacaagaatgatgcctactttcttcaagacctgagcctggagctcctgttccctgaatccttcggcttcatcacctatcagggctctctcagcaccccgccctgctccgagactgtcacctggatcctcattgaccgggccctcaatatcacctcccttcagatgcactccctgagactcctgagccagaatcctccatctcagatcttccagagcctcagcggtaacagccggcccctgcagcccttggcccacagggcactgaggggcaacagggacccccggcaccccgagaggcgctgccgaggccccaactaccgcctgcatgcccagtgcttctcgacctggtacattctggttccccgctcgcagacttccgacgtggatggtgtcccccatggtcgctgagactccccttcgaggattgcacccgcccgtcctaagcctccccacaaggcgaggggagttacccctaaaacaaagctattaaagggacagaatacttccaaaaaaaaaaaaaaaaaaaaaaaaaaacacattgtgtgcgggcgcgcgcgcccgggcgcctcccggaaagagtttttcataagacacacaatcgcggtgggggcgcgcgggggcgcccaaaaggtgaaagggcgacagtgggggccaaacacgcgtgtgtgcccaaaggaaaaaccgggggccaaggacaaagaggggcggggatattcctccaacacaatataaaaaagaggccggcgggggacaacacgcgagagcggttttgcggaaaaataatcccagagagggggactccggggagagggtcctataagagggggagaatccaaaacaagcgggggagatccccaagaggcgaaccccgcaaatctccaaaatatcagccccccacgcgggggcacagag

SEQ ID NO: 357693 - DNA, 1813 bp, Homo sapiens
gcctgtgttgggttgacagtgagggtaataatgacttgttggttgattgtagatattgggctgttaattgtcagttcagtgttttaatctgacgcaggcttatgcggaggagaatgttttcatgttacttatactaacattagttcttctatagggtgatagattggtccaattgggtgtgaggagttcagttatatgtttgggattttttaggtagtgggtgttgagcttgaacgctttcttaattggtggctgcttttaggcctactatggggcagaagcaggaagcaggtgaagaaggagagaggggagaagaggcaggagctggaaaggagagagggaggaggaggaggagatgcgggatggagacctggagttaggtggcttgggagagcttaatgaaaagagaacggagaggaggtgtgggttaggaaccaagaggtagccctgggggcagcagaaggctgagaggagtaggaagatcaggagctagagggagactggagggttccgggaaaagagcagaggaaagaggaaagacacagagagacgggagagagaagaagagtgggtttgaagggcggatctcagtccctggctgctttggcatttggggaactgggactccctgtggggaggagaggaaagctggaagtcctggagggacagggtcccagaaggaggggacagaggagctgagagaggggggcagggcgttgggcaggggtccctcggaggcctcctggggatgggggctgcagctcgtctgagcgcccctcgagcgctggtactctgggctgcactgggggcagcagctcacatcggaccagcacctgaccccgaggactggtggagctacaaggataatctccagggaaacttcgtgccagggcctcctttctggggcctggtgaatgcagcgtggagtctgtgtgctgtggggaagcggcagagccccgtggatgtggagctgaagagggttctttatgacccctttctgcccccattaaggctcagcactggaggagagaagctccggggaaccttgtacaacaccggccgacatgtctccttcctgcctgcaccccgacctgtggtcaatgtgtctggaggtcccctcctttacagccaccgactcagtgaactgcggctgctgtttggagctcgcgacggagccggctcggaacatcagatcaaccaccagggcttctctgctgaggtgcagctcattcacttcaaccaggaactctacgggaatttcagcgctgcctcccgcggccccaatggcctggccattctcagcctctttgtcaacgttgccagtacctctaacccattcctcagtcgcctccttaaccgcgacaccatcactcgcatctcctacaagaatgatgcctactttcttcaagacctgagcctggagctcctgttccctgaatccttcggcttcatcacctatcagggctctctcagcaccccgccctgctccgagactgtcacctggatcctcattgaccgggccctcaatatcacctcccttcagatgcactccctgagactcctgagccagaatcctccatctcagatcttccagagcctcagcggtaacagccggcccctgcagcccttggcccacagggcactgaggggcaacagggacccccggcaccccgagaggcgctgccgaggccccaactaccgcctgcatgtggatggtgtcccccatggtcgctgagactccccttcgaggattgcacccgcccgtcctaagcctccccacaaggctgtcggcatagtcgggggatcctcaagg

SEQ ID NO: 357694 - DNA, 999 bp, Homo sapiens
agagactgaaacagggagaagaggcaggagaggaggaggtggggagagcacgaagggcctcctttctggggcctggtgaatgcagcgtggagtctgtgtgctgtggggaagcggcagagccccgtggatgtggagctgaagagggttctttatgacccctttctgcccccattaaggctcagcactggaggagagaagctccggggaaccttgtacaacaccggccgacatgtctccttcctgcctgcaccccgacctgtggtcaatgtgtctggaggtcccctcctttacagccaccgactcagtgaactgcggctgctgtttggagctcgcgacggagccggctcggaacatcagatcaaccaccagggcttctctgctgaggtgcagctcattcacttcaaccaggaactctacgggaatttcagcgctgcctcccgcggccccaatggcctggccattctcagcctctttgtcaacgttgccagtacctctaacccattcctcagtcgcctccttaaccgcgacaccatcactcgcatctcctacaagaatgatgcctactttcttcaagacctgagcctggagctcctgttccctgaatccttcggcttcatcacctatcagggctctctcagcaccccgccctgctccgagactgtcacctggatcctcattgaccgggccctcaatatcacctcccttcagatgcactccctgagactcctgagccagaatcctccatctcagatcttccagagcctcagcggtaacagccggcccctgcagcccttggcccacagggcactgaggggcaacagggacccccggcaccccgagaggcgctgccgaggccccaactaccgcctgcatgtggatggtgtcccccatggtcgctgagactccccttcgaggattgcacccgcccgtcctaagcctccccacaaggcgaggggagttacccctaaaacaaagctattaaagggacagaatacttcc

SEQ ID NO: 357695 - DNA, 1382 bp, Homo sapiens
gcctgtgttgggttgacagtgagggtaataatgacttgttggttgattgtagatattgggctgttaattgtcagttcagtgttttaatctgacgcaggcttatgcggaggagaatgttttcatgttacttatactaacattagttcttctatagggtgatagattggtccaattgggtgtgaggagttcagttatatgtttgggattttttaggtagtgggtgttgagcttgaacgctttcttaattggtggctgcttttaggcctactatggggcagaagcaggaagcaggtgaagaaggagagaggggagaagaggcaggagctggaaaggagagagggaggaggaggaggagatgcgggatggagacctggagttaggtggcttgggagagcttaatgaaaagagaacggagaggaggtgtgggttaggaaccaagaggtagccctgggggcagcagaaggctgagaggagtaggaagatcaggagctagagggagactggagggttccgggaaaagagcagaggaaagaggaaagacacagagagacgggagagagaagaagagtgggtttgaagggcggatctcagtccctggctgctttggcatttggggaactgggactccctgtggggaggagaggaaagctggaagtcctggagggacagggtcccagaaggaggggacagaggagctgagagaggggggcagggcgttgggcaggggtccctcggaggcctcctggggatgggggctgcagctcgtctgagcgcccctcgagcgctggtactctgggctgcactgggggcagcagctcacatcggaccagcacctgaccccgaggactggtggagctacaaggataatctccagggaaacttcgtgccagggcctcctttctggggcctggtgaatgcagcgtggagtctgtgtgctgtggggaagcggcagagccccgtggatgtggagctgaagagggttctttatgacccctttctgcccccattaaggctcagcactggaggagagaagctccggggaaccttgtacaacaccggccgacatgtctccttcctgcctgcaccccgacctgtggtcaatgtgtctggaggtcccctcctttacagccaccgactcagtgaactgcggctgctgtttggagctcgcgacggagccggctcggaacatcagatcaaccaccagggcttctctgctgaggtgcagctcattcacttcaaccaggaactctacgggaatttcagcgctgcctcccgcggccccaatggcctggccattctcagcctctttgtcaacgttgccagtacctctacccattcctcagtcgcatcctaacgcgcagttgaaaacgacggtaactcta

SEQ ID NO: 357696 - DNA, 2020 bp, Homo sapiens
cgagcacgacaactgggggccaacgcccctgggggtttatgtggtatgatctcggtttactgcaacctctgcttcccaattcaagctatcctcctgcttcagcctccggagtagctgggattaggggcacgcaccaccgtgcctggctttttgtatttttagtagagactgggtttcgccatgttggccaggctggtctcgaactcctgacctcaagtgatccaccagccttggcttcccaaagggctgggattacaggcgtgccaccgcacccggcccttccctcacattcttttgtgataaggcccactaactccaaagccaaaattcctagttgcccagaaaatcgagttcccctatccttcagggcagggatggcttcgtcctgggacgtgagtgcaaaatatctgggctctgtgctaccagtgctgccaggaaggagagggcaaaactgcgtttccattggaaagcaatgccagtgttcctgacgtgctgcatacatgtgagcagccgacacctcccacacggtcacaaggcactggctctaagcgaatttgctcagctcccaccagctgctactggtgtttagttctgtggtttgtgcattttgtggttgacatactaaggcacagaggttgagtcagttgtccaaactcactcagctatgaagtagataagcctggatccaaactgcatgagggaccgtgagtccatgccccgcacgccccactcactgcccctcgggtcacaggatgaggaccaggcacatgcagggctggctagaggccgttctgtccagcctgtccaaggtcagccgcaaggcccacccactctggcaggaaggccgcttacggcctaaagaccacgttgaaaggggagttgggcagggtgaagttggccaggtagacagtgtccccgcccgcgaggtacgcggcccagaccccgaaggtgcccacggtgatgatggtgtggttgcactgtgtgagcagtgcgaagtccttggcaggtgagccctggaggccattgccagcgaacaccacgtccccaagggagctgttgatgctctcccggcaccaggccatgtcatcgctggtgaccacaaagaccgggaggcggcagcaggcccggaaccagtccagggcccgctgcaggtagccggtcggccagcacccccttccatacgcgcggcatgacacggacatagtccccccggcgcacgtggacccccacgaaggtcgcctgccctgcccacttggcctgcaggccccgcaggaacttctgggcctcctcgcgcacgtggtcgtgcagggtgaactcctggaggatctcctggcggaggttggtggtagaaggtccaggagcaggggtagcccgtgaggcggacacagcgcccccgggatgtggcggtactcctcctccatccagtcgttcaggtggtagttctgccaggggatcctgctggccgtggcgctgtgcagcaccggcagggtgattctgaagatgggggccagggtgctgtgcatctgggccgggatgaaggcgggccgcccgttcatcttggccagggcgtacagcgtggcgtactcgcccatctggttccccaggcggcccttggagttgatagtgaacaggtcctcccggggcaggtgtctgggggccaggaccacacgggctgagtatgcccagggcgcaggcaccagagccaggtgctggtggcagtgaaagatggtggacaccacaaaaatggcaaagacgaagtagaaggtggagaaggaagggcgggtggcccagaatcccttgacggcttaaggctcggtgaacccacagctgacaaaaggttccagagaggaggaggaggggctggcttggggtcacgcagccagaggcaggggctgagcaaagtttccaacagcgattgtctcccaaaggtcagcccctgcccgatcgcgatggcggccaccacaaggcggggctgagccagtgggcaggggtggagtgggatggagcgggacccccgact

SEQ ID NO: 357697 - DNA, 765 bp, Homo sapiens
agcgccatccgtaacgagcgccatccgtaacgagcgcctccgtaacgagcgtccgtaacgagcgccctccgtaacgagccctatctcagtggtggtggttggtggtagaaggtccaggagcaggggtagcccgtgaggcggacacagcgcccccgggatgtggcggtactcctcctccatccagtcgttcaggtggtagttctgccaggggatcctgctggccgtggcgctgtgcagcaccggcagggtgattctgaagatgggggccagggtgctgtgcatctgggccgggatgaaggcgggccgcccgttcatcttggccagggcgtacagcgtggcgtactcgcccatctggttccccaggcggcccttggagttgatagtgaacaggtcctcccggggcaggtgtctgggggccaggaccacacgggctgagtatgcccagggcgcaggcaccagagccaggtgctggtggcagtgaaagatggtggacaccacaaaaatggcaaagacgaagtagaaggtggagaaggaagggcgggtggcccagaatcccttgacggtggatggtgtcccccatggtcgctgagactccccttcgaggattgcacccgcccgtcctaagcctccccacaaggcgaggggagttacccctaaaacaaagctattaaagggacagaatacttcctgttttctcagtggtctgattctaggcgcggtggggaaacatttgggtattaaagaacagacttcttccggaaacca

SEQ ID NO: 357698 - DNA, 1587 bp, Homo sapiens
  misc_feature (1560)..(1560): n is a, c, g, or t
  misc_feature (1568)..(1568): n is a, c, g, or t
ctgacttatgaggaagtgctgaagagaaaccatatgcagtatgaaattgtcatcaaagtcaagcccaagcagctggtgcatcattttgagattgatgtggacatcttcgagccccaggggatcagcaagctggatgcccaggcctctttcctgccgaaggaactggcagcccaaactatcaagaagtccttctcaggaaaaaagggtcatgtgctgttccgtcccaccgtgagccagcagcagtcctgccccacatgctctacatccttactgaacgggcacttcaaggtgacctacgatgtcagtcgagacaagatctgcgacctcctggtggccaataaccactttgcccacttctttgccccccaaaacctgacaaacatgaacaagaacgtggtttttgtgattgacatcagtggctccatgagaggccagaaagtgaagcagaccaaggaggcactccttaaaattctgggggacatgcagccaggggactactttgacctggttctttttgggactcgagtacaatcgtggaagggctcgctggtgcaagcatctgaggccaacctacaagcagctcaagactttgtgcggggcttttccctggatgaggccacaaacctgaatggaggtttgctccggggaattgagatcttgaaccaagttcaggaaagcctcccagaactcagcaaccatgcctcaatactcatcatgttgacagatggcgatcccacagagggggtgacggaccgttcccaaatcctcaagaacgtccgcaacgccatccggggcaggttcccgctctacaacctgggtttcggccacaatgtggactttaactttctggaggtcatgtccatggagaacaacggacgggcccagagaatctacgaggaccatgatgccacccagcagctgcagggtttctacagccaggtagccaaacccctgctggtggatgtggatttgcagtacccccaggatgctgtcttggccctgacccagaaccaccataaacagtactacgaaggctcagagattgtggtggccgggcgcattgctgacaacaaacagagcagcttcaaggctgatgtgcaggcccatggggagggacaagaattcagtataacctgcctagtggatgaggaggagatgaagaaactgctccgagagcgtggccacatgctggagaaccacgtcgagcgcctctgggcctacctcaccatccaggagctgctggccaagcggatgaaggtggacagggaggagagggccaacctgtcatcccaggccctgcggatgtcgctggactatgggtttgtgaccccactgacctccatgagcatcaggggcatggcggaccaggacggcctgaagcccaccatcgacaagccctcagaggattctccgcctttggagatgctgggacccagaaggacgttcgtgctgtcagccttgcagccttctcctactcattccagctccaatacccagcggctgccagaccgagtgaccggcgtggacacagacccttcaatttcattcattccatgttgncccagtanagagggacaacttgttgtt

SEQ ID NO: 357699 - DNA, 628 bp, Homo sapiens
tcacaccacagtagacaaatgcctgacatggcacagtaggcaaatgcccgacacatcatgacagggcactgatatgtctgcctgacactccttcctttggttcctagttcctgatgcagacgtcacctggcctggtcaaagtattcagtcctcctggctacagtgaatgactgggcccctctcatgcatgaatacaccaccctagtggagccactcagagctctctctcatacttgttcttttctggtactacagaccaaacggaccctgtgagcatggggctgccagtgaaaggaggatgcctgggaatgaaatcaatagaagagatgcagaaagcctacggaaaaacagcgtgctgatactatttgacacagcaatgattatttcttacctttggcaccttcctgcatttttattctgttcagcctcttctgctgctctcttagcagggcttgctgctgaatctctaaggtgtgatgatctcttggaggatccaggtacataaatttcagatcaactcgtgtttctgaatctggtataaaaaatatgttatataactaagttaaatgttgttttcaaatgggattttgtaaaacttcactgtaagtaacatgagtaacctaatttc

SEQ ID NO: 357700 - DNA, 7262 bp, Homo sapiens
cggccgcggcgggtgctaatccccacagtagccagggtagcccttctctcgcggtgcctctgagagccgccgccacctcgtccctcagttcccggcagacagccgcccgggccgggctccctcaccgccaccagggccggagggacgagtgagaggggcggccgggacgcgacccccgggccgggagaagcggaggcccgacgggcgcggccctcgaggtacggcttcttgggggcggcgaggacctcgacgcccttcgccgacaccgcggctggtcccgctcgcccgccccttcctgatcctgccgctgccctccacgcctccaatcccccacctccaccccctctcctttctctcttctcttccttcctctcctcctcctcccctccagccgctgggagccgcgggtcggacgagccgccgcctccttctctgcgtccatgtatgaggggaagaagacgaagaacatgttcctgacccgggctctggagaagatattggccgacaaggaagtgaagaaggcgcatcactcccagctgcgcaaagcttgcgaggtggcgttagaggaaataaaagcggaaactgaaaaacagagtcctcctcatggagaagcaaaagctggatcaagcacccttccaccagtgaaatcaaagacaaattttattgaagcagacaagtacttcttgccttttgagttggcatgccagtccaaatgtcctcgcatagttagtacatctctagattgcttacagaaacttattgcttatgggcacttgactggcaatgctccagatagtacaacaccaggcaaaaaattaattgatagaattattgaaacaatatgtggctgctttcagggccctcagacagatgaaggagttcagctgcagataataaaggctttacttactgcagtaacatcacaacacatagaaattcatgaagggactgtactgcaagctgtgagaacatgttacaatatctacttagcaagcaaaaatctcatcaatcagacaacagccaaagctactctcactcagatgctaaatgttatctttgcacgcatggaaaaccaagcattacaggaagcaaaacaaatggaaaaagaaaggcatcggcagcatcatcatctgttacagtctccagtaagccatcacgagcctgaatcacctcaacttagatatttgccacctcagactgttgatcatatatcccaagaacacgaaggggaccttgacctccatacaaatgatgtagataaaagtcttcaggatgacacagagcctgaaaatggatctgatatttccagtgcagaaaatgaacagactgaagctgatcaggcaactgcagctgaaacattatctaaaaatgaagtgttatatgacggagaaaaccatgattgtgaggaaaagccacaagacattgtacagaacattgtagaagaaatggtgaacattgttgttggagatatgggagaagggactactataaatgcaagtgcagatggcaacattggaactatagaggatggtagtgacagtgaaaatattcaagcaaatggaattccaggaacaccaatttctgttgcatatacaccatccttacctgatgatagattgtcagtctcttccaatgatactcaggaatctggaaattcttcaggaccttcacctggtgctaagttttcccacattttacaaaaggatgcctttctagtattcaggtcattgtgtaaactgtcaatgaaaccactgtcagatggaccaccagatccaaagtctcatgaactacgatccaagattctttcattgcagttacttctatccattctgcagaatgcaggacctattttcaggacaaatgagatgtttattaatgctattaagcagtatctttgtgttgcactctcaaaaaatggagtctcatctgttccagaggtttttgagctttctctttctatatttcttactttgttgtcaaatttcaagacacatctgaagatgcaaattgaggtgttctttaaagaaattttcttatacattttggaaacttctaccagctcatttgatcacaaatggatggttattcagacactgacgaggatttgtgcagatgctcagagtgtagtggatatttatgtaaactatgactgtgacttaaatgcagccaatatatttgaaagactagtaaatgatctatcaaaaattgctcaaggaaggggcagtcaagaacttggtatgagtaatgttcaggaattgagcctgaggaaaaaaggtttagaatgcttagtgtcgattttgaagtgtatggttgaatggagtaaggatcagtatgtgaatcccaactcccagacaactcttggtcaggaaaaaccctcagagcaagagatgagtgaaatcaaacaccctgagacaataaacagatacggaagtttaaattccctggagtcaacatcatcatcaggaataggcagctacagtacacagatgtctggcactgataatccagaacaatttgaggtcctaaagcaacaaaaagaaataatagaacaagggatagatttatttaataagaaaccaaagagaggaatacagtacctccaagaacaagggatgcttggcaccacacctgaagatattgcccaattcttacatcaagaggaaagattagactctactcaagtgggtgagttcctgggagataatgataaatttaacaaagaagtcatgtatgcatatgtggaccaacatgacttttcaggaaaagacttcgtttcagcccttcgtatgtttctagaaggatttcgtcttccaggggaagctcagaaaatcgatcgattaatggaaaaatttgctgcaagatacctagaatgcaaccaaggacaaactctctttgctagtgcggatacagcttatgttttggcttattcaattatcatgttgaccacagaccttcacagtccacaggtgaaaaataaaatgacaaaggaacaatacattaagatgaatagaggtatcaatgacagtaaagaccttcctgaagagtatctatcagccatctataatgaaatagctgggaaaaagatatcaatgaaagaaacaaaagaactaacaatccctacaaaatcaagtaaacagaatgtagccagtgaaaaacaaagaagacttctgtataacttagaaatggagcagatggccaagacagctaaagcactcatggaggccgtgagccatgttcaggcaccctttacaagtgcaacacatttggagcatgtgaggcccatgtttaagttggcttggacgccttttctggctgcattcagtgtgggtctacaagattgtgatgatactgaagtagcctctctttgcctggaaggtataagatgtgcaatcagaattgcatgcattttcagcattcagctggagagagatgcatatgtccaggcactagcaagatttaccttactcacagtgagttccggtattactgaaatgaaacagaagaacattgacacaataaaaacacttatcacagtggctcatacagatggaaattatttaggaaattcatggcatgagattctgaagtgcatcagtcagttggagctggcacagcttataggaactggagtgaaacctcgatacatttctggaacagtgcgaggcagagaaggatctcttactggaacaaaagatcaggctcctgatgaatttgtgggtttagggctagttggaggaaatgtggactggaaacagatagcaagtattcaggaatccattggagaaaccagttctcagagtgttgttgttgctgtagatagaatattcacaggatctacaaggctagatggaaatgccattgtggattttgtccgttggctctgtgctgtgtctatggatgaattactttccacgacacacccaagaatgtttagtctacaaaaaatagtagaaatatcatattacaacatgggaagaataagattacagtggtctcgaatttgggaagttattggagatcattttaataaggttgggtgtaatcctaatgaagatgtagctatttttgcagtagactccttgaggcagttgtcaatgaagttcttagagaaaggggagcttgctaacttcagattccagaaggatttcttaagaccttttgaacatataatgaaacggaacaggtctccaacaattcgagatatggttgtacggtgtatagcacagatggttaattctcaagctgctaacattcgatctggatggaagaacattttctctgtatttcatctagctgcatctgatcaagatgaaagcatagtggaacttgcattccaaacaaccgggcacattgtcacccttgtatttgaaaaacactttccagcgaccattgattctttccaggatgcagtgaagtgtttgtctgaatttgcgtgcaatgcagctttcccagacacaagtatggaagcaattcgacttattcgccattgtgcaaaatatgtgtctgatagacctcaggctttcaaggaatacacaagcgatgatatgaacgtagcacctgaagacagggtgtgggtgagaggatggttcccaattctctttgagttatcctgtatcatcaatagatgcaaattagatgtaagaaccaggggtttaacagtaatgtttgaaataatgaaaacatatggccacacttatgagaaacactggtggcaggatttatttagaattgttttcagaatctttgacaatatgaaattgccagaacaacagacagagaaagctgaatggatgacaacaacttgcaatcatgcactttatgcaatctgtgatgtattcactcagtatttagaagtactcagtgatgtacttttggatgacatttttgctcagctctactggtgtgtgcagcaagacaatgagcagttagcgcgatctggtacaaactgtttagagaatgttgttattctgaatggtgaaaaatttaccctagaaatctgggataaaacttgcaactgcacactggatatcttcaaaaccacaatcccacatgcgctgttgacctggcgacccaattctggagaaactgcccccccacctccatctcctgtaagtgaaaagccattggatacaatatcacagaagtctgtagatattcatgattctattcaaccaaggtctgtggataacagaccacaagcaccactggtttctgcgtctgctgttaatgaagaagtcagcaaaattaaatctacagcaaaatttccagaacaaaaattgtttgctgccctgttgattaaatgtgttgtgcagctggaactcatccagactatcgacaacattgtcttcttcccagccacaagtaagaaagaagatgcagaaaacttagctgcagcacagagagatgcggtggactttgatgttcgcgttgatactcaagaccaaggaatgtaccgctttttaacatcacaacaactttttaagctactggactgcttattagagtcacatagatttgcaaaagcgtttaattccaacaacgaacagaggactgccctgtggaaagcaggattcaaaggcaaatccaagcccaaccttctgaagcaggagaccagcagcctggcctgtgggctgcgcattctcttccggatgtacatggatgagagccgcgttagtgcctgggaggaggtccagcagaggcttttgaatgtctgcagtgaagcactaagttacttcctcactctaacatcagaaagtcatcgagaagcctggactaacttactgcttttgtttctaactaaagttctaaagataagtgataataggtttaaagctcatgcatcattctactaccctctcttatgtgaaattatgcaatttgacttgattcctgaacttcgtgctgttcttagaagattttttctgcgaatcggagtagtttttcagatatcacaaccacctgaacaggaacttggaataaacaagcaatgatgggaacttaatatttttgttggcatttacatccctctgctctttaaaaggacgctggagctgaggtttcctacctgaaaaatgatttctctggattgcagtgtctgagttactggtaaagatgcttagaagtcttactcaaacttgcaacactccagtcccttttagtgctggtggattttgtgtgttatattggcctcatgttgagcagaaagcctgtttaaacagtgtcagctcatgctcacgggtccttccctgtcttccacggcaggaaaagccccacgtttttggcaggtgtggaagtgaaacttacccaaagaactatagatgtaaagattgaacttctacaagaagtacaactcaggagagctgtattttgaaggataaaatgtttataattggggagtggggagagaagaagaaattattgttcatggtaaaagatatttagcaactatggtattcttattctgaagatttttgcacactcaggctatctgagatactggtaatcatcctgtgaaaaatgtacagagatgcaggtctgtaatataaaaatcttaaaacattatatagttcttcctgcactgttttctttattttcttattcatttgctaaatacccataatattttgtcaaatgcactaaacatttgggtggaactttcttttttattttatagggatttttagttttgccctttttggtaggtggtgattttgaggctgtaacatgcccagaagctgttgtggccgacacttcaacaatagggaaaaaaaggtagaaaatatccctactgacagtaactacctgtcacatatttctcttaggacttttaaagatgagccattaaaatagaatgatcctttatggaccaaaacttgaatcactgcaaaatgaatccagattgctgtcattttcttttcttttgggtggtggggcttgatgtagattttactctatgtacagaatttaacgttgaatatattaaaataacaaatctggcatggtttgcggaggttagatttactggaaatgtattcatactgtgaattgtgctctgatggttaaaagacaagattgtcaagcattccgtattaacagtggatgtagaaaattttttcagatggacaaaatgtatatggtacagatgtaaagttttctatgtaaaaaattctgtacaactttctgtacaatattgattcccatctggcatattctaatcaggttataggtcaataaagtttttgaattatttcatcagtgcaatc

SEQ ID NO: 357701 - DNA, 6561 bp, Homo sapiens
cggccgcggcgggtgctaatccccacagtagccagggtagcccttctctcgcggtgcctctgagagccgccgccacctcgtccctcagttcccggcagacagccgcccgggccgggctccctcaccgccaccagggccggagggacgagtgagaggggcggccgggacgcgacccccgggccgggagaagcggaggcccgacgggcgcggccctcgaggtacggcttcttgggggcggcgaggacctcgacgcccttcgccgacaccgcggctggtcccgctcgcccgccccttcctgatcctgccgctgccctccacgcctccaatcccccacctccaccccctctcctttctctcttctcttccttcctctcctcctcctcccctccagccgctgggagccgcgggtcggacgagccgccgcctccttctctgcgtccatgtatgaggggaagaagacgaagaacatgttcctgacccgggctctggagaagatattggccgacaaggaagtgaagaaggcgcatcactcccagctgcgcaaagcttgcgaggtggcgttagaggaaataaaagcggaaactgaaaaacagagtcctcctcatggagaagcaaaagctggatcaagcacccttccaccagtgaaatcaaagacaaattttattgaagcagacaagtacttcttgccttttgagttggcatgccagtccaaatgtcctcgcatagttagtacatctctagattgcttacagaaacttattgcttatgggcacttgactggcaatgctccagatagtacaacaccaggcaaaaaattaattgatagaattattgaaacaatatgtggctgctttcagggccctcagacagatgaaggagttcagctgcagataataaaggctttacttactgcagtaacatcacaacacatagaaattcatgaagggactgtactgcaagctgtgagaacatgttacaatatctacttagcaagcaaaaatctcatcaatcagacaacagccaaagctactctcactcagatgctaaatgttatctttgcacgcatggaaaaccaagcattacaggaagcaaaacaaatggaaaaagaaaggcatcggcagcatcatcatctgttacagtctccagtaagccatcacgagcctgaatcacctcaacttagatatttgccacctcagactgttgatcatatatcccaagaacacgaaggggaccttgacctccatacaaatgatgtagataaaagtcttcaggatgacacagagcctgaaaatggatctgatatttccagtgcagaaaatgaacagactgaagctgatcaggcaactgcagctgaaacattatctaaaaatgaagtgttatatgacggagaaaaccatgattgtgaggaaaagccacaagacattgtacagaacattgtagaagaaatggtgaacattgttgttggagatatgggagaagggactactataaatgcaagtgcagatggcaacattggaactatagaggatggtagtgacagtgaaaatattcaagcaaatggaattccaggaacaccaatttctgttgcatatacaccatccttacctgatgatagattgtcagtctcttccaatgatactcaggaatctggaaattcttcaggaccttcacctggtgctaagttttcccacattttacaaaaggatgcctttctagtattcaggtcattgtgtaaactgtcaatgaaaccactgtcagatggaccaccagatccaaagtctcatgaactacgatccaagattctttcattgcagttacttctatccattctgcagaatgcaggacctattttcaggacaaatgagatgtttattaatgctattaagcagtatctttgtgttgcactctcaaaaaatggagtctcatctgttccagaggtttttgagctttctctttctatatttcttactttgttgtcaaatttcaagacacatctgaagatgcaaattgaggtgttctttaaagaaattttcttatacattttggaaacttctaccagctcatttgatcacaaatggatggttattcagacactgacgaggatttgtgcagatgctcagagtgtagtggatatttatgtaaactatgactgtgacttaaatgcagccaatatatttgaaagactagtaaatgatctatcaaaaattgctcaaggaaggggcagtcaagaacttggtatgagtaatgttcaggaattgagcctgaggaaaaaaggtttagaatgcttagtgtcgattttgaagtgtatggttgaatggagtaaggatcagtatgtgaatcccaactcccagacaactcttggtcaggaaaaaccctcagagcaagagatgagtgaaatcaaacaccctgagacaataaacagatacggaagtttaaattccctggagtcaacatcatcatcaggaataggcagctacagtacacagatgtctggcactgataatccagaacaatttgaggtcctaaagcaacaaaaagaaataatagaacaagggatagatttatttaataagaaaccaaagagaggaatacagtacctccaagaacaagggatgcttggcaccacacctgaagatattgcccaattcttacatcaagaggaaagattagactctactcaagtgggtgagttcctgggagataatgataaatttaacaaagaagtcatgtatgcatatgtggaccaacatgacttttcaggaaaagacttcgtttcagcccttcgtatgtttctagaaggatttcgtcttccaggggaagctcagaaaatcgatcgattaatggaaaaatttgctgcaagatacctagaatgcaaccaaggacaaactctctttgctagtgcggatacagcttatgttttggcttattcaattatcatgttgaccacagaccttcacagtccacaggtgaaaaataaaatgacaaaggaacaatacattaagatgaatagaggtatcaatgacagtaaagaccttcctgaagagtatctatcagccatctataatgaaatagctgggaaaaagatatcaatgaaagaaacaaaagaactaacaatccctacaaaatcaagtaaacagaatgtagccagtgaaaaacaaagaagacttctgtataacttagaaatggagcagatggccaagacagctaaagcactcatggaggccgtgagccatgttcaggcaccctttacaagtgcaacacatttggagcatgtgaggcccatgtttaagttggcttggacgccttttctggctgcattcagtgtgggtctacaagattgtgatgatactgaagtagcctctctttgcctggaaggtataagatgtgcaatcagaattgcatgcattttcagcattcagctggagagagatgcatatgtccaggcactagcaagatttaccttactcacagtgagttccggtattactgaaatgaaacagaagaacattgacacaataaaaacacttatcacagtggctcatacagatggaaattatttaggaaattcatggcatgagattctgaagtgcatcagtcagttggagctggcacagcttataggaactggagtgaaacctcgatacatttctggaacagtgcgaggcagagaaggatctcttactggaacaaaagatcaggctcctgatgaatttgtgggtttagggctagttggaggaaatgtggactggaaacagatagcaagtattcaggaatccattggagaaaccagttctcagagtgttgttgttgctgtagatagaatattcacaggatctacaaggctagatggaaatgccattgtggattttgtccgttggctctgtgctgtgtctatggatgaattactttccacgacacacccaagaatgtttagtctacaaaaaatagtagaaatatcatattacaacatgggaagaataagattacagtggtctcgaatttgggaagttattggagatcattttaataaggttgggtgtaatcctaatgaagatgtagctatttttgcagtagactccttgaggcagttgtcaatgaagttcttagagaaaggggagcttgctaacttcagattccagaaggatttcttaagaccttttgaacatataatgaaacggaacaggtctccaacaattcgagatatggttgtacggtgtatagcacagatggttaattctcaagctgctaacattcgatctggatggaagaacattttctctgtatttcatctagctgcatctgatcaagatgaaagcatagtggaacttgcattccaaacaaccgggcacattgtcacccttgtatttgaaaaacactttccagcgaccattgattctttccaggatgcagtgaagtgtttgtctgaatttgcgtgcaatgcagctttcccagacacaagtatggaagcaattcgacttattcgccattgtgcaaaatatgtgtctgatagacctcaggctttcaaggaatacacaagcgatgatatgaacgtagcacctgaagacagggtgtgggtgagaggatggttcccaattctctttgagttatcctgtatcatcaatagatgcaaattagatgtaagaaccaggggtttaacagtaatgtttgaaataatgaaaacatatggccacacttatgagaaacactggtggcaggatttatttagaattgttttcagaatctttgacaatatgaaattgccagaacaacagacagagaaagctgaatggatgacaacaacttgcaatcatgcactttatgcaatctgtgatgtattcactcagtatttagaagtactcagtgatgtacttttggatgacatttttgctcagctctactggtgtgtgcagcaagacaatgagcagttagcgcgatctggtacaaactgtttagagaatgttgttattctgaatggtgaaaaatttaccctagaaatctgggataaaacttgcaactgcacactggatatcttcaaaaccacaatcccacatgcgctgttgacctggcgacccaattctggagaaactgcccccccacctccatctcctgtaagtgaaaagccattggatacaatatcacagaagtctgtagatattcatgattctattcaaccaaggtctgtggataacagaccacaagcaccactggtttctgcgtctgctgttaatgaagaagtcagcaaaattaaatctacagcaaaatttccagaacaaaaattgtttgctgccctgttgattaaatgtgttgtgcagctggaactcatccagactatcgacaacattgtcttcttcccagccacaagtaagaaagaagatgcagaaaacttagctgcagcacagagagatgcggtggactttgatgttcgcgttgatactcaagaccaaggaatgtaccgctttttaacatcacaacaactttttaagctactggactgcttattagagtcacatagatttgcaaaagcgtttaattccaacaacgaacagaggactgccctgtggaaagcaggattcaaaggcaaatccaagcccaaccttctgaagcaggagaccagcagcctggcctgtgggctgcgcattctcttccggatgtacatggatgagagccgcgttagtgcctgggaggaggtccagcagaggcttttgaatgtctgcagtgaagcactaagttacttcctcactctaacatcagaaagtcatcgagaagcctggactaacttactgcttttgtttctaactaaagttctaaagataagtgataataggtttaaagctcatgcatcattctactaccctctcttatgtgaaattatgcaatttgacttgattcctgaacttcgtgctgttcttagaagattttttctgcgaatcggagtagtttttcagatatcacaaccacctgaacaggaacttggaataaacaagcaatgatgggaacttaatatttttgttggcatttacatccctctgctctttaaaaggacgctggagctgaggtttcctacctgaaaaatgatttctctggattgcagtgtctgagttactggtaaagatgcttagaagtcttactcaaacttgcaacactccagtcccttttagtgctggtggattttgtgtgttatattggcctcatgttgagcagaaagcctgtttaaacagtgtcagctcatgctcacgggtccttccctgtcttccacggcaggaaaagccccacgtttttggcaggtgtggaagtgaaacttacccaaagaactatagatgtaaagattgaacttctacaagaagtacaactcaggagagctgtattttgaaggataaaatgtttataattggggagtggggagagaagaagaaattattgttcatggtaaaagatatttagcaactatggtattcttattctgaagatttttgcacactcaggctatctgagatactggtaatcatcctgtgaaaaatgtacagagatgcaggtctgtaatataaaaatcttaaaacatta

SEQ ID NO: 357702 - DNA, 6996 bp, Homo sapiens
cggccgcggcgggtgctaatccccacagtagccagggtagcccttctctcgcggtgcctctgagagccgccgccacctcgtccctcagttcccggcagacagccgcccgggccgggctccctcaccgccaccagggccggagggacgagtgagaggggcggccgggacgcgacccccgggccgggagaagcggaggcccgacgggcgcggccctcgaggtacggcttcttgggggcggcgaggacctcgacgcccttcgccgacaccgcggctggtcccgctcgcccgccccttcctgatcctgccgctgccctccacgcctccaatcccccacctccaccccctctcctttctctcttctcttccttcctctcctcctcctcccctccagccgctgggagccgcgggtcggacgagccgccgcctccttctctgcgtccatgtatgaggggaagaagacgaagaacatgttcctgacccgggctctggagaagatattggccgacaaggaagtgaagaaggcgcatcactcccagctgcgcaaagcttgcgaggtggcgttagaggaaataaaagcggaaactgaaaaacagagtcctcctcatggagaagcaaaagctggatcaagcacccttccaccagtgaaatcaaagacaaattttattgaagcagacaagtacttcttgccttttgagttggcatgccagtccaaatgtcctcgcatagttagtacatctctagattgcttacagaaacttattgcttatgggcacttgactggcaatgctccagatagtacaacaccaggcaaaaaattaattgatagaattattgaaacaatatgtggctgctttcagggccctcagacagatgaaggagttcagctgcagataataaaggctttacttactgcagtaacatcacaacacatagaaattcatgaagggactgtactgcaagctgtgagaacatgttacaatatctacttagcaagcaaaaatctcatcaatcagacaacagccaaagctactctcactcagatgctaaatgttatctttgcacgcatggaaaaccaagcattacaggaagcaaaacaaatggaaaaagaaaggcatcggcagcatcatcatctgttacagtctccagtaagccatcacgagcctgaatcacctcaacttagatatttgccacctcagactgttgatcatatatcccaagaacacgaaggggaccttgacctccatacaaatgatgtagataaaagtcttcaggatgacacagagcctgaaaatggatctgatatttccagtgcagaaaatgaacagactgaagctgatcaggcaactgcagctgaaacattatctaaaaatgaagtgttatatgacggagaaaaccatgattgtgaggaaaagccacaagacattgtacagaacattgtagaagaaatggtgaacattgttgttggagatatgggagaagggactactataaatgcaagtgcagatggcaacattggaactatagaggatggtagtgacagtgaaaatattcaagcaaatggaattccaggaacaccaatttctgttgcatatacaccatccttacctgatgatagattgtcagtctcttccaatgatactcaggaatctggaaattcttcaggaccttcacctggtgctaagttttcccacattttacaaaaggatgcctttctagtattcaggtcattgtgtaaactgtcaatgaaaccactgtcagatggaccaccagatccaaagtctcatgaactacgatccaagattctttcattgcagttacttctatccattctgcagaatgcaggacctattttcaggacaaatgagatgtttattaatgctattaagcagtatctttgtgttgcactctcaaaaaatggagtctcatctgttccagaggtttttgagctttctctttctatatttcttactttgttgtcaaatttcaagacacatctgaagatgcaaattgaggtgttctttaaagaaattttcttatacattttggaaacttctaccagctcatttgatcacaaatggatggttattcagacactgacgaggatttgtgcagatgctcagagtgtagtggatatttatgtaaactatgactgtgacttaaatgcagccaatatatttgaaagactagtaaatgatctatcaaaaattgctcaaggaaggggcagtcaagaacttggtatgagtaatgttcaggaattgagcctgaggaaaaaaggtttagaatgcttagtgtcgattttgaagtgtatggttgaatggagtaaggatcagtatgtgaatcccaactcccagacaactcttggtcaggaaaaaccctcagagcaagagatgagtgaaatcaaacaccctgagacaataaacagatacggaagtttaaattccctggagtcaacatcatcatcaggaataggcagctacagtacacagatgtctggcactgataatccagaacaatttgaggtcctaaagcaacaaaaagaaataatagaacaagggatagatttatttaataagaaaccaaagagaggaatacagtacctccaagaacaagggatgcttggcaccacacctgaagatattgcccaattcttacatcaagaggaaagattagactctactcaagtgggtgagttcctgggagataatgataaatttaacaaagaagtcatgtatgcatatgtggaccaacatgacttttcaggaaaagacttcgtttcagcccttcgtatgtttctagaaggatttcgtcttccaggggaagctcagaaaatcgatcgattaatggaaaaatttgctgcaagatacctagaatgcaaccaaggacaaactctctttgctagtgcggatacagcttatgttttggcttattcaattatcatgttgaccacagaccttcacagtccacaggtgaaaaataaaatgacaaaggaacaatacattaagatgaatagaggtatcaatgacagtaaagaccttcctgaagagtatctatcagccatctataatgaaatagctgggaaaaagatatcaatgaaagaaacaaaagaactaacaatccctacaaaatcaagtaaacagaatgtagccagtgaaaaacaaagaagacttctgtataacttagaaatggagcagatggccaagacagctaaagcactcatggaggccgtgagccatgttcaggcaccctttacaagtgcaacacatttggagcatgtgaggcccatgtttaagttggcttggacgccttttctggctgcattcagtgtgggtctacaagattgtgatgatactgaagtagcctctctttgcctggaaggtataagatgtgcaatcagaattgcatgcattttcagcattcagctggagagagatgcatatgtccaggcactagcaagatttaccttactcacagtgagttccggtattactgaaatgaaacagaagaacattgacacaataaaaacacttatcacagtggctcatacagatggaaattatttaggaaattcatggcatgagattctgaagtgcatcagtcagttggagctggcacagcttataggaactggagtgaaacctcgatacatttctggaacagtgcgaggcagagaaggatctcttactggaacaaaagatcaggctcctgatgaatttgtgggtttagggctagttggaggaaatgtggactggaaacagatagcaagtattcaggaatccattggagaaaccagttctcagagtgttgttgttgctgtagatagaatattcacaggatctacaaggctagatggaaatgccattgtggattttgtccgttggctctgtgctgtgtctatggatgaattactttccacgacacacccaagaatgtttagtctacaaaaaatagtagaaatatcatattacaacatgggaagaataagattacagtggtctcgaatttgggaagttattggagatcattttaataaggttgggtgtaatcctaatgaagatgtagctatttttgcagtagactccttgaggcagttgtcaatgaagttcttagagaaaggggagcttgctaacttcagattccagaaggatttcttaagaccttttgaacatataatgaaacggaacaggtctccaacaattcgagatatggttgtacggtgtatagcacagatggttaattctcaagctgctaacattcgatctggatggaagaacattttctctgtatttcatctagctgcatctgatcaagatgaaagcatagtggaacttgcattccaaacaaccgggcacattgtcacccttgtatttgaaaaacactttccagcgaccattgattctttccaggatgcagtgaagtgtttgtctgaatttgcgtgcaatgcagctttcccagacacaagtatggaagcaattcgacttattcgccattgtgcaaaatatgtgtctgatagacctcaggctttcaaggaatacacaagcgatgatatgaacgtagcacctgaagacagggtgtgggtgagaggatggttcccaattctctttgagttatcctgtatcatcaatagatgcaaattagatgtaagaaccaggggtttaacagtaatgtttgaaataatgaaaacatatggccacacttatgagaaacactggtggcaggatttatttagaattgttttcagaatctttgacaatatgaaattgccagaacaacagacagagaaagctgaatggatgacaacaacttgcaatcatgcactttatgcaatctgtgatgtattcactcagtatttagaagtactcagtgatgtacttttggatgacatttttgctcagctctactggtgtgtgcagcaagacaatgagcagttagcgcgatctggtacaaactgtttagagaatgttgttattctgaatggtgaaaaatttaccctagaaatctgggataaaacttgcaactgcacactggatatcttcaaaaccacaatcccacatgcgctgttgacctggcgacccaattctggagaaactgcccccccacctccatctcctgtaagtgaaaagccattggatacaatatcacagaagtctgtagatattcatgattctattcaaccaaggtctgtggataacagaccacaagcaccactggtttctgcgtctgctgttaatgaagaagtcagcaaaattaaatctacagcaaaatttccagaacaaaaattgtttgctgccctgttgattaaatgtgttgtgcagctggaactcatccagactatcgacaacattgtcttcttcccagccacaagtaagaaagaagatgcagaaaacttagctgcagcacagagagatgcggtggactttgatgttcgcgttgatactcaagaccaaggaatgtaccgctttttaacatcacaacaactttttaagctactggactgcttattagagtcacatagatttgcaaaagcgtttaattccaacaacgaacagaggactgccctgtggaaagcaggattcaaaggcaaatccaagcccaaccttctgaagcaggagaccagcagcctggcctgtgggctgcgcattctcttccggatgtacatggatgagagccgcgttagtgcctgggaggaggtccagcagaggcttttgaatgtctgcagtgaagcactaagttacttcctcactctaacatcagaaagtcatcgagaagcctggactaacttactgcttttgtttctaactaaagttctaaagataagtgataataggtttaaagctcatgcatcattctactaccctctcttatgtgaaattatgcaatttgacttgattcctgaacttcgtgctgttcttagaagattttttctgcgaatcggagtagtttttcagatatcacaaccacctgaacaggaacttggaataaacaagcaatgatgggaacttaatatttttgttggcatttacatccctctgctctttaaaaggacgctggagctgaggtttcctacctgaaaaatgatttctctggattgcagtgtctgagttactggtaaagatgcttagaagtcttactcaaacttgcaacactccagtcccttttagtgctggtggattttgtgtgttatattggcctcatgttgagcagaaagcctgtttaaacagtgtcagctcatgctcacgggtccttccctgtcttccacggcaggaaaagccccacgtttttggcaggtgtggaagtgaaacttacccaaagaactatagatgtaaagattgaacttctacaagaagtacaactcaggagagctgtattttgaaggataaaatgtttataattggggagtggggagagaagaagaaattattgttcatggtaaaagatatttagcaactatggtattcttattctgaagatttttgcacactcaggctatctgagatactggtaatcatcctgtgaaaaatgtacagagatgcaggtctgtaatataaaaatcttaaaacattatatagttcttcctgcactgttttctttattttcttattcatttgctaaatacccataatattttgtcaaatgcactaaacatttgggtggaactttcttttttattttatagggatttttagttttgccctttttggtaggtggtgattttgaggctgtaacatgcccagaagctgttgtggccgacacttcaacaatagggaaaaaaaggtagaaaatatccctactgacagtaactacctgtcacatatttctcttaggacttttaaagatgagccattaaaatagaatgatcctttatggaccaaaacttgaatcactgcaaaatgaatccagattgctgtcattttcttttcttttgggtggtggggcttgatgtagattttactctatgtacagaatttaacgttgaatatattaaaataacaaatctgg

SEQ ID NO: 357703 - DNA, 7203 bp, Homo sapiens
cggccgcggcgggtgctaatccccacagtagccagggtagcccttctctcgcggtgcctctgagagccgccgccacctcgtccctcagttcccggcagacagccgcccgggccgggctccctcaccgccaccagggccggagggacgagtgagaggggcggccgggacgcgacccccgggccgggagaagcggaggcccgacgggcgcggccctcgaggtacggcttcttgggggcggcgaggacctcgacgcccttcgccgacaccgcggctggtcccgctcgcccgccccttcctgatcctgccgctgccctccacgcctccaatcccccacctccaccccctctcctttctctcttctcttccttcctctcctcctcctcccctccagccgctgggagccgcgggtcggacgagccgccgcctccttctctgcgtccatgtatgaggggaagaagacgaagaacatgttcctgacccgggctctggagaagatattggccgacaaggaagtgaagaaggcgcatcactcccagctgcgcaaagcttgcgaggtggcgttagaggaaataaaagcggaaactgaaaaacagagtcctcctcatggagaagcaaaagctggatcaagcacccttccaccagtgaaatcaaagacaaattttattgaagcagacaagtacttcttgccttttgagttggcatgccagtccaaatgtcctcgcatagttagtacatctctagattgcttacagaaacttattgcttatgggcacttgactggcaatgctccagatagtacaacaccaggcaaaaaattaattgatagaattattgaaacaatatgtggctgctttcagggccctcagacagatgaaggagttcagctgcagataataaaggctttacttactgcagtaacatcacaacacatagaaattcatgaagggactgtactgcaagctgtgagaacatgttacaatatctacttagcaagcaaaaatctcatcaatcagacaacagccaaagctactctcactcagatgctaaatgttatctttgcacgcatggaaaaccaagcattacaggaagcaaaacaaatggaaaaagaaaggcatcggcagcatcatcatctgttacagtctccagtaagccatcacgagcctgaatcacctcaacttagatatttgccacctcagactgttgatcatatatcccaagaacacgaaggggaccttgacctccatacaaatgatgtagataaaagtcttcaggatgacacagagcctgaaaatggatctgatatttccagtgcagaaaatgaacagactgaagctgatcaggcaactgcagctgaaacattatctaaaaatgaagtgttatatgacggagaaaaccatgattgtgaggaaaagccacaagacattgtacagaacattgtagaagaaatggtgaacattgttgttggagatatgggagaagggactactataaatgcaagtgcagatggcaacattggaactatagaggatggtagtgacagtgaaaatattcaagcaaatggaattccaggaacaccaatttctgttgcatatacaccatccttacctgatgatagattgtcagtctcttccaatgatactcaggaatctggaaattcttcaggaccttcacctggtgctaagttttcccacattttacaaaaggatgcctttctagtattcaggtcattgtgtaaactgtcaatgaaaccactgtcagatggaccaccagatccaaagtctcatgaactacgatccaagattctttcattgcagttacttctatccattctgcagaatgcaggacctattttcaggacaaatgagatgtttattaatgctattaagcagtatctttgtgttgcactctcaaaaaatggagtctcatctgttccagaggtttttgagctttctctttctatatttcttactttgttgtcaaatttcaagacacatctgaagatgcaaattgaggtgttctttaaagaaattttcttatacattttggaaacttctaccagctcatttgatcacaaatggatggttattcagacactgacgaggatttgtgcagatgctcagagtgtagtggatatttatgtaaactatgactgtgacttaaatgcagccaatatatttgaaagactagtaaatgatctatcaaaaattgctcaaggaaggggcagtcaagaacttggtatgagtaatgttcaggaattgagcctgaggaaaaaaggtttagaatgcttagtgtcgattttgaagtgtatggttgaatggagtaaggatcagtatgtgaatcccaactcccagacaactcttggtcaggaaaaaccctcagagcaagagatgagtgaaatcaaacaccctgagacaataaacagatacggaagtttaaattccctggagtcaacatcatcatcaggaataggcagctacagtacacagatgtctggcactgataatccagaacaatttgaggtcctaaagcaacaaaaagaaataatagaacaagggatagatttatttaataagaaaccaaagagaggaatacagtacctccaagaacaagggatgcttggcaccacacctgaagatattgcccaattcttacatcaagaggaaagattagactctactcaagtgggtgagttcctgggagataatgataaatttaacaaagaagtcatgtatgcatatgtggaccaacatgacttttcaggaaaagacttcgtttcagcccttcgtatgtttctagaaggatttcgtcttccaggggaagctcagaaaatcgatcgattaatggaaaaatttgctgcaagatacctagaatgcaaccaaggacaaactctctttgctagtgcggatacagcttatgttttggcttattcaattatcatgttgaccacagaccttcacagtccacaggtgaaaaataaaatgacaaaggaacaatacattaagatgaatagaggtatcaatgacagtaaagaccttcctgaagagtatctatcagccatctataatgaaatagctgggaaaaagatatcaatgaaagaaacaaaagaactaacaatccctacaaaatcaagtaaacagaatgtagccagtgaaaaacaaagaagacttctgtataacttagaaatggagcagatggccaagacagctaaagcactcatggaggccgtgagccatgttcaggcaccctttacaagtgcaacacatttggagcatgtgaggcccatgtttaagttggcttggacgccttttctggctgcattcagtgtgggtctacaagattgtgatgatactgaagtagcctctctttgcctggaaggtataagatgtgcaatcagaattgcatgcattttcagcattcagctggagagagatgcatatgtccaggcactagcaagatttaccttactcacagtgagttccggtattactgaaatgaaacagaagaacattgacacaataaaaacacttatcacagtggctcatacagatggaaattatttaggaaattcatggcatgagattctgaagtgcatcagtcagttggagctggcacagcttataggaactggagtgaaacctcgatacatttctggaacagtgcgaggcagagaaggatctcttactggaacaaaagatcaggctcctgatgaatttgtgggtttagggctagttggaggaaatgtggactggaaacagatagcaagtattcaggaatccattggagaaaccagttctcagagtgttgttgttgctgtagatagaatattcacaggatctacaaggctagatggaaatgccattgtggattttgtccgttggctctgtgctgtgtctatggatgaattactttccacgacacacccaagaatgtttagtctacaaaaaatagtagaaatatcatattacaacatgggaagaataagattacagtggtctcgaatttgggaagttattggagatcattttaataaggttgggtgtaatcctaatgaagatgtagctatttttgcagtagactccttgaggcagttgtcaatgaagttcttagagaaaggggagcttgctaacttcagattccagaaggatttcttaagaccttttgaacatataatgaaacggaacaggtctccaacaattcgagatatggttgtacggtgtatagcacagatggttaattctcaagctgctaacattcgatctggatggaagaacattttctctgtatttcatctagctgcatctgatcaagatgaaagcatagtggaacttgcattccaaacaaccgggcacattgtcacccttgtatttgaaaaacactttccagcgaccattgattctttccaggatgcagtgaagtgtttgtctgaatttgcgtgcaatgcagctttcccagacacaagctttcaaggaatacacaagcgatgatatgaacgtagcacctgaagacagggtgtgggtgagaggatggttcccaattctctttgagttatcctgtatcatcaatagatgcaaattagatgtaagaaccaggggtttaacagtaatgtttgaaataatgaaaacatatggccacacttatgagaaacactggtggcaggatttatttagaattgttttcagaatctttgacaatatgaaattgccagaacaacagacagagaaagctgaatggatgacaacaacttgcaatcatgcactttatgcaatctgtgatgtattcactcagtatttagaagtactcagtgatgtacttttggatgacatttttgctcagctctactggtgtgtgcagcaagacaatgagcagttagcgcgatctggtacaaactgtttagagaatgttgttattctgaatggtgaaaaatttaccctagaaatctgggataaaacttgcaactgcacactggatatcttcaaaaccacaatcccacatgcgctgttgacctggcgacccaattctggagaaactgcccccccacctccatctcctgtaagtgaaaagccattggatacaatatcacagaagtctgtagatattcatgattctattcaaccaaggtctgtggataacagaccacaagcaccactggtttctgcgtctgctgttaatgaagaagtcagcaaaattaaatctacagcaaaatttccagaacaaaaattgtttgctgccctgttgattaaatgtgttgtgcagctggaactcatccagactatcgacaacattgtcttcttcccagccacaagtaagaaagaagatgcagaaaacttagctgcagcacagagagatgcggtggactttgatgttcgcgttgatactcaagaccaaggaatgtaccgctttttaacatcacaacaactttttaagctactggactgcttattagagtcacatagatttgcaaaagcgtttaattccaacaacgaacagaggactgccctgtggaaagcaggattcaaaggcaaatccaagcccaaccttctgaagcaggagaccagcagcctggcctgtgggctgcgcattctcttccggatgtacatggatgagagccgcgttagtgcctgggaggaggtccagcagaggcttttgaatgtctgcagtgaagcactaagttacttcctcactctaacatcagaaagtcatcgagaagcctggactaacttactgcttttgtttctaactaaagttctaaagataagtgataataggtttaaagctcatgcatcattctactaccctctcttatgtgaaattatgcaatttgacttgattcctgaacttcgtgctgttcttagaagattttttctgcgaatcggagtagtttttcagatatcacaaccacctgaacaggaacttggaataaacaagcaatgatgggaacttaatatttttgttggcatttacatccctctgctctttaaaaggacgctggagctgaggtttcctacctgaaaaatgatttctctggattgcagtgtctgagttactggtaaagatgcttagaagtcttactcaaacttgcaacactccagtcccttttagtgctggtggattttgtgtgttatattggcctcatgttgagcagaaagcctgtttaaacagtgtcagctcatgctcacgggtccttccctgtcttccacggcaggaaaagccccacgtttttggcaggtgtggaagtgaaacttacccaaagaactatagatgtaaagattgaacttctacaagaagtacaactcaggagagctgtattttgaaggataaaatgtttataattggggagtggggagagaagaagaaattattgttcatggtaaaagatatttagcaactatggtattcttattctgaagatttttgcacactcaggctatctgagatactggtaatcatcctgtgaaaaatgtacagagatgcaggtctgtaatataaaaatcttaaaacattatatagttcttcctgcactgttttctttattttcttattcatttgctaaatacccataatattttgtcaaatgcactaaacatttgggtggaactttcttttttattttatagggatttttagttttgccctttttggtaggtggtgattttgaggctgtaacatgcccagaagctgttgtggccgacacttcaacaatagggaaaaaaaggtagaaaatatccctactgacagtaactacctgtcacatatttctcttaggacttttaaagatgagccattaaaatagaatgatcctttatggaccaaaacttgaatcactgcaaaatgaatccagattgctgtcattttcttttcttttgggtggtggggcttgatgtagattttactctatgtacagaatttaacgttgaatatattaaaataacaaatctggcatggtttgcggaggttagatttactggaaatgtattcatactgtgaattgtgctctgatggttaaaagacaagattgtcaagcattccgtattaacagtggatgtagaaaattttttcagatggacaaaatgtatatggtacagatgtaaagttttctatgtaaaaaattctgtacaactttctgtacaatattgattcccatctggcatattctaatcaggttataggtcaataaagtttttgaattatttcatcagtgcaatc

SEQ ID NO: 357704 - DNA, 2059 bp, Homo sapiens
aaaggattcaaaataattttttgtttgcatgtgcattggggggggtttcctcacagaatttccagaacaaaaattgtttgctgccctgttgattaaatgtgttgtgcagctggaactcatccagactatcgacaacattgtcttcttcccagccacaagtaagaaagaagatgcagaaaacttagctgcagcacagagagatgcggtggactttgatgttcgcgttgatactcaagaccaaggaatgtaccgctttttaacatcacaacaactttttaagctactggactgcttattagagtcacatagatttgcaaaagcgtttaattccaacaacgaacagaggactgccctgtggaaagcaggattcaaaggcaaatccaagcccaaccttctgaagcaggagaccagcagcctggcctgtgggctgcgcattctcttccggatgtacatggatgagagccgcgttagtgcctgggaggaggtccagcagaggcttttgaatgtctgcagtgaagcactaagttacttcctcactctaacatcagaaagtcatcgagaagcctggactaacttactgcttttgtttctaactaaagttctaaagataagtgataataggtttaaagctcatgcatcattctactaccctctcttatgtgaaattatgcaatttgacttgattcctgaacttcgtgctgttcttagaagattttttctgcgaatcggagtagtttttcagatatcacaaccacctgaacaggaacttggaataaacaagcaatgatgggaacttaatatttttgttggcatttacatccctctgctctttaaaaggacgctggagctgaggtttcctacctgaaaaatgatttctctggattgcagtgtctgagttactggtaaagatgcttagaagtcttactcaaacttgcaacactccagtcccttttagtgctggtggattttgtgtgttatattggcctcatgttgagcagaaagcctgtttaaacagtgtcagctcatgctcacgggtccttccctgtcttccacggcaggaaaagccccacgtttttggcaggtgtggaagtgaaacttacccaaagaactatagatgtaaagattgaacttctacaagaagtacaactcaggagagctgtattttgaaggataaaatgtttataattggggagtggggagagaagaagaaattattgttcatggtaaaagatatttagcaactatggtattcttattctgaagatttttgcacactcaggctatctgagatactggtaatcatcctgtgaaaaatgtacagagatgcaggtctgtaatataaaaatcttaaaacattatatagttcttcctgcactgttttctttattttcttattcatttgctaaatacccataatattttgtcaaatgcactaaacatttgggtggaactttcttttttattttatagggatttttagttttgccctttttggtaggtggtgattttgaggctgtaacatgcccagaagctgttgtggccgacacttcaacaatagggaaaaaaaggtagaaaatatccctactgacagtaactacctgtcacatatttctcttaggacttttaaagatgagccattaaaatagaatgatcctttatggaccaaaacttgaatcactgcaaaatgaatccagattgctgtcattttcttttcttttgggtggtggggcttgatgtagattttactctatgtacagaatttaacgttgaatatattaaaataacaaatctggcatggtttgcggaggttagatttactggaaatgtattcatactgtgaattgtgctctgatggttaaaagacaagattgtcaagcattccgtattaacagtggatgtagaaaattttttcagatggacaaaatgtatatggtacagatgtaaagttttctatgtaaaaaattctgtacaactttctgtacaatattgattcccatctggcatattctaatcaggttataggtcaataaagtttttgaattatttcatcagtgcaatc

SEQ ID NO: 357705 - DNA, 2076 bp, Homo sapiens
tactacctccatctcctgtacgtgaagatgtcattggatacaatatcacagaagtctgtagatattcatgattctattcaaccaaggtctgtggataacagaccacaagcaccactggtttctgcgtctgctgttaatgaagaagtcagcaaaattaaatctacagcaaccacaagtaagaaagaagatgcagaaaacttagctgcagcacagagagatgcggtggactttgatgttcgcgttgatactcaagaccaaggaatgtaccgctttttaacatcacaacaactttttaagctactggactgcttattagagtcacatagatttgcaaaagcgtttaattccaacaacgaacagaggactgccctgtggaaagcaggattcaaaggcaaatccaagcccaaccttctgaagcaggagaccagcagcctggcctgtgggctgcgcattctcttccggatgtacatggatgagagccgcgttagtgcctgggaggaggtccagcagaggcttttgaatgtctgcagtgaagcactaagttacttcctcactctaacatcagaaagtcatcgagaagcctggactaacttactgcttttgtttctaactaaagttctaaagataagtgataataggtttaaagctcatgcatcattctactaccctctcttatgtgaaattatgcaatttgacttgattcctgaacttcgtgctgttcttagaagattttttctgcgaatcggagtagtttttcagatatcacaaccacctgaacaggaacttggaataaacaagcaatgatgggaacttaatatttttgttggcatttacatccctctgctctttaaaaggacgctggagctgaggtttcctacctgaaaaatgatttctctggattgcagtgtctgagttactggtaaagatgcttagaagtcttactcaaacttgcaacactccagtcccttttagtgctggtggattttgtgtgttatattggcctcatgttgagcagaaagcctgtttaaacagtgtcagctcatgctcacgggtccttccctgtcttccacggcaggaaaagccccacgtttttggcaggtgtggaagtgaaacttacccaaagaactatagatgtaaagattgaacttctacaagaagtacaactcaggagagctgtattttgaaggataaaatgtttataattggggagtggggagagaagaagaaattattgttcatggtaaaagatatttagcaactatggtattcttattctgaagatttttgcacactcaggctatctgagatactggtaatcatcctgtgaaaaatgtacagagatgcaggtctgtaatataaaaatcttaaaacattatatagttcttcctgcactgttttctttattttcttattcatttgctaaatacccataatattttgtcaaatgcactaaacatttgggtggaactttcttttttattttatagggatttttagttttgccctttttggtaggtggtgattttgaggctgtaacatgcccagaagctgttgtggccgacacttcaacaatagggaaaaaaaggtagaaaatatccctactgacagtaactacctgtcacatatttctcttaggacttttaaagatgagccattaaaatagaatgatcctttatggaccaaaacttgaatcactgcaaaatgaatccagattgctgtcattttcttttcttttgggtggtggggcttgatgtagattttactctatgtacagaatttaacgttgaatatattaaaataacaaatctggcatggtttgcggaggttagatttactggaaatgtattcatactgtgaattgtgctctgatggttaaaagacaagattgtcaagcattccgtattaacagtggatgtagaaaattttttcagatggacaaaatgtatatggtacagatgtaaagttttctatgtaaaaaattctgtacaactttctgtacaatattgattcccatctggcatattctaatcaggttataggtcaataaagtttttgaattatttcatcagtgcaatc

SEQ ID NO: 357706 - DNA, 2080 bp, Homo sapiens
gagttgggagtccaggagggtctggactaatgggaggtggtgcttggggacgaggatgcgtactggaaggtggaccttcccttactttctgttaggttagatcaagctgagtatctgtggctttcttgtaaaactggtctttggggagcattgagttgtaaatcaagtaaaattattgtgactgtgtgtatatgctggggtggtttgttttccaaagagagatgcggtggactttgatgttcgcgttgatactcaagaccaaggaatgtaccgctttttaacatcacaacaactttttaagctactggactgcttattagagtcacatagatttgcaaaagcgtttaattccaacaacgaacagaggactgccctgtggaaagcaggattcaaaggcaaatccaagcccaaccttctgaagcaggagaccagcagcctggcctgtgggctgcgcattctcttccggatgtacatggatgagagccgcgttagtgcctgggaggaggtccagcagaggcttttgaatgtctgcagtgaagcactaagttacttcctcactctaacatcagaaagtcatcgagaagcctggactaacttactgcttttgtttctaactaaagttctaaagataagtgataataggtttaaagctcatgcatcattctactaccctctcttatgtgaaattatgcaatttgacttgattcctgaacttcgtgctgttcttagaagattttttctgcgaatcggagtagtttttcagatatcacaaccacctgaacaggaacttggaataaacaagcaatgatgggaacttaatatttttgttggcatttacatccctctgctctttaaaaggacgctggagctgaggtttcctacctgaaaaatgatttctctggattgcagtgtctgagttactggtaaagatgcttagaagtcttactcaaacttgcaacactccagtcccttttagtgctggtggattttgtgtgttatattggcctcatgttgagcagaaagcctgtttaaacagtgtcagctcatgctcacgggtccttccctgtcttccacggcaggaaaagccccacgtttttggcaggtgtggaagtgaaacttacccaaagaactatagatgtaaagattgaacttctacaagaagtacaactcaggagagctgtattttgaaggataaaatgtttataattggggagtggggagagaagaagaaattattgttcatggtaaaagatatttagcaactatggtattcttattctgaagatttttgcacactcaggctatctgagatactggtaatcatcctgtgaaaaatgtacagagatgcaggtctgtaatataaaaatcttaaaacattatatagttcttcctgcactgttttctttattttcttattcatttgctaaatacccataatattttgtcaaatgcactaaacatttgggtggaactttcttttttattttatagggatttttagttttgccctttttggtaggtggtgattttgaggctgtaacatgcccagaagctgttgtggccgacacttcaacaatagggaaaaaaaggtagaaaatatccctactgacagtaactacctgtcacatatttctcttaggacttttaaagatgagccattaaaatagaatgatcctttatggaccaaaacttgaatcactgcaaaatgaatccagattgctgtcattttcttttcttttgggtggtggggcttgatgtagattttactctatgtacagaatttaacgttgaatatattaaaataacaaatctggcatggtttgcggaggttagatttactggaaatgtattcatactgtgaattgtgctctgatggttaaaagacaagattgtcaagcattccgtattaacagtggatgtagaaaattttttcagatggacaaaatgtatatggtacagatgtaaagttttctatgtaaaaaattctgtacaactttctgtacaatattgattcccatctggcatattctaatcaggttataggtcaataaagtttttgaattatttcatcagtgcaatc

SEQ ID NO: 357707 - DNA, 1776 bp, Homo sapiens
tacatagagcattggcctgtggcgcgcacgccatgctagggtgcagatgtaccatgcgcccatacgttcgttgacgctaggaagaatacctggtctggactgtggcttgcattttctctaatgaatgtgctgggtggcgaagccgagcttgtggcttggatcgagagatgcgcaaggacccaagacgtgcatggcggtcagtaatcgtgtggtctatgaaagcacggaggtgctcactccgctctcgctatcatcttgacaacgccccctccgcatgaagcctggactaacttactgcttttgtttctaactaaagttctaaagataagtgataataggtttaaagctcatgcatcattctactaccctctcttatgtgaaattatgcaatttgacttgattcctgaacttcgtgctgttcttagaagattttttctgcgaatcggagtagtttttcagatatcacaaccacctgaacaggaacttggaataaacaagcaatgatgggaacttaatatttttgttggcatttacatccctctgctctttaaaaggacgctggagctgaggtttcctacctgaaaaatgatttctctggattgcagtgtctgagttactggtaaagatgcttagaagtcttactcaaacttgcaacactccagtcccttttagtgctggtggattttgtgtgttatattggcctcatgttgagcagaaagcctgtttaaacagtgtcagctcatgctcacgggtccttccctgtcttccacggcaggaaaagccccacgtttttggcaggtgtggaagtgaaacttacccaaagaactatagatgtaaagattgaacttctacaagaagtacaactcaggagagctgtattttgaaggataaaatgtttataattggggagtggggagagaagaagaaattattgttcatggtaaaagatatttagcaactatggtattcttattctgaagatttttgcacactcaggctatctgagatactggtaatcatcctgtgaaaaatgtacagagatgcaggtctgtaatataaaaatcttaaaacattatatagttcttcctgcactgttttctttattttcttattcatttgctaaatacccataatattttgtcaaatgcactaaacatttgggtggaactttcttttttattttatagggatttttagttttgccctttttggtaggtggtgattttgaggctgtaacatgcccagaagctgttgtggccgacacttcaacaatagggaaaaaaaggtagaaaatatccctactgacagtaactacctgtcacatatttctcttaggacttttaaagatgagccattaaaatagaatgatcctttatggaccaaaacttgaatcactgcaaaatgaatccagattgctgtcattttcttttcttttgggtggtggggcttgatgtagattttactctatgtacagaatttaacgttgaatatattaaaataacaaatctggcatggtttgcggaggttagatttactggaaatgtattcatactgtgaattgtgctctgatggttaaaagacaagattgtcaagcattccgtattaacagtggatgtagaaaattttttcagatggacaaaatgtatatggtacagatgtaaagttttctatgtaaaaaattctgtacaactttctgtacaatattgattcccatctggcatattctaatcaggttataggtcaataaagtttttgaattatttcatcagtgcaatc

SEQ ID NO: 357708 - DNA, 6198 bp, Homo sapiens
cggccgcggcgggtgctaatccccacagtagccagggtagcccttctctcgcggtgcctctgagagccgccgccacctcgtccctcagttcccggcagacagccgcccgggccgggctccctcaccgccaccagggccggagggacgagtgagaggggcggccgggacgcgacccccgggccgggagaagcggaggcccgacgggcgcggccctcgaggtacggcttcttgggggcggcgaggacctcgacgcccttcgccgacaccgcggctggtcccgctcgcccgccccttcctgatcctgccgctgccctccacgcctccaatcccccacctccaccccctctcctttctctcttctcttccttcctctcctcctcctcccctccagccgctgggagccgcgggtcggacgagccgccgcctccttctctgcgtccatgtatgaggggaagaagacgaagaacatgttcctgacccgggctctggagaagatattggccgacaaggaagtgaagaaggcgcatcactcccagctgcgcaaagcttgcgaggtggcgttagaggaaataaaagcggaaactgaaaaacagagtcctcctcatggagaagcaaaagctggatcaagcacccttccaccagtgaaatcaaagacaaattttattgaagcagacaagtacttcttgccttttgagttggcatgccagtccaaatgtcctcgcatagttagtacatctctagattgcttacagaaacttattgcttatgggcacttgactggcaatgctccagatagtacaacaccaggcaaaaaattaattgatagaattattgaaacaatatgtggctgctttcagggccctcagacagatgaaggagttcagctgcagataataaaggctttacttactgcagtaacatcacaacacatagaaattcatgaagggactgtactgcaagctgtgagaacatgttacaatatctacttagcaagcaaaaatctcatcaatcagacaacagccaaagctactctcactcagatgctaaatgttatctttgcacgcatggaaaaccaagcattacaggaagcaaaacaaatggaaaaagaaaggcatcggcagcatcatcatctgttacagtctccagtaagccatcacgagcctgaatcacctcaacttagatatttgccacctcagactgttgatcatatatcccaagaacacgaaggggaccttgacctccatacaaatgatgtagataaaagtcttcaggatgacacagagcctgaaaatggatctgatatttccagtgcagaaaatgaacagactgaagctgatcaggcaactgcagctgaaacattatctaaaaatgaagtgttatatgacggagaaaaccatgattgtgaggaaaagccacaagacattgtacagaacattgtagaagaaatggtgaacattgttgttggagatatgggagaagggactactataaatgcaagtgcagatggcaacattggaactatagaggatggtagtgacagtgaaaatattcaagcaaatggaattccaggaacaccaatttctgttgcatatacaccatccttacctgatgatagattgtcagtctcttccaatgatactcaggaatctggaaattcttcaggaccttcacctggtgctaagttttcccacattttacaaaaggatgcctttctagtattcaggtcattgtgtaaactgtcaatgaaaccactgtcagatggaccaccagatccaaagtctcatgaactacgatccaagattctttcattgcagttacttctatccattctgcagaatgcaggacctattttcaggacaaatgagatgtttattaatgctattaagcagtatctttgtgttgcactctcaaaaaatggagtctcatctgttccagaggtttttgagctttctctttctatatttcttactttgttgtcaaatttcaagacacatctgaagatgcaaattgaggtgttctttaaagaaattttcttatacattttggaaacttctaccagctcatttgatcacaaatggatggttattcagacactgacgaggatttgtgcagatgctcagagtgtagtggatatttatgtaaactatgactgtgacttaaatgcagccaatatatttgaaagactagtaaatgatctatcaaaaattgctcaaggaaggggcagtcaagaacttggtatgagtaatgttcaggaattgagcctgaggaaaaaaggtttagaatgcttagtgtcgattttgaagtgtatggttgaatggagtaaggatcagtatgtgaatcccaactcccagacaactcttggtcaggaaaaaccctcagagcaagagatgagtgaaatcaaacaccctgagacaataaacagatacggaagtttaaattccctggagtcaacatcatcatcaggaataggcagctacagtacacagatgtctggcactgataatccagaacaatttgaggtcctaaagcaacaaaaagaaataatagaacaagggatagatttatttaataagaaaccaaagagaggaatacagtacctccaagaacaagggatgcttggcaccacacctgaagatattgcccaattcttacatcaagaggaaagattagactctactcaagtgggtgagttcctgggagataatgataaatttaacaaagaagtcatgtatgcatatgtggaccaacatgacttttcaggaaaagacttcgtttcagcccttcgtatgtttctagaaggatttcgtcttccaggggaagctcagaaaatcgatcgattaatggaaaaatttgctgcaagatacctagaatgcaaccaaggacaaactctctttgctagtgcggatacagcttatgttttggcttattcaattatcatgttgaccacagaccttcacagtccacaggtgaaaaataaaatgacaaaggaacaatacattaagatgaatagaggtatcaatgacagtaaagaccttcctgaagagtatctatcagccatctataatgaaatagctgggaaaaagatatcaatgaaagaaacaaaagaactaacaatccctacaaaatcaagtaaacagaatgtagccagtgaaaaacaaagaagacttctgtataacttagaaatggagcagatggccaagacagctaaagcactcatggaggccgtgagccatgttcaggcaccctttacaagtgcaacacatttggagcatgtgaggcccatgtttaagttggcttggacgccttttctggctgcattcagtgtgggtctacaagattgtgatgatactgaagtagcctctctttgcctggaaggtataagatgtgcaatcagaattgcatgcattttcagcattcagctggagagagatgcatatgtccaggcactagcaagatttaccttactcacagtgagttccggtattactgaaatgaaacagaagaacattgacacaataaaaacacttatcacagtggctcatacagatggaaattatttaggaaattcatggcatgagattctgaagtgcatcagtcagttggagctggcacagcttataggaactggagtgaaacctcgatacatttctggaacagtgcgaggcagagaaggatctcttactggaacaaaagatcaggctcctgatgaatttgtgggtttagggctagttggaggaaatgtggactggaaacagatagcaagtattcaggaatccattggagaaaccagttctcagagtgttgttgttgctgtagatagaatattcacaggatctacaaggctagatggaaatgccattgtggattttgtccgttggctctgtgctgtgtctatggatgaattactttccacgacacacccaagaatgtttagtctacaaaaaatagtagaaatatcatattacaacatgggaagaataagattacagtggtctcgaatttgggaagttattggagatcattttaataaggttgggtgtaatcctaatgaagatgtagctatttttgcagtagactccttgaggcagttgtcaatgaagttcttagagaaaggggagcttgctaacttcagattccagaaggatttcttaagaccttttgaacatataatgaaacggaacaggtctccaacaattcgagatatggttgtacggtgtatagcacagatggttaattctcaagctgctaacattcgatctggatggaagaacattttctctgtatttcatctagctgcatctgatcaagatgaaagcatagtggaacttgcattccaaacaaccgggcacattgtcacccttgtatttgaaaaacactttccagcgaccattgattctttccaggatgcagtgaagtgtttgtctgaatttgcgtgcaatgcagctttcccagacacaagtatggaagcaattcgacttattcgccattgtgcaaaatatgtgtctgatagacctcaggctttcaaggaatacacaagcgatgatatgaacgtagcacctgaagacagggtgtgggtgagaggatggttcccaattctctttgagttatcctgtatcatcaatagatgcaaattagatgtaagaaccaggggtttaacagtaatgtttgaaataatgaaaacatatggccacacttatgagaaacactggtggcaggatttatttagaattgttttcagaatctttgacaatatgaaattgccagaacaacagacagagaaagctgaatggatgacaacaacttgcaatcatgcactttatgcaatctgtgatgtattcactcagtatttagaagtactcagtgatgtacttttggatgacatttttgctcagctctactggtgtgtgcagcaagacaatgagcagttagcgcgatctggtacaaactgtttagagaatgttgttattctgaatggtgaaaaatttaccctagaaatctgggataaaacttgcaactgcacactggatatcttcaaaaccacaatcccacatgcgctgttgacctggcgacccaattctggagaaactgcccccccacctccatctcctgtaagtgaaaagccattggatacaatatcacagaagtctgtagatattcatgattctattcaaccaaggtctgtggataacagaccacaagcaccactggtttctgcgtctgctgttaatgaagaagtcagcaaaattaaatctacagcaaaatttccagaacaaaaattgtttgctgccctgttgattaaatgtgttgtgcagctggaactcatccagactatcgacaacattgtcttcttcccagccacaagtaagaaagaagatgcagaaaacttagctgcagcacagagagatgcggtggactttgatgttcgcgttgatactcaagaccaaggaatgtaccgctttttaacatcacaacaactttttaagctactggactgcttattagagtcacatagatttgcaaaagcgtttaattccaacaacgaacagaggactgccctgtggaaagcaggattcaaaggcaaatccaagcccaaccttctgaagcaggagaccagcagcctggcctgtgggctgcgcattctcttccggatgtacatggatgagagccgcgttagtgcctgggaggaggtccagcagaggcttttgaatgtctgcagtgaagcactaagttacttcctcactctaacatcagaaagtcatcgagaagcctggactaacttactgcttttgtttctaactaaagttctaaagataagtgataataggaccaaacggaccctgtgagcatggggctgccagtgaaaggaggatgcctgggaatgaaatcaatagaagagatgcagaaagcctacggaaaaacagcgtgctgatactatttgacacagcaatgattatttcttacctttggcaccttcctgcatttttattctgttcagcctcttctgctgctctcttagcagggcttgctgctgaatctctaaggtgtgatgatctcttggaggatccaggtacataaatttcagatcaactcgtgtttctgaatctggtataaaaaatatgttatataactaagttaaatgttgttttcaaatgggattttgtaaaacttcactgtaagtaacatgagtaacctaatttc

SEQ ID NO: 357709 - DNA, 5996 bp, Homo sapiens
  misc_feature (5996)..(5996): n is a, c, g, or t
cggccgcggcgggtgctaatccccacagtagccagggtagcccttctctcgcggtgcctctgagagccgccgccacctcgtccctcagttcccggcagacagccgcccgggccgggctccctcaccgccaccagggccggagggacgagtgagaggggcggccgggacgcgacccccgggccgggagaagcggaggcccgacgggcgcggccctcgaggtacggcttcttgggggcggcgaggacctcgacgcccttcgccgacaccgcggctggtcccgctcgcccgccccttcctgatcctgccgctgccctccacgcctccaatcccccacctccaccccctctcctttctctcttctcttccttcctctcctcctcctcccctccagccgctgggagccgcgggtcggacgagccgccgcctccttctctgcgtccatgtatgaggggaagaagacgaagaacatgttcctgacccgggctctggagaagatattggccgacaaggaagtgaagaaggcgcatcactcccagctgcgcaaagcttgcgaggtggcgttagaggaaataaaagcggaaactgaaaaacagagtcctcctcatggagaagcaaaagctggatcaagcacccttccaccagtgaaatcaaagacaaattttattgaagcagacaagtacttcttgccttttgagttggcatgccagtccaaatgtcctcgcatagttagtacatctctagattgcttacagaaacttattgcttatgggcacttgactggcaatgctccagatagtacaacaccaggcaaaaaattaattgatagaattattgaaacaatatgtggctgctttcagggccctcagacagatgaaggagttcagctgcagataataaaggctttacttactgcagtaacatcacaacacatagaaattcatgaagggactgtactgcaagctgtgagaacatgttacaatatctacttagcaagcaaaaatctcatcaatcagacaacagccaaagctactctcactcagatgctaaatgttatctttgcacgcatggaaaaccaagcattacaggaagcaaaacaaatggaaaaagaaaggcatcggcagcatcatcatctgttacagtctccagtaagccatcacgagcctgaatcacctcaacttagatatttgccacctcagactgttgatcatatatcccaagaacacgaaggggaccttgacctccatacaaatgatgtagataaaagtcttcaggatgacacagagcctgaaaatggatctgatatttccagtgcagaaaatgaacagactgaagctgatcaggcaactgcagctgaaacattatctaaaaatgaagtgttatatgacggagaaaaccatgattgtgaggaaaagccacaagacattgtacagaacattgtagaagaaatggtgaacattgttgttggagatatgggagaagggactactataaatgcaagtgcagatggcaacattggaactatagaggatggtagtgacagtgaaaatattcaagcaaatggaattccaggaacaccaatttctgttgcatatacaccatccttacctgatgatagattgtcagtctcttccaatgatactcaggaatctggaaattcttcaggaccttcacctggtgctaagttttcccacattttacaaaaggatgcctttctagtattcaggtcattgtgtaaactgtcaatgaaaccactgtcagatggaccaccagatccaaagtctcatgaactacgatccaagattctttcattgcagttacttctatccattctgcagaatgcaggacctattttcaggacaaatgagatgtttattaatgctattaagcagtatctttgtgttgcactctcaaaaaatggagtctcatctgttccagaggtttttgagctttctctttctatatttcttactttgttgtcaaatttcaagacacatctgaagatgcaaattgaggtgttctttaaagaaattttcttatacattttggaaacttctaccagctcatttgatcacaaatggatggttattcagacactgacgaggatttgtgcagatgctcagagtgtagtggatatttatgtaaactatgactgtgacttaaatgcagccaatatatttgaaagactagtaaatgatctatcaaaaattgctcaaggaaggggcagtcaagaacttggtatgagtaatgttcaggaattgagcctgaggaaaaaaggtttagaatgcttagtgtcgattttgaagtgtatggttgaatggagtaaggatcagtatgtgaatcccaactcccagacaactcttggtcaggaaaaaccctcagagcaagagatgagtgaaatcaaacaccctgagacaataaacagatacggaagtttaaattccctggagtcaacatcatcatcaggaataggcagctacagtacacagatgtctggcactgataatccagaacaatttgaggtcctaaagcaacaaaaagaaataatagaacaagggatagatttatttaataagaaaccaaagagaggaatacagtacctccaagaacaagggatgcttggcaccacacctgaagatattgcccaattcttacatcaagaggaaagattagactctactcaagtgggtgagttcctgggagataatgataaatttaacaaagaagtcatgtatgcatatgtggaccaacatgacttttcaggaaaagacttcgtttcagcccttcgtatgtttctagaaggatttcgtcttccaggggaagctcagaaaatcgatcgattaatggaaaaatttgctgcaagatacctagaatgcaaccaaggacaaactctctttgctagtgcggatacagcttatgttttggcttattcaattatcatgttgaccacagaccttcacagtccacaggtgaaaaataaaatgacaaaggaacaatacattaagatgaatagaggtatcaatgacagtaaagaccttcctgaagagtatctatcagccatctataatgaaatagctgggaaaaagatatcaatgaaagaaacaaaagaactaacaatccctacaaaatcaagtaaacagaatgtagccagtgaaaaacaaagaagacttctgtataacttagaaatggagcagatggccaagacagctaaagcactcatggaggccgtgagccatgttcaggcaccctttacaagtgcaacacatttggagcatgtgaggcccatgtttaagttggcttggacgccttttctggctgcattcagtgtgggtctacaagattgtgatgatactgaagtagcctctctttgcctggaaggtataagatgtgcaatcagaattgcatgcattttcagcattcagctggagagagatgcatatgtccaggcactagcaagatttaccttactcacagtgagttccggtattactgaaatgaaacagaagaacattgacacaataaaaacacttatcacagtggctcatacagatggaaattatttaggaaattcatggcatgagattctgaagtgcatcagtcagttggagctggcacagcttataggaactggagtgaaacctcgatacatttctggaacagtgcgaggcagagaaggatctcttactggaacaaaagatcaggctcctgatgaatttgtgggtttagggctagttggaggaaatgtggactggaaacagatagcaagtattcaggaatccattggagaaaccagttctcagagtgttgttgttgctgtagatagaatattcacaggatctacaaggctagatggaaatgccattgtggattttgtccgttggctctgtgctgtgtctatggatgaattactttccacgacacacccaagaatgtttagtctacaaaaaatagtagaaatatcatattacaacatgggaagaataagattacagtggtctcgaatttgggaagttattggagatcattttaataaggttgggtgtaatcctaatgaagatgtagctatttttgcagtagactccttgaggcagttgtcaatgaagttcttagagaaaggggagcttgctaacttcagattccagaaggatttcttaagaccttttgaacatataatgaaacggaacaggtctccaacaattcgagatatggttgtacggtgtatagcacagatggttaattctcaagctgctaacattcgatctggatggaagaacattttctctgtatttcatctagctgcatctgatcaagatgaaagcatagtggaacttgcattccaaacaaccgggcacattgtcacccttgtatttgaaaaacactttccagcgaccattgattctttccaggatgcagtgaagtgtttgtctgaatttgcgtgcaatgcagctttcccagacacaagtatggaagcaattcgacttattcgccattgtgcaaaatatgtgtctgatagacctcaggctttcaaggaatacacaagcgatgatatgaacgtagcacctgaagacagggtgtgggtgagaggatggttcccaattctctttgagttatcctgtatcatcaatagatgcaaattagatgtaagaaccaggggtttaacagtaatgtttgaaataatgaaaacatatggccacacttatgagaaacactggtggcaggatttatttagaattgttttcagaatctttgacaatatgaaattgccagaacaacagacagagaaagctgaatggatgacaacaacttgcaatcatgcactttatgcaatctgtgatgtattcactcagtatttagaagtactcagtgatgtacttttggatgacatttttgctcagctctactggtgtgtgcagcaagacaatgagcagttagcgcgatctggtacaaactgtttagagaatgttgttattctgaatggtgaaaaatttaccctagaaatctgggataaaacttgcaactgcacactggatatcttcaaaaccacaatcccacatgcgctgttgacctggcgacccaattctggagaaactgcccccccacctccatctcctgtaagtgaaaagccattggatacaatatcacagaagtctgtagatattcatgattctattcaaccaaggtctgtggataacagaccacaagcaccactggtttctgcgtctgctgttaatgaagaagtcagcaaaattaaatctacagcaaaatttccagaacaaaaattgtttgctgccctgttgattaaatgtgttgtgcagctggaactcatccagactatcgacaacattgtcttcttcccagccacaagtaagaaagaagatgcagaaaacttagctgcagcacagagagatgcggtggactttgatgttcgcgttgatactcaagaccaaggaatgtaccgctttttaacatcacaacaactttttaagctactggactgcttattagagtcacatagatttgcaaaagcgtttaattccaacaacgaacagaggactgccctgtggaaagcaggattcaaaggcaaatccaagcccaaccttctgaagcaggagaccagcagcctggcctgtgggctgcgcattctcttccggatgtacatggatgagagccgcgttagtgcctgggaggaggtccagcagaggcttttgaatgtctgcagtgaagcactaagttacttcctcactctaacatcagaaagtcatcgagaagcctggactaacttactgcttttgtttctaactaaagttctaaagataagtgataataggtttgcagaccttttgtccttttttactcgaatttaaaaaattttcaacaggtatttatctgaagtactgggtacaggccagtttttttgttttttgttgttgttgttttttgaataccaccacatgatcatgctcatcagcggatgggatcctctagaacggcgcagacan

SEQ ID NO: 357710 - DNA, 1806 bp, Homo sapiens
cggccgcggcgggtgctaatccccacagtagccagggtagcccttctctcgcggtgcctctgagagccgccgccacctcgtccctcagttcccggcagacagccgcccgggccgggctccctcaccgccaccagggccggagggacgagtgagaggggcggccgggacgcgacccccgggccgggagaagcggaggcccgacgggcgcggccctcgaggtacggcttcttgggggcggcgaggacctcgacgcccttcgccgacaccgcggctggtcccgctcgcccgccccttcctgatcctgccgctgccctccacgcctccaatcccccacctccaccccctctcctttctctcttctcttccttcctctcctcctcctcccctccagccgctgggagccgcgggtcggacgagccgccgcctccttctctgcgtccatgtatgaggggaagaagacgaagaacatgttcctgacccgggctctggagaagatattggccgacaaggaagtgaagaaggcgcatcactcccagctgcgcaaagcttgcgaggtggcgttagaggaaataaaagcggaaactgaaaaacagagtcctcctcatggagaagcaaaagctggatcaagcacccttccaccagtgaaatcaaagacaaattttattgaagcagacaagtacttcttgccttttgagttggcatgccagtccaaatgtcctcgcatagttagtacatctctagattgcttacagaaacttattgcttatgggcacttgactggcaatgctccagatagtacaacaccaggcaaaaaattaattgatagaattattgaaacaatatgtggctgctttcagggccctcagacagatgaaggagttcagctgcagataataaaggctttacttactgcagtaacatcacaacacatagaaattcatgaagggactgtactgcaagctgtgagaacatgttacaatatctacttagcaagcaaaaatctcatcaatcagacaacagccaaagctactctcactcagatgctaaatgttatctttgcacgcatggaaaaccaagcattacaggaagcaaaacaaatggaaaaagaaaggcatcggcagcatcatcatctgttacagtctccagtaagccatcacgagcctgaatcacctcaacttagatatttgccacctcagactgttgatcatatatcccaagaacacgaaggggaccttgacctccatacaaatgatgtagataaaagtcttcaggatgacacagagcctgaaaatggatctgatatttccagtgcagaaaatgaacagactgaagctgatcaggcaactgcagctgaaagtaatcttcttgaaaagggggtttggggtgtgtgttaagggaaatgtgtaggaatgagagttttgatgaagaaatgttgaaaggataatatgatttaataagtgtgtcagacacattgtggtaattgtggactttcctcattgtaggtggtaaaattaatttgactctaacctacaagatatctatgaatgatactttgcatttattagcatctcatgagcagtatgatttatagatttcctttggagcgcagatatatttctaaagagggtcataaatgtccgttaaatgttatataggaatttcagttttcttaagattggtttcatagcaaacaagtgacctagtaaggttttctggaatatgactgaaaattttaaaaaatcattaccagttttaaaaatatgattatggtaaaaaaaaaaaagtactgaaattaaatataaaaac

SEQ ID NO: 357711 - DNA, 1710 bp, Homo sapiens
cggccgcggcgggtgctaatccccacagtagccagggtagcccttctctcgcggtgcctctgagagccgccgccacctcgtccctcagttcccggcagacagccgcccgggccgggctccctcaccgccaccagggccggagggacgagtgagaggggcggccgggacgcgacccccgggccgggagaagcggaggcccgacgggcgcggccctcgaggtacggcttcttgggggcggcgaggacctcgacgcccttcgccgacaccgcggctggtcccgctcgcccgccccttcctgatcctgccgctgccctccacgcctccaatcccccacctccaccccctctcctttctctcttctcttccttcctctcctcctcctcccctccagccgctgggagccgcgggtcggacgagccgccgcctccttctctgcgtccatgtatgaggggaagaagacgaagaacatgttcctgacccgggctctggagaagatattggccgacaaggaagtgaagaaggcgcatcactcccagctgcgcaaagcttgcgaggtggcgttagaggaaataaaagcggaaactgaaaaacagagtcctcctcatggagaagcaaaagctggatcaagcacccttccaccagtgaaatcaaagacaaattttattgaagcagacaagtacttcttgccttttgagttggcatgccagtccaaatgtcctcgcatagttagtacatctctagattgcttacagaaacttattgcttatgggcacttgactggcaatgctccagatagtacaacaccaggcaaaaaattaattgatagaattattgaaacaatatgtggctgctttcagggccctcagacagatgaaggagttcagctgcagataataaaggctttacttactgcagtaacatcacaacacatagaaattcatgaagggactgtactgcaagctgtgagaacatgttacaatatctacttagcaagcaaaaatctcatcaatcagacaacagccaaagctactctcactcagatgctaaatgttatctttgcacgcatggaaaaccaagcattacaggaagcaaaacaaatggaaaaagaaaggcatcggcagcatcatcatctgttacagtctccagtaagccatcacgagcctgaatcacctcaacttagatatttgccacctcagactgttgatcatatatcccaagaacacgaaggggaccttgacctccatacaaatgatgtagataaaagtcttcaggatgacacagagcctgaaaatggatctgatatttccagtgcagaaaatgaacagactgaagctgatcaggcaactgcagctgaaacattatctaaaaatgaagtgttatatgacggagaaaaccatgattgtgaggaaaagccacaagacattgtacagaacattgtagaagaaatggtgaacattgttgttggagatatgggagaagggactactataaatgcaagtgcagatggcaacattggaactatagaggatggtagtgacagtgaaaatattcccttaatccaaagcctaatccagagcaagaccctaactctctttagttctgtgaaggctgagagaggtgagaaagctgcaggagaaaagtttgaagctatcagaggttagttcatgagatcttcggaagactctccagtaacataaaactgtgatacgc

SEQ ID NO: 357712 - DNA, 7089 bp, Homo sapiens
cggccgcggcgggtgctaatccccacagtagccagggtagcccttctctcgcggtgcctctgagagccgccgccacctcgtccctcagttcccggcagacagccgcccgggccgggctccctcaccgccaccagggccggagggacgagtgagaggggcggccgggacgcgacccccgggccgggagaagcggaggcccgacgggcgcggccctcgagccgctgggagccgcgggtcggacgagccgccgcctccttctctgcgtccatgtatgaggggaagaagacgaagaacatgttcctgacccgggctctggagaagatattggccgacaaggaagtgaagaaggcgcatcactcccagctgcgcaaagcttgcgaggtggcgttagaggaaataaaagcggaaactgaaaaacagagtcctcctcatggagaagcaaaagctggatcaagcacccttccaccagtgaaatcaaagacaaattttattgaagcagacaagtacttcttgccttttgagttggcatgccagtccaaatgtcctcgcatagttagtacatctctagattgcttacagaaacttattgcttatgggcacttgactggcaatgctccagatagtacaacaccaggcaaaaaattaattgatagaattattgaaacaatatgtggctgctttcagggccctcagacagatgaaggagttcagctgcagataataaaggctttacttactgcagtaacatcacaacacatagaaattcatgaagggactgtactgcaagctgtgagaacatgttacaatatctacttagcaagcaaaaatctcatcaatcagacaacagccaaagctactctcactcagatgctaaatgttatctttgcacgcatggaaaaccaagcattacaggaagcaaaacaaatggaaaaagaaaggcatcggcagcatcatcatctgttacagtctccagtaagccatcacgagcctgaatcacctcaacttagatatttgccacctcagactgttgatcatatatcccaagaacacgaaggggaccttgacctccatacaaatgatgtagataaaagtcttcaggatgacacagagcctgaaaatggatctgatatttccagtgcagaaaatgaacagactgaagctgatcaggcaactgcagctgaaacattatctaaaaatgaagtgttatatgacggagaaaaccatgattgtgaggaaaagccacaagacattgtacagaacattgtagaagaaatggtgaacattgttgttggagatatgggagaagggactactataaatgcaagtgcagatggcaacattggaactatagaggatggtagtgacagtgaaaatattcaagcaaatggaattccaggaacaccaatttctgttgcatatacaccatccttacctgatgatagattgtcagtctcttccaatgatactcaggaatctggaaattcttcaggaccttcacctggtgctaagttttcccacattttacaaaaggatgcctttctagtattcaggtcattgtgtaaactgtcaatgaaaccactgtcagatggaccaccagatccaaagtctcatgaactacgatccaagattctttcattgcagttacttctatccattctgcagaatgcaggacctattttcaggacaaatgagatgtttattaatgctattaagcagtatctttgtgttgcactctcaaaaaatggagtctcatctgttccagaggtttttgagctttctctttctatatttcttactttgttgtcaaatttcaagacacatctgaagatgcaaattgaggtgttctttaaagaaattttcttatacattttggaaacttctaccagctcatttgatcacaaatggatggttattcagacactgacgaggatttgtgcagatgctcagagtgtagtggatatttatgtaaactatgactgtgacttaaatgcagccaatatatttgaaagactagtaaatgatctatcaaaaattgctcaaggaaggggcagtcaagaacttggtatgagtaatgttcaggaattgagcctgaggaaaaaaggtttagaatgcttagtgtcgattttgaagtgtatggttgaatggagtaaggatcagtatgtgaatcccaactcccagacaactcttggtcaggaaaaaccctcagagcaagagatgagtgaaatcaaacaccctgagacaataaacagatacggaagtttaaattccctggagtcaacatcatcatcaggaataggcagctacagtacacagatgtctggcactgataatccagaacaatttgaggtcctaaagcaacaaaaagaaataatagaacaagggatagatttatttaataagaaaccaaagagaggaatacagtacctccaagaacaagggatgcttggcaccacacctgaagatattgcccaattcttacatcaagaggaaagattagactctactcaagtgggtgagttcctgggagataatgataaatttaacaaagaagtcatgtatgcatatgtggaccaacatgacttttcaggaaaagacttcgtttcagcccttcgtatgtttctagaaggatttcgtcttccaggggaagctcagaaaatcgatcgattaatggaaaaatttgctgcaagatacctagaatgcaaccaaggacaaactctctttgctagtgcggatacagcttatgttttggcttattcaattatcatgttgaccacagaccttcacagtccacaggtgaaaaataaaatgacaaaggaacaatacattaagatgaatagaggtatcaatgacagtaaagaccttcctgaagagtatctatcagccatctataatgaaatagctgggaaaaagatatcaatgaaagaaacaaaagaactaacaatccctacaaaatcaagtaaacagaatgtagccagtgaaaaacaaagaagacttctgtataacttagaaatggagcagatggccaagacagctaaagcactcatggaggccgtgagccatgttcaggcaccctttacaagtgcaacacatttggagcatgtgaggcccatgtttaagttggcttggacgccttttctggctgcattcagtgtgggtctacaagattgtgatgatactgaagtagcctctctttgcctggaaggtataagatgtgcaatcagaattgcatgcattttcagcattcagctggagagagatgcatatgtccaggcactagcaagatttaccttactcacagtgagttccggtattactgaaatgaaacagaagaacattgacacaataaaaacacttatcacagtggctcatacagatggaaattatttaggaaattcatggcatgagattctgaagtgcatcagtcagttggagctggcacagcttataggaactggagtgaaacctcgatacatttctggaacagtgcgaggcagagaaggatctcttactggaacaaaagatcaggctcctgatgaatttgtgggtttagggctagttggaggaaatgtggactggaaacagatagcaagtattcaggaatccattggagaaaccagttctcagagtgttgttgttgctgtagatagaatattcacaggatctacaaggctagatggaaatgccattgtggattttgtccgttggctctgtgctgtgtctatggatgaattactttccacgacacacccaagaatgtttagtctacaaaaaatagtagaaatatcatattacaacatgggaagaataagattacagtggtctcgaatttgggaagttattggagatcattttaataaggttgggtgtaatcctaatgaagatgtagctatttttgcagtagactccttgaggcagttgtcaatgaagttcttagagaaaggggagcttgctaacttcagattccagaaggatttcttaagaccttttgaacatataatgaaacggaacaggtctccaacaattcgagatatggttgtacggtgtatagcacagatggttaattctcaagctgctaacattcgatctggatggaagaacattttctctgtatttcatctagctgcatctgatcaagatgaaagcatagtggaacttgcattccaaacaaccgggcacattgtcacccttgtatttgaaaaacactttccagcgaccattgattctttccaggatgcagtgaagtgtttgtctgaatttgcgtgcaatgcagctttcccagacacaagtatggaagcaattcgacttattcgccattgtgcaaaatatgtgtctgatagacctcaggctttcaaggaatacacaagcgatgatatgaacgtagcacctgaagacagggtgtgggtgagaggatggttcccaattctctttgagttatcctgtatcatcaatagatgcaaattagatgtaagaaccaggggtttaacagtaatgtttgaaataatgaaaacatatggccacacttatgagaaacactggtggcaggatttatttagaattgttttcagaatctttgacaatatgaaattgccagaacaacagacagagaaagctgaatggatgacaacaacttgcaatcatgcactttatgcaatctgtgatgtattcactcagtatttagaagtactcagtgatgtacttttggatgacatttttgctcagctctactggtgtgtgcagcaagacaatgagcagttagcgcgatctggtacaaactgtttagagaatgttgttattctgaatggtgaaaaatttaccctagaaatctgggataaaacttgcaactgcacactggatatcttcaaaaccacaatcccacatgcgctgttgacctggcgacccaattctggagaaactgcccccccacctccatctcctgtaagtgaaaagccattggatacaatatcacagaagtctgtagatattcatgattctattcaaccaaggtctgtggataacagaccacaagcaccactggtttctgcgtctgctgttaatgaagaagtcagcaaaattaaatctacagcaaaatttccagaacaaaaattgtttgctgccctgttgattaaatgtgttgtgcagctggaactcatccagactatcgacaacattgtcttcttcccagccacaagtaagaaagaagatgcagaaaacttagctgcagcacagagagatgcggtggactttgatgttcgcgttgatactcaagaccaaggaatgtaccgctttttaacatcacaacaactttttaagctactggactgcttattagagtcacatagatttgcaaaagcgtttaattccaacaacgaacagaggactgccctgtggaaagcaggattcaaaggcaaatccaagcccaaccttctgaagcaggagaccagcagcctggcctgtgggctgcgcattctcttccggatgtacatggatgagagccgcgttagtgcctgggaggaggtccagcagaggcttttgaatgtctgcagtgaagcactaagttacttcctcactctaacatcagaaagtcatcgagaagcctggactaacttactgcttttgtttctaactaaagttctaaagataagtgataataggtttaaagctcatgcatcattctactaccctctcttatgtgaaattatgcaatttgacttgattcctgaacttcgtgctgttcttagaagattttttctgcgaatcggagtagtttttcagatatcacaaccacctgaacaggaacttggaataaacaagcaatgatgggaacttaatatttttgttggcatttacatccctctgctctttaaaaggacgctggagctgaggtttcctacctgaaaaatgatttctctggattgcagtgtctgagttactggtaaagatgcttagaagtcttactcaaacttgcaacactccagtcccttttagtgctggtggattttgtgtgttatattggcctcatgttgagcagaaagcctgtttaaacagtgtcagctcatgctcacgggtccttccctgtcttccacggcaggaaaagccccacgtttttggcaggtgtggaagtgaaacttacccaaagaactatagatgtaaagattgaacttctacaagaagtacaactcaggagagctgtattttgaaggataaaatgtttataattggggagtggggagagaagaagaaattattgttcatggtaaaagatatttagcaactatggtattcttattctgaagatttttgcacactcaggctatctgagatactggtaatcatcctgtgaaaaatgtacagagatgcaggtctgtaatataaaaatcttaaaacattatatagttcttcctgcactgttttctttattttcttattcatttgctaaatacccataatattttgtcaaatgcactaaacatttgggtggaactttcttttttattttatagggatttttagttttgccctttttggtaggtggtgattttgaggctgtaacatgcccagaagctgttgtggccgacacttcaacaatagggaaaaaaaggtagaaaatatccctactgacagtaactacctgtcacatatttctcttaggacttttaaagatgagccattaaaatagaatgatcctttatggaccaaaacttgaatcactgcaaaatgaatccagattgctgtcattttcttttcttttgggtggtggggcttgatgtagattttactctatgtacagaatttaacgttgaatatattaaaataacaaatctggcatggtttgcggaggttagatttactggaaatgtattcatactgtgaattgtgctctgatggttaaaagacaagattgtcaagcattccgtattaacagtggatgtagaaaattttttcagatggacaaaatgtatatggtacagatgtaaagttttctatgtaaaaaattctgtacaactttctgtacaatattgattcccatctggcatattctaatcaggttataggtcaataaagtttttgaattatttcatcagtgcaatc

SEQ ID NO: 357713 - DNA, 7238 bp, Homo sapiens
cggccgcggcgggtgctaatccccacagtagccagggtagcccttctctcgcggtgcctctgagagccgccgccacctcgtccctcagttcccggcagacagccgcccgggccgggctccctcaccgccaccagggccggagggacgagtgagaggggcggccgggacgcgacccccgggccgggagaagcggaggcccgacgggcgcggccctcgaggtacggcttcttgggggcggcgaggacctcgacgcccttcgccgacaccgcggctggtcccgctcgcccgccccttcctgatcctgccgctgccctccacgcctccaatcccccacctccaccccctctcctttctctcttctcttccttcctctcctcctcctcccctccagccgctgggagccgcgggtcggacgagccgccgcctccttctctgcgtccatgtatgaggggaagaagacgaagaacatgttcctgacccgggctctggagaagatattggccgacaaggaagtgaagaaggcgcatcactcccagctgcgcaaagcttgcgaggtggcgttagaggaaataaaagcggaaactgaaaaacagagtcctcctcatggagaagcaaaagctggatcaagcacccttccaccagtgaaatcaaagacaaattttattgaagcagacaagtacttcttgccttttgagttggcatgccagtccaaatgtcctcgcatagttagtacatctctagattgcttacagaaacttattgcttatgggcacttgactggcaatgctccagatagtacaacaccaggcaaaaaattaattgatagaattattgaaacaatatgtggctgctttcagggccctcagacagatgaaggagttcagctgcagataataaaggctttacttactgcagtaacatcacaacacatagaaattcatgaagggactgtactgcaagctgtgagaacatgttacaatatctacttagcaagcaaaaatctcatcaatcagacaacagccaaagctactctcactcagatgctaaatgttatctttgcacgcatggaaaaccaagcattacaggaagcaaaacaaatggaaaaagaaaggcatcggcagcatcatcatctgttacagtctccagtaagccatcacgagcctgaatcacctcaacttagatatttgccacctcagactgttgatcatatatcccaagaacacgaaggggaccttgacctccatacaaatgatgtagataaaagtcttcaggatgacacagagcctgaaaatggatctgatatttccagtgcagaaaatgaacagactgaagctgatcaggcaactgcagctgaaacattatctaaaaatgaagtgttatatgacggagaaaaccatgattgtgaggaaaagccacaagacattgtacagaacattgtagaagaaatggtgaacattgttgttggagatatgggagaagggactactataaatgcaagtgcagatggcaacattggaactatagaggatggtagtgacagtgaaaatattcaagcaaatggaattccaggaacaccaatttctgttgcatatacaccatccttacctgatgatagattgtcagtctcttccaatgatactcaggaatctggaaattcttcaggaccttcacctggtgctaagttttcccacattttacaaaaggatgcctttctagtattcaggtcattgtgtaaactgtcaatgaaaccactgtcagatggaccaccagatccaaagtctcatgaactacgatccaagattctttcattgcagttacttctatccattctgcagaatgcaggacctattttcaggacaaatgagatgtttattaatgctattaagcagtatctttgtgttgcactctcaaaaaatggagtctcatctgttccagaggtttttgagctttctctttctatatttcttactttgttgtcaaatttcaagacacatctgaagatgcaaattgaggtgttctttaaagaaattttcttatacattttggaaacttctaccagctcatttgatcacaaatggatggttattcagacactgacgaggatttgtgcagatgctcagagtgtagtggatatttatgtaaactatgactgtgacttaaatgcagccaatatatttgaaagactagtaaatgatctatcaaaaattgctcaaggaaggggcagtcaagaacttggtatgagtaatgttcaggaattgagcctgaggaaaaaaggtttagaatgcttagtgtcgattttgaagtgtatggttgaatggagtaaggatcagtatgtgaatcccaactcccagacaactcttggtcaggaaaaaccctcagagcaagagatgagtgaaatcaaacaccctgagacaataaacagatacggaagtttaaattccctggagtcaacatcatcatcaggaataggcagctacagtacacagatgtctggcactgataatccagaacaatttgaggtcctaaagcaacaaaaagaaataatagaacaagggatagatttatttaataagaaaccaaagagaggaatacagtacctccaagaacaagggatgcttggcaccacacctgaagatattgcccaattcttacatcaagaggaaagattagactctactcaagtgggtgagttcctgggagataatgataaatttaacaaagaagtcatgtatgcatatgtggaccaacatgacttttcaggaaaagacttcgtttcagcccttcgtatgtttctagaaggatttcgtcttccaggggaagctcagaaaatcgatcgattaatggaaaaatttgctgcaagatacctagaatgcaaccaaggacaaactctctttgctagtgcggatacagcttatgttttggcttattcaattatcatgttgaccacagaccttcacagtccacaggtgaaaaataaaatgacaaaggaacaatacattaagatgaatagaggtatcaatgacagtaaagaccttcctgaagagtatctatcagccatctataatgaaatagctgggaaaaagatatcaatgaaagaaacaaaagaactaacaatccctacaaaatcaagtaaacagaatgtagccagtgaaaaacaaagaagacttctgtataacttagaaatggagcagatggccaagacagctaaagcactcatggaggccgtgagccatgttcaggcaccctttacaagtgcaacacatttggagcatgtgaggcccatgtttaagttggcttggacgccttttctggctgcattcagtgtgggtctacaagattgtgatgatactgaagtagcctctctttgcctggaaggtataagatgtgcaatcagaattgcatgcattttcagcattcagctggagagagatgcatatgtccaggcactagcaagatttaccttactcacagtgagttccggtattactgaaatgaaacagaagaacattgacacaataaaaacacttatcacagtggctcatacagatggaaattatttaggaaattcatggcatgagattctgaagtgcatcagtcagttggagctggcacagcttataggaactggagtgaaacctcgatacatttctggaacagtgcgaggcagagaaggatctcttactggaacaaaagatcaggctcctgatgaatttgtgggtttagggctagttggaggaaatgtggactggaaacagatagcaagtattcaggaatccattggagaaaccagttctcagagtgttgttgttgctgtagatagaatattcacaggatctacaaggctagatggaaatgccattgtggattttgtccgttggctctgtgctgtgtctatggatgaattactttccacgacacacccaagaatgtttagtctacaaaaaatagtagaaatatcatattacaacatgggaagaataagattacagtggtctcgaatttgggaagttattggagatcattttaataaggttgggtgtaatcctaatgaagatgtagctatttttgcagtagactccttgaggcagttgtcaatgaagttcttagagaaaggggagcttgctaacttcagattccagaaggatttcttaagaccttttgaacatataatgaaacggaacaggtctccaacaattcgagatatggttgtacggtgtatagcacagatggttaattctcaagctgctaacattcgatctggatggaagaacattttctctgtatttcatctagctgcatctgatcaagatgaaagcatagtggaacttgcattccaaacaaccgggcacattgtcacccttgtatttgaaaaacactttccagcgaccattgattctttccaggatgcagtgaagtgtttgtctgaatttgcgtgcaatgcagctttcccagacacaagtatggaagcaattcgacttattcgccattgtgcaaaatatgtgtctgatagacctcaggctttcaaggaatacacaagcgatgatatgaacgtagcacctgaagacagggtgtgggtgagaggatggttcccaattctctttgagttatcctgtatcatcaatagatgcaaattagatgtaagaaccaggggtttaacagtaatgtttgaaataatgaaaacatatggccacacttatgagaaacactggtggcaggatttatttagaattgttttcagaatctttgacaatatgaaattgccagaacaacagacagagaaagctgaatggatgacaacaacttgcaatcatgcactttatgcaatctgtgatgtattcactcagtatttagaagtactcagtgatgtacttttggatgacatttttgctcagctctactggtgtgtgcagcaagacaatgagcagttagcgcgatctggtacaaactgtttagagaatgttgttattctgaatggtgaaaaatttaccctagaaatctgggataaaacttgcaactgcacactggatatcttcaaaaccacaatcccacatgcgctgttgacctggcgacccaattctggagaaactgcccccccacctccatctcctgtaagtgaaaagccattggatacaatatcacagaagtctgtagatattcatgattctattcaaccaaggtctgtggataacagaccacaagcaccactggtttctgcgtctgctgttaatgaagaagtcagcaaaattaaatctacagcaaaatttccagaacaaaaattgtttgctgccctgttgattaaatgtgttgtgcagctggaactcatccagactatcgacaacattgtcttcttcccagccacaagtaagaaagaagatgcagaaaacttagctgcagcacagagagatgcggtggactttgatgttcgcgttgatactcaagaccaaggaatgtaccgctttttaacatcacaacaactttttaagctactggactgcttattagagtcacatagatttgcaaaagcgtttaattccaacaacgaacagaggactgccctgtggaaagcaggattcaaaggcaaatccaagcccaaccttctgaagcaggagaccagcagcctggcctgtgggctgcgcattctcttccggatgtacatggatgagagccgcgttagtgcctgggaggaggtccagcagaggcttttgaatgtctgcagtgaagcactaagttacttcctcactctaacatcagaaagtcatcgagaagcctggactaacttactgcttttgtttctaactaaagttctaaagataagtgataataggtttaaagctcatgcatcattctactaccctctcttatgtgaaattatgcaatttgacttgattcctgaacttcgtgctgttcttagaagattttttctgcgaatcggagtagtttttcagatatcacaaccacctgaacaggaacttggaataaacaagcaatgatgggaacttaatatttttgttggcatttacatccctctgctctttaaaaggacgctggagctgaggtttcctacctgaaaaatgatttctctggattgcagtgtctgagttactggtaaagatgcttagaagtcttactcaaacttgcaacactccagtcccttttagtgctggtggattttgtgtgttatattggcctcatgttgagcagaaagcctgtttaaacagtgtcagctcatgctcacgggtccttccctgtcttccacggcaggaaaagccccacgtttttggcaggtgtggaagtgaaacttacccaaagaactatagatgtaaagattgaacttctacaagaagtacaactcaggagagctgtattttgaaggataaaatgtttataattggggagtggggagagaagaagaaattattgttcatggtaaaagatatttagcaactatggtattcttatttatctgagatactggtaatcatcctgtgaaaaatgtacagagatgcaggtctgtaatataaaaatcttaaaacattatatagttcttcctgcactgttttctttattttcttattcatttgctaaatacccataatattttgtcaaatgcactaaacatttgggtggaactttcttttttattttatagggatttttagttttgccctttttggtaggtggtgattttgaggctgtaacatgcccagaagctgttgtggccgacacttcaacaatagggaaaaaaaggtagaaaatatccctactgacagtaactacctgtcacatatttctcttaggacttttaaagatgagccattaaaatagaatgatcctttatggaccaaaacttgaatcactgcaaaatgaatccagattgctgtcattttcttttcttttgggtggtggggcttgatgtagattttactctatgtacagaatttaacgttgaatatattaaaataacaaatctggcatggtttgcggaggttagatttactggaaatgtattcatactgtgaattgtgctctgatggttaaaagacaagattgtcaagcattccgtattaacagtggatgtagaaaattttttcagatggacaaaatgtatatggtacagatgtaaagttttctatgtaaaaaattctgtacaactttctgtacaatattgattcccatctggcatattctaatcaggttataggtcaataaagtttttgaattatttcatcagtgcaatc

SEQ ID NO: 357714 - DNA, 7221 bp, Homo sapiens
cggccgcggcgggtgctaatccccacagtagccagggtagcccttctctcgcggtgcctctgagagccgccgccacctcgtccctcagttcccggcagacagccgcccgggccgggctccctcaccgccaccagggccggagggacgagtgagaggggcggccgggacgcgacccccgggccgggagaagcggaggcccgacgggcgcggccctcgaggtacggcttcttgggggcggcgaggacctcgacgcccttcgccgacaccgcggctggtcccgctcgcccgccccttcctgatcctgccgctgccctccacgcctccaatcccccacctccaccccctctcctttctctcttctcttccttcctctcctcctcctcccctccagccgctgggagccgcgggtcggacgagccgccgcctccttctctgcgtccatgtatgaggggaagaagacgaagaacatgttcctgacccgggctctggagaagatattggccgacaaggaagtgaagaaggcgcatcactcccagctgcgcaaagcttgcgaggtggcgttagaggaaataaaagcggaaactgaaaaacagagtcctcctcatggagaagcaaaagctggatcaagcacccttccaccagtgaaatcaaagacaaattttattgaagcagacaagtacttcttgccttttgagttggcatgccagtccaaatgtcctcgcatagttagtacatctctagattgcttacagaaacttattgcttatgggcacttgactggcaatgctccagatagtacaacaccaggcaaaaaattaattgatagaattattgaaacaatatgtggctgctttcagggccctcagacagatgaaggagttcagctgcagataataaaggctttacttactgcagtaacatcacaacacatagaaattcatgaagggactgtactgcaagctgtgagaacatgttacaatatctacttagcaagcaaaaatctcatcaatcagacaacagccaaagctactctcactcagatgctaaatgttatctttgcacgcatggaaaaccaagcattacaggaagcaaaacaaatggaaaaagaaaggcatcggcagcatcatcatctgttacagtctccagtaagccatcacgagcctgaatcacctcaacttagatatttgccacctcagactgttgatcatatatcccaagaacacgaaggggaccttgacctccatacaaatgatgtagataaaagtcttcaggatgacacagagcctgaaaatggatctgatatttccagtgcagaaaatgaacagactgaagctgatcaggcaactgcagctgaaacattatctaaaaatgaagtgttatatgacggagaaaaccatgattgtgaggaaaagccacaagacattgtacagaacattgtagaagaaatggtgaacattgttgttggagatatgggagaagggactactataaatgcaagtgcagatggcaacattggaactatagaggatggtagtgacagtgaaaatattcaagcaaatggaattccaggaacaccaatttctgttgcatatacaccatccttacctgatgatagattgtcagtctcttccaatgatactcaggaatctggaaattcttcaggaccttcacctggtgctaagttttcccacattttacaaaaggatgcctttctagtattcaggtcattgtgtaaactgtcaatgaaaccactgtcagatggaccaccagatccaaagtctcatgaactacgatccaagattctttcattgcagttacttctatccattctgcagaatgcaggacctattttcaggacaaatgagatgtttattaatgctattaagcagtatctttgtgttgcactctcaaaaaatggagtctcatctgttccagaggtttttgagctttctctttctatatttcttactttgttgtcaaatttcaagacacatctgaagatgcaaattgaggtgttctttaaagaaattttcttatacattttggaaacttctaccagctcatttgatcacaaatggatggttattcagacactgacgaggatttgtgcagatgctcagagtgtagtggatatttatgtaaactatgactgtgacttaaatgcagccaatatatttgaaagactagtaaatgatctatcaaaaattgctcaaggaaggggcagtcaagaacttggtatgagtaatgttcaggaattgagcctgaggaaaaaaggtttagaatgcttagtgtcgattttgaagtgtatggttgaatggagtaaggatcagtatgtgaatcccaactcccagacaactcttggtcaggaaaaaccctcagagcaagagatgagtgaaatcaaacaccctgagacaataaacagatacggaagtttaaattccctggagtcaacatcatcatcaggaataggcagctacagtacacagatgtctggcactgataatccagaacaatttgaggtcctaaagcaacaaaaagaaataatagaacaagggatagatttatttaataagaaaccaaagagaggaatacagtacctccaagaacaagggatgcttggcaccacacctgaagatattgcccaattcttacatcaagaggaaagattagactctactcaagtgggtgagttcctgggagataatgataaatttaacaaagaagtcatgtatgcatatgtggaccaacatgacttttcaggaaaagacttcgtttcagcccttcgtatgtttctagaaggatttcgtcttccaggggaagctcagaaaatcgatcgattaatggaaaaatttgctgcaagatacctagaatgcaaccaaggacaaactctctttgctagtgcggatacagcttatgttttggcttattcaattatcatgttgaccacagaccttcacagtccacaggtgaaaaataaaatgacaaaggaacaatacattaagatgaatagaggtatcaatgacagtaaagaccttcctgaagagtatctatcagccatctataatgaaatagctgggaaaaagatatcaatgaaagaaacaaaagaactaacaatccctacaaaatcaagtaaacagaatgtagccagtgaaaaacaaagaagacttctgtataacttagaaatggagcagatggccaagacagctaaagcactcatggaggccgtgagccatgttcaggcaccctttacaagtgcaacacatttggagcatgtgaggcccatgtttaagttggcttggacgccttttctggctgcattcagtgtgggtctacaagattgtgatgatactgaagtagcctctctttgcctggaaggtataagatgtgcaatcagaattgcatgcattttcagcattcagctggagagagatgcatatgtccaggcactagcaagatttaccttactcacagtgagttccggtattactgaaatgaaacagaagaacattgacacaataaaaacacttatcacagtggctcatacagatggaaattatttaggaaattcatggcatgagattctgaagtgcatcagtcagttggagctggcacagcttataggaactggagtgaaacctcgatacatttctggaacagtgcgaggcagagaaggatctcttactggaacaaaagatcaggctcctgatgaatttgtgggtttagggctagttggaggaaatgtggactggaaacagatagcaagtattcaggaatccattggagaaaccagttctcagagtgttgttgttgctgtagatagaatattcacaggatctacaaggctagatggaaatgccattgtggattttgtccgttggctctgtgctgtgtctatggatgaattactttccacgacacacccaagaatgtttagtctacaaaaaatagtagaaatatcatattacaacatgggaagaataagattacagtggtctcgaatttgggaagttattggagatcattttaataaggttgggtgtaatcctaatgaagatgtagctatttttgcagtagactccttgaggcagttgtcaatgaagttcttagagaaaggggagcttgctaacttcagattccagaaggatttcttaagaccttttgaacatataatgaaacggaacaggtctccaacaattcgagatatggttgtacggtgtatagcacagatggttaattctcaagctgctaacattcgatctggatggaagaacattttctctgtatttcatctagctgcatctgatcaagatgaaagcatagtggaacttgcattccaaacaaccgggcacattgtcacccttgtatttgaaaaacactttccagcgaccattgattctttccaggatgcagtgaagtgtttgtctgaatttgcgtgcaatgcagctttcccagacacaagtatggaagcaattcgacttattcgccattgtgcaaaatatgtgtctgatagacctcaggctttcaaggaatacacaagcgatgatatgaacgtagcacctgaagacagggtgtgggtgagaggatggttcccaattctctttgagttatcctgtatcatcaatagatgcaaattagatgtaagaaccaggggtttaacagtaatgtttgaaataatgaaaacatatggccacacttatgagaaacactggtggcaggatttatttagaattgttttcagaatctttgacaatatgaaattgccagaacaacagacagagaaagctgaatggatgacaacaacttgcaatcatgcactttatgcaatctgtgatgtattcactcagtatttagaagtactcagtgatgtacttttggatgacatttttgctcagctctactggtgtgtgcagcaagacaatgagcagttagcgcgatctggtacaaactgtttagagaatgttgttattctgaatggtgaaaaatttaccctagaaatctgggataaaacttgcaactgcacactggatatcttcaaaaccacaatcccacatgcgctgttgacctggcgacccaattctggagaaactgcccccccacctccatctcctgtaagtgaaaagccattggatacaatatcacagaagtctgtagatattcatgattctattcaaccaaggtctgtggataacagaccacaagcaccactggtttctgcgtctgctgttaatgaagaagtcagcaaaattaaatctacagcaaaatttccagaacaaaaattgtttgctgccctgttgattaaatgtgttgtgcagctggaactcatccagactatcgacaacattgtcttcttcccagccacaagtaagaaagaagatgcagaaaacttagctgcagcacagagagatgcggtggactttgatgttcgcgttgatactcaagaccaaggaatgtaccgctttttaacatcacaacaactttttaagctactggactgcttattagagtcacatagatttgcaaaagcgtttaattccaacaacgaacagaggactgccctgtggaaagcaggattcaaaggcaaatccaagcccaaccttctgaagcaggagaccagcagcctggcctgtgggctgcgcattctcttccggatgtacatggatgagagccgcgttagtgcctgggaggaggtccagcagaggcttttgaatgtctgcagtgaagcactaagttacttcctcactctaacatcagaaagtcatcgagaagcctggactaacttactgcttttgtttctaactaaagttctaaagataagtgataataggtttaaagctcatgcatcattctactaccctctcttatgtgaaattatgcaatttgacttgattcctgaacttcgtgctgttcttagaagattttttctgcgaatcggagtagtttttcagatatcacaaccacctgaacaggaacttggaataaacaagcaatgatgggaacttaatatttttgttggcatttacatccctctgctctttaaaaggacgctggagctgaggtttcctacctgaaaaatgatttctctggattgcagtgtctgagttactggtaaagatgcttagaagtcttactcaaacttgcaacactccagtcccttttagtgctggtggattttgtgtgttatattggcctcatgttgagcagaaagcctgtttaaacagtgtcagctcatgctcacgggtccttccctgtcttccacggcaggaaaagccccacgtttttggcaggtgtggaagtgaaacttacccaaagaactatagatgtaaagattgaacttctacaagaagtacaactcaggagagctgtattttgaaggataaaatgtttataattggggagtggggagagaagaagaaattattgttcatggtaaaagatatttagcaactatggtattcttattctgaagatttttgcacactcaggctatctgagatactggtaatcatcctgtgaaaaatgtacagagatgcaggtctgtaatataaaaatcttaaaacattatatagttcttcctgcactgttttctttattttcttattcatttgctaaatacccataatattttgtcaaatgcactaaacatttgggtggaactttcttttttattttatagggatttttagttttgccctttttggtaggtggtgattttgaggctgtaacatgcccagaagctgttgtggccgacacttcaacaatagggaaaaaaaggtagaaaatatccctactgacagtaactacctgtcacatatttctcttaggacttttaaagatgagccattaaaatagaatgatcctttatggaccaaaacttgaatcactgcaaaatgaatccagattgctgtcattttcttttccactggatgagagcatgcatgccctcatccagtggctcctgccaggaacctagttgggagcaattcctgacaccttccttgacctcctcagaacctgtcaccaagtcctgccgccgaagctgccaattctacctcagaaatatttcatctctccacagcactgtatcatcacggccaacaaccctgtccagctcccctttactcagatcacatatttacgggcatctttactccagcagaaagaacgcaccttgctgttttccctccccctacacacattctgcccctttcattccttcacctc

SEQ ID NO: 357715 - DNA, 7218 bp, Homo sapiens
cggccgcggcgggtgctaatccccacagtagccagggtagcccttctctcgcggtgcctctgagagccgccgccacctcgtccctcagttcccggcagacagccgcccgggccgggctccctcaccgccaccagggccggagggacgagtgagaggggcggccgggacgcgacccccgggccgggagaagcggaggcccgacgggcgcggccctcgaggtacggcttcttgggggcggcgaggacctcgacgcccttcgccgacaccgcggctggtcccgctcgcccgccccttcctgatcctgccgctgccctccacgcctccaatcccccacctccaccccctctcctttctctcttctcttccttcctctcctcctcctcccctccagccgctgggagccgcgggtcggacgagccgccgcctccttctctgcgtccatgtatgaggggaagaagacgaagaacatgttcctgacccgggctctggagaagatattggccgacaaggaagtgaagaaggcgcatcactcccagctgcgcaaagcttgcgaggtggcgttagaggaaataaaagcggaaactgaaaaacagagtcctcctcatggagaagcaaaagctggatcaagcacccttccaccagtgaaatcaaagacaaattttattgaagcagacaagtacttcttgccttttgagttggcatgccagtccaaatgtcctcgcatagttagtacatctctagattgcttacagaaacttattgcttatgggcacttgactggcaatgctccagatagtacaacaccaggcaaaaaattaattgatagaattattgaaacaatatgtggctgctttcagggccctcagacagatgaaggagttcagctgcagataataaaggctttacttactgcagtaacatcacaacacatagaaattcatgaagggactgtactgcaagctgtgagaacatgttacaatatctacttagcaagcaaaaatctcatcaatcagacaacagccaaagctactctcactcagatgctaaatgttatctttgcacgcatggaaaaccaagcattacaggaagcaaaacaaatggaaaaagaaaggcatcggcagcatcatcatctgttacagtctccagtaagccatcacgagcctgaatcacctcaacttagatatttgccacctcagactgttgatcatatatcccaagaacacgaaggggaccttgacctccatacaaatgatgtagataaaagtcttcaggatgacacagagcctgaaaatggatctgatatttccagtgcagaaaatgaacagactgaagctgatcaggcaactgcagctgaaacattatctaaaaatgaagtgttatatgacggagaaaaccatgattgtgaggaaaagccacaagacattgtacagaacattgtagaagaaatggtgaacattgttgttggagatatgggagaagggactactataaatgcaagtgcagatggcaacattggaactatagaggatggtagtgacagtgaaaatattcaagcaaatggaattccaggaacaccaatttctgttgcatatacaccatccttacctgatgatagattgtcagtctcttccaatgatactcaggaatctggaaattcttcaggaccttcacctggtgctaagttttcccacattttacaaaaggatgcctttctagtattcaggtcattgtgtaaactgtcaatgaaaccactgtcagatggaccaccagatccaaagtctcatgaactacgatccaagattctttcattgcagttacttctatccattctgcagaatgcaggacctattttcaggacaaatgagatgtttattaatgctattaagcagtatctttgtgttgcactctcaaaaaatggagtctcatctgttccagaggtttttgagctttctctttctatatttcttactttgttgtcaaatttcaagacacatctgaagatgcaaattgaggtgttctttaaagaaattttcttatacattttggaaacttctaccagctcatttgatcacaaatggatggttattcagacactgacgaggatttgtgcagatgctcagagtgtagtggatatttatgtaaactatgactgtgacttaaatgcagccaatatatttgaaagactagtaaatgatctatcaaaaattgctcaaggaaggggcagtcaagaacttggtatgagtaatgttcaggaattgagcctgaggaaaaaaggtttagaatgcttagtgtcgattttgaagtgtatggttgaatggagtaaggatcagtatgtgaatcccaactcccagacaactcttggtcaggaaaaaccctcagagcaagagatgagtgaaatcaaacaccctgagacaataaacagatacggaagtttaaattccctggagtcaacatcatcatcaggaataggcagctacagtacacagatgtctggcactgataatccagaacaatttgaggtcctaaagcaacaaaaagaaataatagaacaagggatagatttatttaataagaaaccaaagagaggaatacagtacctccaagaacaagggatgcttggcaccacacctgaagatattgcccaattcttacatcaagaggaaagattagactctactcaagtgggtgagttcctgggagataatgataaatttaacaaagaagtcatgtatgcatatgtggaccaacatgacttttcaggaaaagacttcgtttcagcccttcgtatgtttctagaaggatttcgtcttccaggggaagctcagaaaatcgatcgattaatggaaaaatttgctgcaagatacctagaatgcaaccaaggacaaactctctttgctagtgcggatacagcttatgttttggcttattcaattatcatgttgaccacagaccttcacagtccacaggtgaaaaataaaatgacaaaggaacaatacattaagatgaatagaggtatcaatgacagtaaagaccttcctgaagagtatctatcagccatctataatgaaatagctgggaaaaagatatcaatgaaagaaacaaaagaactaacaatccctacaaaatcaagtaaacagaatgtagccagtgaaaaacaaagaagacttctgtataacttagaaatggagcagatggccaagacagctaaagcactcatggaggccgtgagccatgttcaggcaccctttacaagtgcaacacatttggagcatgtgaggcccatgtttaagttggcttggacgccttttctggctgcattcagtgtgggtctacaagattgtgatgatactgaagtagcctctctttgcctggaaggtataagatgtgcaatcagaattgcatgcattttcagcattcagctggagagagatgcatatgtccaggcactagcaagatttaccttactcacagtgagttccggtattactgaaatgaaacagaagaacattgacacaataaaaacacttatcacagtggctcatacagatggaaattatttaggaaattcatggcatgagattctgaagtgcatcagtcagttggagctggcacagcttataggaactggagtgaaacctcgatacatttctggaacagtgcgaggcagagaaggatctcttactggaacaaaagatcaggctcctgatgaatttgtgggtttagggctagttggaggaaatgtggactggaaacagatagcaagtattcaggaatccattggagaaaccagttctcagagtgttgttgttgctgtagatagaatattcacaggatctacaaggctagatggaaatgccattgtggattttgtccgttggctctgtgctgtgtctatggatgaattactttccacgacacacccaagaatgtttagtctacaaaaaatagtagaaatatcatattacaacatgggaagaataagattacagtggtctcgaatttgggaagttattggagatcattttaataaggttgggtgtaatcctaatgaagatgtagctatttttgcagtagactccttgaggcagttgtcaatgaagttcttagagaaaggggagcttgctaacttcagattccagaaggatttcttaagaccttttgaacatataatgaaacggaacaggtctccaacaattcgagatatggttgtacggtgtatagcacagatggttaattctcaagctgctaacattcgatctggatggaagaacattttctctgtatttcatctagctgcatctgatcaagatgaaagcatagtggaacttgcattccaaacaaccgggcacattgtcacccttgtatttgaaaaacactttccagcgaccattgattctttccaggatgcagtgaagtgtttgtctgaatttgcgtgcaatgcagctttcccagacacaagtatggaagcaattcgacttattcgccattgtgcaaaatatgtgtctgatagacctcaggctttcaaggaatacacaagcgatgatatgaacgtagcacctgaagacagggtgtgggtgagaggatggttcccaattctctttgagttatcctgtatcatcaatagatgcaaattagatgtaagaaccaggggtttaacagtaatgtttgaaataatgaaaacatatggccacacttatgagaaacactggtggcaggatttatttagaattgttttcagaatctttgacaatatgaaattgccagaacaacagacagagaaagctgaatggatgacaacaacttgcaatcatgcactttatgcaatctgtgatgtattcactcagtatttagaagtactcagtgatgtacttttggatgacatttttgctcagctctactggtgtgtgcagcaagacaatgagcagttagcgcgatctggtacaaactgtttagagaatgttgttattctgaatggtgaaaaatttaccctagaaatctgggataaaacttgcaactgcacactggatatcttcaaaaccacaatcccacatgcgctgttgacctggcgacccaattctggagaaactgcccccccacctccatctcctgtaagtgaaaagccattggatacaatatcacagaagtctgtagatattcatgattctattcaaccaaggtctgtggataacagaccacaagcaccactggtttctgcgtctgctgttaatgaagaagtcagcaaaattaaatctacagcaaaatttccagaacaaaaattgtttgctgccctgttgattaaatgtgttgtgcagctggaactcatccagactatcgacaacattgtcttcttcccagccacaagtaagaaagaagatgcagaaaacttagctgcagcacagagagatgcggtggactttgatgttcgcgttgatactcaagaccaaggaatgtaccgctttttaacatcacaacaactttttaagctactggactgcttattagagtcacatagatttgcaaaagcgattcaaaggcaaatccaagcccaaccttctgaagcaggagaccagcagcctggcctgtgggctgcgcattctcttccggatgtacatggatgagagccgcgttagtgcctgggaggaggtccagcagaggcttttgaatgtctgcagtgaagcactaagttacttcctcactctaacatcagaaagtcatcgagaagcctggactaacttactgcttttgtttctaactaaagttctaaagataagtgataataggtttaaagctcatgcatcattctactaccctctcttatgtgaaattatgcaatttgacttgattcctgaacttcgtgctgttcttagaagattttttctgcgaatcggagtagtttttcagatatcacaaccacctgaacaggaacttggaataaacaagcaatgatgggaacttaatatttttgttggcatttacatccctctgctctttaaaaggacgctggagctgaggtttcctacctgaaaaatgatttctctggattgcagtgtctgagttactggtaaagatgcttagaagtcttactcaaacttgcaacactccagtcccttttagtgctggtggattttgtgtgttatattggcctcatgttgagcagaaagcctgtttaaacagtgtcagctcatgctcacgggtccttccctgtcttccacggcaggaaaagccccacgtttttggcaggtgtggaagtgaaacttacccaaagaactatagatgtaaagattgaacttctacaagaagtacaactcaggagagctgtattttgaaggataaaatgtttataattggggagtggggagagaagaagaaattattgttcatggtaaaagatatttagcaactatggtattcttattctgaagatttttgcacactcaggctatctgagatactggtaatcatcctgtgaaaaatgtacagagatgcaggtctgtaatataaaaatcttaaaacattatatagttcttcctgcactgttttctttattttcttattcatttgctaaatacccataatattttgtcaaatgcactaaacatttgggtggaactttcttttttattttatagggatttttagttttgccctttttggtaggtggtgattttgaggctgtaacatgcccagaagctgttgtggccgacacttcaacaatagggaaaaaaaggtagaaaatatccctactgacagtaactacctgtcacatatttctcttaggacttttaaagatgagccattaaaatagaatgatcctttatggaccaaaacttgaatcactgcaaaatgaatccagattgctgtcattttcttttcttttgggtggtggggcttgatgtagattttactctatgtacagaatttaacgttgaatatattaaaataacaaatctggcatggtttgcggaggttagatttactggaaatgtattcatactgtgaattgtgctctgatggttaaaagacaagattgtcaagcattccgtattaacagtggatgtagaaaattttttcagatggacaaaatgtatatggtacagatgtaaagttttctatgtaaaaaattctgtacaactttctgtacaatattgattcccatctggcatattctaatcaggttataggtcaataaagtttttgaattatttcatcagtgcaatc

SEQ ID NO: 357716 - DNA, 5885 bp, Homo sapiens
cggccgcggcgggtgctaatccccacagtagccagggtagcccttctctcgcggtgcctctgagagccgccgccacctcgtccctcagttcccggcagacagccgcccgggccgggctccctcaccgccaccagggccggagggacgagtgagaggggcggccgggacgcgacccccgggccgggagaagcggaggcccgacgggcgcggccctcgaggtacggcttcttgggggcggcgaggacctcgacgcccttcgccgacaccgcggctggtcccgctcgcccgccccttcctgatcctgccgctgccctccacgcctccaatcccccacctccaccccctctcctttctctcttctcttccttcctctcctcctcctcccctccagccgctgggagccgcgggtcggacgagccgccgcctccttctctgcgtccatgtatgaggggaagaagacgaagaacatgttcctgacccgggctctggagaagatattggccgacaaggaagtgaagaaggcgcatcactcccagctgcgcaaagcttgcgaggtggcgttagaggaaataaaagcggaaactgaaaaacagagtcctcctcatggagaagcaaaagctggatcaagcacccttccaccagtgaaatcaaagacaaattttattgaagcagacaagtacttcttgccttttgagttggcatgccagtccaaatgtcctcgcatagttagtacatctctagattgcttacagaaacttattgcttatgggcacttgactggcaatgctccagatagtacaacaccaggcaaaaaattaattgatagaattattgaaacaatatgtggctgctttcagggccctcagacagatgaaggagttcagctgcagataataaaggctttacttactgcagtaacatcacaacacatagaaattcatgaagggactgtactgcaagctgtgagaacatgttacaatatctacttagcaagcaaaaatctcatcaatcagacaacagccaaagctactctcactcagatgctaaatgttatctttgcacgcatggaaaaccaagcattacaggaagcaaaacaaatggaaaaagaaaggcatcggcagcatcatcatctgttacagtctccagtaagccatcacgagcctgaatcacctcaacttagatatttgccacctcagactgttgatcatatatcccaagaacacgaaggggaccttgacctccatacaaatgatgtagataaaagtcttcaggatgacacagagcctgaaaatggatctgatatttccagtgcagaaaatgaacagactgaagctgatcaggcaactgcagctgaaacattatctaaaaatgaagtgttatatgacggagaaaaccatgattgtgaggaaaagccacaagacattgtacagaacattgtagaagaaatggtgaacattgttgttggagatatgggagaagggactactataaatgcaagtgcagatggcaacattggaactatagaggatggtagtgacagtgaaaatattcaagcaaatggaattccaggaacaccaatttctgttgcatatacaccatccttacctgatgatagattgtcagtctcttccaatgatactcaggaatctggaaattcttcaggaccttcacctggtgctaagttttcccacattttacaaaaggatgcctttctagtattcaggtcattgtgtaaactgtcaatgaaaccactgtcagatggaccaccagatccaaagtctcatgaactacgatccaagattctttcattgcagttacttctatccattctgcagaatgcaggacctattttcaggacaaatgagatgtttattaatgctattaagcagtatctttgtgttgcactctcaaaaaatggagtctcatctgttccagaggtttttgagctttctctttctatatttcttactttgttgtcaaatttcaagacacatctgaagatgcaaattgaggtgttctttaaagaaattttcttatacattttggaaacttctaccagctcatttgatcacaaatggatggttattcagacactgacgaggatttgtgcagatgctcagagtgtagtggatatttatgtaaactatgactgtgacttaaatgcagccaatatatttgaaagactagtaaatgatctatcaaaaattgctcaaggaaggggcagtcaagaacttggtatgagtaatgttcaggaattgagcctgaggaaaaaaggtttagaatgcttagtgtcgattttgaagtgtatggttgaatggagtaaggatcagtatgtgaatcccaactcccagacaactcttggtcaggaaaaaccctcagagcaagagatgagtgaaatcaaacaccctgagacaataaacagatacggaagtttaaattccctggagtcaacatcatcatcaggaataggcagctacagtacacagatgtctggcactgataatccagaacaatttgaggtcctaaagcaacaaaaagaaataatagaacaagggatagatttatttaataagaaaccaaagagaggaatacagtacctccaagaacaagggatgcttggcaccacacctgaagatattgcccaattcttacatcaagaggaaagattagactctactcaagtgggtgagttcctgggagataatgataaatttaacaaagaagtcatgtatgcatatgtggaccaacatgacttttcaggaaaagacttcgtttcagcccttcgtatgtttctagaaggatttcgtcttccaggggaagctcagaaaatcgatcgattaatggaaaaatttgctgcaagatacctagaatgcaaccaaggacaaactctctttgctagtgcggatacagcttatgttttggcttattcaattatcatgttgaccacagaccttcacagtccacaggtgaaaaataaaatgacaaaggaacaatacattaagatgaatagaggtatcaatgacagtaaagaccttcctgaagagtatctatcagccatctataatgaaatagctgggaaaaagatatcaatgaaagaaacaaaagaactaacaatccctacaaaatcaagtaaacagaatgtagccagtgaaaaacaaagaagacttctgtataacttagaaatggagcagatggccaagacagctaaagcactcatggaggccgtgagccatgttcaggcaccctttacaagtgcaacacatttggagcatgtgaggcccatgtttaagttggcttggacgccttttctggctgcattcagtgtgggtctacaagattgtgatgatactgaagtagcctctctttgcctggaaggtataagatgtgcaatcagaattgcatgcattttcagcattcagctggagagagatgcatatgtccaggcactagcaagatttaccttactcacagtgagttccggtattactgaaatgaaacagaagaacattgacacaataaaaacacttatcacagtggctcatacagatggaaattatttaggaaattcatggcatgagattctgaagtgcatcagtcagttggagctggcacagcttataggaactggagtgaaacctcgatacatttctggaacagtgcgaggcagagaaggatctcttactggaacaaaagatcaggctcctgatgaatttgtgggtttagggctagttggaggaaatgtggactggaaacagatagcaagtattcaggaatccattggagaaaccagttctcagagtgttgttgttgctgtagatagaatattcacaggatctacaaggctagatggaaatgccattgtggattttgtccgttggctctgtgctgtgtctatggatgaattactttccacgacacacccaagaatgtttagtctacaaaaaatagtagaaatatcatattacaacatgggaagaataagattacagtggtctcgaatttgggaagttattggagatcattttaataaggttgggtgtaatcctaatgaagatgtagctatttttgcagtagactccttgaggcagttgtcaatgaagttcttagagaaaggggagcttgctaacttcagattccagaaggatttcttaagaccttttgaacatataatgaaacggaacaggtctccaacaattcgagatatggttgtacggtgtatagcacagatggttaattctcaagctgctaacattcgatctggatggaagaacattttctctgtatttcatctagctgcatctgatcaagatgaaagcatagtggaacttgcattccaaacaaccgggcacattgtcacccttgtatttgaaaaacactttccagcgaccattgattctttccaggatgcagtgaagtgtttgtctgaatttgcgtgcaatgcagctttcccagacacaagtatggaagcaattcgacttattcgccattgtgcaaaatatgtgtctgatagacctcaggctttcaaggaatacacaagcgatgatatgaacgtagcacctgaagacagggtgtgggtgagaggatggttcccaattctctttgagttatcctgtatcatcaatagatgcaaattagatgtaagaaccaggggtttaacagtaatgtttgaaataatgaaaacatatggccacacttatgagaaacactggtggcaggatttatttagaattgttttcagaatctttgacaatatgaaattgccagaacaacagacagagaaagctgaatggatgacaacaacttgcaatcatgcactttatgcaatctgtgatgtattcactcagtatttagaagtactcagtgatgtacttttggatgacatttttgctcagctctactggtgtgtgcagcaagacaatgagcagttagcgcgatctggtacaaactgtttagagaatgttgttattctgaatggtgaaaaatttaccctagaaatctgggataaaacttgcaactgcacactggatatcttcaaaaccacaatcccacatgcgctgttgacctggcgacccaattctggagaaactgcccccccacctccatctcctgatacaatatcacagaagtctgtagatattcatgattctattcaaccaaggtctgtggataacagaccacaagcaccactggtttctgcgtctgctgttaatgaagaagtcagcaaaattaaatctacagcaaccacaagtaagaaagaagatgcagaaaacttagctgcagcacagagagatgcggtggactttgatgttcgcgttgatactcaagaccaaggaatgtaccgctttttaacatcacaacaactttttaagctactggactgcttattagagtcacatagatttgcaaaagcgtttaattccaacaacgaacagaggactgccctgtggaaagcaggattcaaaggcaaatccaagcccaaccttctgaagcaggagaccagcagcctggcctgtgggctgcgcattctcttccggatgtacatggatgagagccgcgttagtgcctgggaggaggtccagcagaggcttttgaatgtctgcagtgaagcactaagttacttcctcactctaacatcagaaagtcatcgagaagcctggactaacttactgcttttgtttctaactaaagttctaaagataagtgataataggtttaaagctcatgcatcattctactaccctctcttatgtgaaattatgcaatttgacttgattcctgaacttcgtgctgttcttagaagattttttctgcgaatcggagtagtttttcagatatcacaaccacctgaacaggaacttggaataaacaagcaatgatgggaactt

SEQ ID NO: 357717 - DNA, 6145 bp, Homo sapiens
cggccgcggcgggtgctaatccccacagtagccagggtagcccttctctcgcggtgcctctgagagccgccgccacctcgtccctcagttcccggcagacagccgcccgggccgggctccctcaccgccaccagggccggagggacgagtgagaggggcggccgggacgcgacccccgggccgggagaagcggaggcccgacgggcgcggccctcgaggtacggcttcttgggggcggcgaggacctcgacgcccttcgccgacaccgcggctggtcccgctcgcccgccccttcctgatcctgccgctgccctccacgcctccaatcccccacctccaccccctctcctttctctcttctcttccttcctctcctcctcctcccctccagccgctgggagccgcgggtcggacgagccgccgcctccttctctgcgtccatgtatgaggggaagaagacgaagaacatgttcctgacccgggctctggagaagatattggccgacaaggaagtgaagaaggcgcatcactcccagctgcgcaaagcttgcgaggtggcgttagaggaaataaaagcggaaactgaaaaacagagtcctcctcatggagaagcaaaagctggatcaagcacccttccaccagtgaaatcaaagacaaattttattgaagcagacaagtacttcttgccttttgagttggcatgccagtccaaatgtcctcgcatagttagtacatctctagattgcttacagaaacttattgcttatgggcacttgactggcaatgctccagatagtacaacaccaggcaaaaaattaattgatagaattattgaaacaatatgtggctgctttcagggccctcagacagatgaaggagttcagctgcagataataaaggctttacttactgcagtaacatcacaacacatagaaattcatgaagggactgtactgcaagctgtgagaacatgttacaatatctacttagcaagcaaaaatctcatcaatcagacaacagccaaagctactctcactcagatgctaaatgttatctttgcacgcatggaaaaccaagcattacaggaagcaaaacaaatggaaaaagaaaggcatcggcagcatcatcatctgttacagtctccagtaagccatcacgagcctgaatcacctcaacttagatatttgccacctcagactgttgatcatatatcccaagaacacgaaggggaccttgacctccatacaaatgatgtagataaaagtcttcaggatgacacagagcctgaaaatggatctgatatttccagtgcagaaaatgaacagactgaagctgatcaggcaactgcagctgaaacattatctaaaaatgaagtgttatatgacggagaaaaccatgattgtgaggaaaagccacaagacattgtacagaacattgtagaagaaatggtgaacattgttgttggagatatgggagaagggactactataaatgcaagtgcagatggcaacattggaactatagaggatggtagtgacagtgaaaatattcaagcaaatggaattccaggaacaccaatttctgttgcatatacaccatccttacctgatgatagattgtcagtctcttccaatgatactcaggaatctggaaattcttcaggaccttcacctggtgctaagttttcccacattttacaaaaggatgcctttctagtattcaggtcattgtgtaaactgtcaatgaaaccactgtcagatggaccaccagatccaaagtctcatgaactacgatccaagattctttcattgcagttacttctatccattctgcagaatgcaggacctattttcaggacaaatgagatgtttattaatgctattaagcagtatctttgtgttgcactctcaaaaaatggagtctcatctgttccagaggtttttgagctttctctttctatatttcttactttgttgtcaaatttcaagacacatctgaagatgcaaattgaggtgttctttaaagaaattttcttatacattttggaaacttctaccagctcatttgatcacaaatggatggttattcagacactgacgaggatttgtgcagatgctcagagtgtagtggatatttatgtaaactatgactgtgacttaaatgcagccaatatatttgaaagactagtaaatgatctatcaaaaattgctcaaggaaggggcagtcaagaacttggtatgagtaatgttcaggaattgagcctgaggaaaaaaggtttagaatgcttagtgtcgattttgaagtgtatggttgaatggagtaaggatcagtatgtgaatcccaactcccagacaactcttggtcaggaaaaaccctcagagcaagagatgagtgaaatcaaacaccctgagacaataaacagatacggaagtttaaattccctggagtcaacatcatcatcaggaataggcagctacagtacacagatgtctggcactgataatccagaacaatttgaggtcctaaagcaacaaaaagaaataatagaacaagggatagatttatttaataagaaaccaaagagaggaatacagtacctccaagaacaagggatgcttggcaccacacctgaagatattgcccaattcttacatcaagaggaaagattagactctactcaagtgggtgagttcctgggagataatgataaatttaacaaagaagtcatgtatgcatatgtggaccaacatgacttttcaggaaaagacttcgtttcagcccttcgtatgtttctagaaggatttcgtcttccaggggaagctcagaaaatcgatcgattaatggaaaaatttgctgcaagatacctagaatgcaaccaaggacaaactctctttgctagtgcggatacagcttatgttttggcttattcaattatcatgttgaccacagaccttcacagtccacaggtgaaaaataaaatgacaaaggaacaatacattaagatgaatagaggtatcaatgacagtaaagaccttcctgaagagtatctatcagccatctataatgaaatagctgggaaaaagatatcaatgaaagaaacaaaagaactaacaatccctacaaaatcaagtaaacagaatgtagccagtgaaaaacaaagaagacttctgtataacttagaaatggagcagatggccaagacagctaaagcactcatggaggccgtgagccatgttcaggcaccctttacaagtgcaacacatttggagcatgtgaggcccatgtttaagttggcttggacgccttttctggctgcattcagtgtgggtctacaagattgtgatgatactgaagtagcctctctttgcctggaaggtataagatgtgcaatcagaattgcatgcattttcagcattcagctggagagagatgcatatgtccaggcactagcaagatttaccttactcacagtgagttccggtattactgaaatgaaacagaagaacattgacacaataaaaacacttatcacagtggctcatacagatggaaattatttaggaaattcatggcatgagattctgaagtgcatcagtcagttggagctggcacagcttataggaactggagtgaaacctcgatacatttctggaacagtgcgaggcagagaaggatctcttactggaacaaaagatcaggctcctgatgaatttgtgggtttagggctagttggaggaaatgtggactggaaacagatagcaagtattcaggaatccattggagaaaccagttctcagagtgttgttgttgctgtagatagaatattcacaggatctacaaggctagatggaaatgccattgtggattttgtccgttggctctgtgctgtgtctatggatgaattactttccacgacacacccaagaatgtttagtctacaaaaaatagtagaaatatcatattacaacatgggaagaataagattacagtggtctcgaatttgggaagttattggagatcattttaataaggttgggtgtaatcctaatgaagatgtagctatttttgcagtagactccttgaggcagttgtcaatgaagttcttagagaaaggggagcttgctaacttcagattccagaaggatttcttaagaccttttgaacatataatgaaacggaacaggtctccaacaattcgagatatggttgtacggtgtatagcacagatggttaattctcaagctgctaacattcgatctggatggaagaacattttctctgtatttcatctagctgcatctgatcaagatgaaagcatagtggaacttgcattccaaacaaccgggcacattgtcacccttgtatttgaaaaacactttccagcgaccattgattctttccaggatgcagtgaagtgtttgtctgaatttgcgtgcaatgcagctttcccagacacaagtatggaagcaattcgacttattcgccattgtgcaaaatatgtgtctgatagacctcaggctttcaaggaatacacaagcgatgatatgaacgtagcacctgaagacagggtgtgggtgagaggatggttcccaattctctttgagttatcctgtatcatcaatagatgcaaattagatgtaagaaccaggggtttaacagtaatgtttgaaataatgaaaacatatggccacacttatgagaaacactggtggcaggatttatttagaattgttttcagaatctttgacaatatgaaattgccagaacaacagacagagaaagctgaatggatgacaacaacttgcaatcatgcactttatgcaatctgtgatgtattcactcagtatttagaagtactcagtgatgtacttttggatgacatttttgctcagctctactggtgtgtgcagcaagacaatgagcagttagcgcgatctggtacaaactgtttagagaatgttgttattctgaatggtgaaaaatttaccctagaaatctgggataaaacttgcaactgcacactggatatcttcaaaaccacaatcccacatgcgctgttgacctggcgacccaattctggagaaactgcccccccacctccatctcctgtaagtgaaaagccattggatacaatatcacagaagtctgtagatattcatgattctattcaaccaaggtctgtggataacagaccacaagcaccactggtttctgcgtctgctgttaatgaagaagtcagcaaaattaaatctacagcaactggaactcatccagactatcgacaacattgtcttcttcccagccacaagtaagaaagaagatgcagaaaacttagctgcagcacagagagatgcggtggactttgatgttcgcgttgatactcaagaccaaggaatgtaccgctttttaacatcacaacaactttttaagctactggactgcttattagagtcacatagatttgcaaaagcgtttaattccaacaacgaacagaggactgccctgtggaaagcaggattcaaaggcaaatccaagcccaaccttctgaagcaggagaccagcagcctggcctgtgggctgcgcattctcttccggatgtacatggatgagagccgcgttagtgcctgggaggaggtccagcagaggcttttgaatgtctgcagtgaagcactaagttacttcctcactctaacatcagaaagtcatcgagaagcctggactaacttactgcttttgtttctaactaaagttctaaagataagtgataataggaccaaacggaccctgtgagcatggggctgccagtgaaaggaggatgcctgggaatgaaatcaatagaagagatgcagaaagcctacggaaaaacagcgtgctgatactatttgacacagcaatgattatttcttacctttggcaccttcctgcatttttattctgttcagcctcttctgctgctctcttagcagggcttgctgctgaatctctaaggtgtgatgatctcttggaggatccaggtacataaatttcagatcaactcgtgtttctgaatctggtataaaaaatatgttatataactaagttaaatgttgttttcaaatgggattttgtaaaacttcactgtaagtaacatgagtaacctaatttc

SEQ ID NO: 357718 - DNA, 3879 bp, Homo sapiens
cggccgcggcgggtgctaatccccacagtagccagggtagcccttctctcgcggtgcctctgagagccgccgccacctcgtccctcagttcccggcagacagccgcccgggccgggctccctcaccgccaccagggccggagggacgagtgagaggggcggccgggacgcgacccccgggccgggagaagcggaggcccgacgggcgcggccctcgaggtacggcttcttgggggcggcgaggacctcgacgcccttcgccgacaccgcggctggtcccgctcgcccgccccttcctgatcctgccgctgccctccacgcctccaatcccccacctccaccccctctcctttctctcttctcttccttcctctcctcctcctcccctccagccgctgggagccgcgggtcggacgagccgccgcctccttctctgcgtccatgtatgaggggaagaagacgaagaacatgttcctgacccgggctctggagaagatattggccgacaaggaagtgaagaaggcgcatcactcccagctgcgcaaagcttgcgaggtggcgttagaggaaataaaagcggaaactgaaaaacagagtcctcctcatggagaagcaaaagctggatcaagcacccttccaccagtgaaatcaaagacaaattttattgaagcagacaagtacttcttgccttttgagttggcatgccagtccaaatgtcctcgcatagttagtacatctctagattgcttacagaaacttattgcttatgggcacttgactggcaatgctccagatagtacaacaccaggcaaaaaattaattgatagaattattgaaacaatatgtggctgctttcagggccctcagacagatgaaggagttcagctgcagataataaaggctttacttactgcagtaacatcacaacacatagaaattcatgaagggactgtactgcaagctgtgagaacatgttacaatatctacttagcaagcaaaaatctcatcaatcagacaacagccaaagctactctcactcagatgctaaatgttatctttgcacgcatggaaaaccaagcattacaggaagcaaaacaaatggaaaaagaaaggcatcggcagcatcatcatctgttacagtctccagtaagccatcacgagcctgaatcacctcaacttagatatttgccacctcagactgttgatcatatatcccaagaacacgaaggggaccttgacctccatacaaatgatgtagataaaagtcttcaggatgacacagagcctgaaaatggatctgatatttccagtgcagaaaatgaacagactgaagctgatcaggcaactgcagctgaaacattatctaaaaatgaagtgttatatgacggagaaaaccatgattgtgaggaaaagccacaagacattgtacagaacattgtagaagaaatggtgaacattgttgttggagatatgggagaagggactactataaatgcaagtgcagatggcaacattggaactatagaggatggtagtgacagtgaaaatattcaagcaaatggaattccaggaacaccaatttctgttgcatatacaccatccttacctgatgatagattgtcagtctcttccaatgatactcaggaatctggaaattcttcaggaccttcacctggtgctaagttttcccacattttacaaaaggatgcctttctagtattcaggtcattgtgtaaactgtcaatgaaaccactgtcagatggaccaccagatccaaagtctcatgaactacgatccaagattctttcattgcagttacttctatccattctgcagaatgcaggacctattttcaggacaaatgagatgtttattaatgctattaagcagtatctttgtgttgcactctcaaaaaatggagtctcatctgttccagaggtttttgagctttctctttctatatttcttactttgttgtcaaatttcaagacacatctgaagatgcaaattgaggtgttctttaaagaaattttcttatacattttggaaacttctaccagctcatttgatcacaaatggatggttattcagacactgacgaggatttgtgcagatgctcagagtgtagtggatatttatgtaaactatgactgtgacttaaatgcagccaatatatttgaaagactagtaaatgatctatcaaaaattgctcaaggaaggggcagtcaagaacttggtatgagtaatgttcaggaattgagcctgaggaaaaaaggtttagaatgcttagtgtcgattttgaagtgtatggttgaatggagtaaggatcagtatgtgaatcccaactcccagacaactcttggtcaggaaaaaccctcagagcaagagatgagtgaaatcaaacaccctgagacaataaacagatacggaagtttaaattccctggagtcaacatcatcatcaggaataggcagctacagtacacagatgtctggcactgataatccagaacaatttgaggtcctaaagcaacaaaaagaaataatagaacaagggatagatttatttaataagaaaccaaagagaggaatacagtacctccaagaacaagggatgcttggcaccacacctgaagatattgcccaattcttacatcaagaggaaagattagactctactcaagtgggtgagttcctgggagataatgataaatttaacaaagaagtcatgtatgcatatgtggaccaacatgacttttcaggaaaagacttcgtttcagcccttcgtatgtttctagaaggatttcgtcttccaggggaagctcagaaaatcgatcgattaatggaaaaatttgctgcaagatacctagaatgcaaccaagggtaaataaggttcaaatgctcattgattgtctgttatatccaaaccactgtgctaggtagcatccagggatttacagataataggacctaatcccctgtttagagaatttagattgtctacaatctggaagtcgtaaaacaaatccataaaaaattgtaatgtgagatacttagagaaataaaagtgctatgggatttgaggtgacttatttaaatgaaactatataaaacagtagaagtttataacatgatacatttatttttccagacaaactctctttgctagtgcggatacagcttatgttttggcttattcaattatcatgttgaccacagaccttcacagtccacaggtatgttttcttttaagtcagttttacaataagcggtacaaaataagtacattattctgaattcagtaagtaatagttgaaattttagttttattcagttaaaccagtcaccatatttgggtatttaatttgggatggtgaacattttacaaaggcaacttctggtagtaattaaaattagacttttaggtatctataaaatgtttctgtatttgtcgttcatgattgacaactgtataaagcttaagataaattttaatctaacaagacatttataggtcttatgtcagtttgtcacaacatggatatgacgtcagagaatataccgcaatccagtgcgacaacaatattgaatcgtcgtacaggactcacgagcagatgtgtagctcatcacagaccatgtaatctccagacacatcctgtatcggagccgactcagagaactagagcggtactcaacagtgaagtcgcaggcagttagtgagccagactttgggcaagcagtgagtgaaaacccctgtctctacaaaatatgcataaattagctgggcatggtggcatgtgcctgtggtcccaactacttggagggctaaggtgggacgatcgcttgagcctgggaggcacaagtcatacagtgagctgaga

SEQ ID NO: 357719 - DNA, 1118 bp, Homo sapiens
ggcttattcaattcacgcaggaaccaatgggcggagacggcagccgcgccgtctgacggcttagccgcggtgcagactgcggcggcggtggtctgaggaagttctatcttggcgctaaagcggagacgcatcccccgacccgaggctacgatgagcacaccggccgtgccccaggacctgcagctgcccccgagtcagagggcgcagtccgcattcaaagagcaaagaagacaaaaagcgtttttcttctcaacagatgttcctttgagttctttgtgctactactgagtcgctactcgctgatggtcatgcgtcccacgggatccccggacgggctagcgagaatcctcgagggaccacggctctcccggtgtgtatccaccatcggctcgaagaacctttaaccaggcacaaccaccgcgacggactaacagcagacgcagagaagagaaccacctgacagaaaacgccacaaaccacagcaccgacgcagagcgagcgagaaaaaaccagcgacaccaagaacaaaccatctcgaagtcggaaccgcacacccagatcagcactcgacccaacacacgcacaacagcactcacagcccaagcgatagccaaaccaaagcccgcacgacgagcatcgctacgcagacagatggcatcctccagacgccaccaacaaataactcacacacgcacaggagaatttcaaccctaaacccacacgctacgtcacatctcacacaactgcgctcccgaaccaacaagagccacccatcggtacagctgccctaccaaaacctcgcgctcccacccttatccctcacatccactcgtcacaccctactatcgtctcacttgcaaacactcttcccacgtcaccctttcacgtgcacccacaatctcacctcaccccacacccccacacacacacactcatcgtataccacagccttcattcgactagtaacctctcaccaacttctaccaacactcgctagctcccgctaccacattactctgtttcaacattctaccacgctaacgacaccacagtagtgtaaacagcactgagctctatacacaaactcctatttacctaagaatctcaagcatcccata

SEQ ID NO: 357720 - DNA, 400 bp, Homo sapiens
aaaactccgcagactattcttactcataaacatttggtagaaggtattaacaaatggaatcccacaatatatatgaggataaaatcaagatcaaataagtgttcattttttactaataaatttctcaactaatgtttcatttttttgctttatgcttagggctatcgttatcattgatcttgactatagtaggctcaattattgttcccactttgtaagctaaaaaatattacacacattttttcttgcttttttaggagccagagatatcgtcacctgatgacctgataaaatcagatgccaaaagctttaattgatattgcactatgccatcacagtcctatgaaatatgcattaagacatttgagctcacctatgagagatgcgtgtggttctagag

SEQ ID NO: 357721 - DNA, 2491 bp, Homo sapiens
aaaactccgcagactattcttactcataaacatttggtagaaggtattaacaaatggaatcccacaatatatatgaggataaaatcaagatcaaataagtgttcattttttactaataaatttctcaactaatgtttcatttttttgctttatgcttagggctatcgttatcattgatcttgactatagtaggctcaattattgttcccactttgtaagctaaaaaatattacacacattttttcttgcttttttagggatgtccaaaagaagatatactggtcacactgaatgacctgattaaaaatattccagatgccaaaaagcttgttaagtattggatatgtcttgcacttattgaaccaatcacaagtcctattgaaaatattattgcaatctatgagaaagccattctggcaggggctcagcctattgaagagatgcgacacacgattgtagatattctaacaatgaagagtcaagaaaaagctaatttaggagaaaatatggagaagtcttgtgcaagcaaggaagaagtcaaagaagtcagtattgaagatacaggtgttgatgtagatccagaaaaactggaaatggagagtaaacttcatagaaatttgctatttcaagattgtgaaaaagagcaagacaacaaaacaaaagatccaacccatgatgttaaaacccccaatacagaaacgaggacaagttgcttaattaaatataatgtgtctactacgccatacttgcaaagtgtgaaaaaaaaggtgcagtttgatggaacaaattccgcatttaaagagctgaagtttttaacaccagtgagacgttctcgacgtcttcaagagaaaacttctaaattgccagatatgttaaaagatcattatccttgtgtgtcttcattggaacagctaacggagttgggaagagaaactgatgcttttgtatgccgccctaatgcagcactgtgccgggtgtactatgaggctgatacaacataagagaaataaagctctgttagggaatggggtttttattatttgtggggtgttttgttttgagtagctttatattgctcttaggtctggagttggccatgtacctatgtatcctaagcattcacggcagtgagctcctttactaacattcatgttatggcaagagttgtcctctacattggaaagctaatcctaccttgtcagtttcaaccaactgagttttttctttaagaaaggtaaattttgtcagctagtttactatgttccttgaatataaacaggttataatactaccctgttcactttactaaatataagtacagtaatgatgcataattagaaaatgaggtattctaggtaaaatgtatgtttgccttgacatgtttttaaaagttatgatgtacctccctgcctttaaacagaatacttttttcttttttttggcctttctcagattagtcaaaaattctatagaatgactcacttcgaatactaagacacaggaggtttagcctgctttcttaccaaattcatgttacccagacttgtgttctcttgcgtcccttggactgcctgttgattgatggaaagtgtctgcactgacacttttcgtcagtagtctgtagtttcgtggcctcttttgattataactggggtcaccaagaaggtttacttaattaaataccgcatttctaagagaagatactttgtgtaagaaaagatgccacatttagtggtttaacttttgtaacttcacttgatagtttttaagcaattagaatggagttagggaaagaacatatcatactgaacaaatgtcattctagtttagatagcatttctaagataactgatactaatacttgttttcttccctataacataaaaaacttcactgttaagtcatgtcccttgaaacatgatagttacatacacagttttctctccacacataaataacaccactaaagttgttttgtaaggttccaaactaatatggcatatatcaactctacagtttcaaataaatgactttttaattgtaaaagattagttgaaaaactgtatgaatgtgaagatcacatgcttagtcatttttatgttcattccactttgtatatcttttctatttattgacttctcatgttctagagagtaggacttttattccgtgtacctgatatatatacaattaaaatatctgtataattatgttttaatgaagtttatttcaacagatattttatgaaatgcagtttaaccacagtgaatgaattttagctttgcttttgaaatacattgtaagatttgacttgaggtttttgacacttaagtacatgcttaatgatatattttcaaaagtcatcagtctacttacataaactttacctaatttttttcactttaacaaaaacataactatgcccttgttttttcatactttgacccaaaatatgccattttgaaataaaatttaagctttgaaaaaaaaa

SEQ ID NO: 357722 - DNA, 2287 bp, Homo sapiens
cgcttgtgaagcattccctaaccatctccctataccacaggcaaagttagttgtttctttttgtgggttttaataatcctttgttcttatttcatatatagcatttatttcattttataatagtatttgttatatagttggcagcagtatttgctgaggaaaaggaatggttcagagatggcaatcgtgttcttttattttgaaaatgtggccaactaggaacaactttaatgtcttctgattttgttcttaaaattcagccaaaagcttaatctataaatgtattttctataggagaaaatatggagaagtcttgtgcaagcaaggaagaagtcaaagaagtcagtattgaagatacaggtgttgatgtagatccagaaaaactggaaatggagagtaaacttcatagaaatttgctatttcaagattgtgaaaaagagcaagacaacaaaacaaaagatccaacccatgatgttaaaacccccaatacagaaacgaggacaagttgcttaattaaatataatgtgtctactacgccatacttgcaaagtgtgaaaaaaaaggtgcagtttgatggaacaaattccgcatttaaagagctgaagtttttaacaccagtgagacgttctcgacgtcttcaagagaaaacttctaaattgccagatatgttaaaagatcattatccttgtgtgtcttcattggaacagctaacggagttgggaagagaaactgatgcttttgtatgccgccctaatgcagcactgtgccgggtgtactatgaggctgatacaacataagagaaataaagctctgttagggaatggggtttttattatttgtggggtgttttgttttgagtagctttatattgctcttaggtctggagttggccatgtacctatgtatcctaagcattcacggcagtgagctcctttactaacattcatgttatggcaagagttgtcctctacattggaaagctaatcctaccttgtcagtttcaaccaactgagttttttctttaagaaaggtaaattttgtcagctagtttactatgttccttgaatataaacaggttataatactaccctgttcactttactaaatataagtacagtaatgatgcataattagaaaatgaggtattctaggtaaaatgtatgtttgccttgacatgtttttaaaagttatgatgtacctccctgcctttaaacagaatacttttttcttttttttggcctttctcagattagtcaaaaattctatagaatgactcacttcgaatactaagacacaggaggtttagcctgctttcttaccaaattcatgttacccagacttgtgttctcttgcgtcccttggactgcctgttgattgatggaaagtgtctgcactgacacttttcgtcagtagtctgtagtttcgtggcctcttttgattataactggggtcaccaagaaggtttacttaattaaataccgcatttctaagagaagatactttgtgtaagaaaagatgccacatttagtggtttaacttttgtaacttcacttgatagtttttaagcaattagaatggagttagggaaagaacatatcatactgaacaaatgtcattctagtttagatagcatttctaagataactgatactaatacttgttttcttccctataacataaaaaacttcactgttaagtcatgtcccttgaaacatgatagttacatacacagttttctctccacacataaataacaccactaaagttgttttgtaaggttccaaactaatatggcatatatcaactctacagtttcaaataaatgactttttaattgtaaaagattagttgaaaaactgtatgaatgtgaagatcacatgcttagtcatttttatgttcattccactttgtatatcttttctatttattgacttctcatgttctagagagtaggacttttattccgtgtacctgatatatatacaattaaaatatctgtataattatgttttaatgaagtttatttcaacagatattttatgaaatgcagtttaaccacagtgaatgaattttagctttgcttttgaaatacattgtaagatttgacttgaggtttttgacacttaagtacatgcttaatgatatattttcaaaagtcatcagtctacttacataaactttacctaatttttttcactttaacaaaaacataactatgcccttgttttttcatactttgacccaaaatatgccattttgaaataaaatttaagctttgaaaaaaaaa

SEQ ID NO: 357723 - DNA, 1968 bp, Homo sapiens
ggcttattcaattcacgcaggaaccaatgggcggagacggcagccgcgccgtctgacggcttagccgcggtgcagactgcggcggcggtggtctgaggaagttctatcttggcgctaaagcggagacgcatcccccgacccgaggctacgatgagcacaccggccgtgccccaggacctgcagctgcccccgagtcagagggcgcagtccgcattcaaagagcaaagaagacaaaaactcaaggaacatctgttgagaagaaaaacgctttttgcatacaagcaggaaaatgagatgttatccagtagagatcagagagttgtgacatctgaggaccaagttcaagaagggactaaagtgctgaaacttaaaacaaaaatggctgataaagaaaacatgaagagacctgcagagagcaaaaataatacagtggtggggaaacattgtattcctttaaaaccttcaaatgaactaaccaattcaactgtagtaattgacacacataaacctaaggatagtaatcaaactccgcatttgttactaactgaagatgatccccaaagtcaacatatgacattaagccaggcatttcaccttaaaaacaatagtaaaaagaaacaaatgactacagaaaaacaaaagcaagatgctaacatgcccaagaaacctgtgcttggatcttatcgtggccagattgttcagtctaagattaattcatttagaaaacctctacaagtcaaagatgagagttctgcagcaacaaagaaactttcagccactatacctaaagccacaaaacctcagcctgtaaacaccagcagtgtaacagtgaaaagtaatagatcctccaatatgactgccactactaaatttgtgagcactacatctcagaacacacaacttgtgcgacctcctattagaagtcatcacagtaatacccgggacactgtgaaacaaggcatcagtagaacctctgccaatgttacaatccggaaagggcctcatgaaaaagaactattacaatcaaaaacagctttatctagtgtcaaaaccagttcttctcaaggtataataagaaataagactctatcaagatccatagcatctgaagttgtagccaggcctgcttcattgtctaatgataaactgatggaaaagtcagagcccgttgaccagcgaagacatactgcaggaaaagcaattgttgatagtagatcagctcagcccaaagaaacctcggaagagagaaaagctcgtctgagtgagtggaaagctggcaaaggaagagtgctaaaaaggccccctaattcagtagttactcagcatgagcctgcaggacaaaatgaaaaaccagttgggtctttttggactaccatggcagaagaagatgaacaaagattatttactgaaaaagtaaacaacacattttctgaatgcctgaacttgattaatgagggatgtccaaaagaagatatactggtcacactgaatgacctgattaaaaatattccagatgccaaaaagcttgttaagtattggatatgtcttgcacttattgaaccaatcacaagtcctattgaaaatattattgcaatctatgagaaagccattctggcaggggctcaggtaagataaaaatttactgatctttacaattacagtgtagtagacaattcggaattaatttgaaacacatcacaacataacttgagaaaattttctttgtatatgtagtggtaataaatgtttaaaggctgcaaggattgcattataaaagctgtttgttggctttctaagtcttttattcctgtattgggaataatcagattttagaaaatggatataagctgaaatgtatatttaatgaaactttctgcatgaaatgttttagcatattattgtatgcatttcctggttggaagtttactgggagactgaatgtaatattaaaatttgtttattgaatat

SEQ ID NO: 357724 - DNA, 2448 bp, Homo sapiens
ggcttattcaattcacgcaggaaccaatgggcggagacggcagccgcgccgtctgacggcttagccgcggtgcagactgcggcggcggtggtctgaggaagttctatcttggcgctaaagcggagacgcatcccccgacccgaggctacgatgagcacaccggccgtgccccaggacctgcagctgcccccgagtcagagggcgcagtccgcattcaaagagcaaagaagacaaaaactcaaggaacatctgttgagaagaaaaacgctttttgcatacaagcaggaaaatgagatgttatccagtagagatcagagagttgtgacatctgaggaccaagttcaagaagggactaaagtgctgaaacttaaaacaaaaatggctgataaagaaaacatgaagagacctgcagagagcaaaaataatacagtggtggggaaacattgtattcctttaaaaccttcaaatgaactaaccaattcaactgtagtaattgacacacataaacctaaggatagtaatcaaactccgcatttgttactaactgaagatgatccccaaagtcaacatatgacattaagccaggcatttcaccttaaaaacaatagtaaaaagaaacaaatgactacagaaaaacaaaagcaagatgctaacatgcccaagaaacctgtgcttggatcttatcgtggccagattgttcagtctaagattaattcatttagaaaacctctacaagtcaaagatgagagttctgcagcaacaaagaaactttcagccactatacctaaagccacaaaacctcagcctgtaaacaccagcagtgtaacagtgaaaagtaatagatcctccaatatgactgccactactaaatttgtgagcactacatctcagaacacacaacttgtgcgacctcctattagaagtcatcacagtaatacccgggacactgtgaaacaaggcatcagtagaacctctgccaatgttacaatccggaaagggcctcatgaaaaagaactattacaatcaaaaacagctttatctagtgtcaaaaccagttcttctcaaggtataataagaaataagactctatcaagatccatagcatctgaagttgtagccaggcctgcttcattgtctaatgataaactgatggaaaagtcagagcccgttgaccagcgaagacatactgcaggaaaagcaattgttgatagtagatcagctcagcccaaagaaacctcggaagagagaaaagctcgtctgagtgagtggaaagctggcaaaggaagagtgctaaaaaggccccctaattcagtagttactcagcatgagcctgcaggacaaaatgaaaaaccagttgggtctttttggactaccatggcagaagaagatgaacaaagattatttactgaaaaagtaaacaacacattttctgaatgcctgaacttgattaatgagggatgtccaaaagaagatatactggtcacactgaatgacctgattaaaaatattccagatgccaaaaagcttgttaagtattggatatgtcttgcacttattgaaccaatcacaagtcctattgaaaatattattgcaatctatgagaaagccattctggcaggggctcagcctattgaagagatgcgacacacgattgtagatattctaacaatgaagagtcaagaaaaagctaatttaggagaaaatatggagaagtcttgtgcaagcaaggaagaagtcaaagaagtcagtattgaagatacaggtgttgatgtagatccagaaaaactggaaatggagagtaaacttcatagaaatttgctatttcaagattgtgaaaaagagcaagacaacaaaacaaaagatccaacccatgatgttaaaacccccaatacagaaacgaggacaagttgcttaattaaatataatgtgtctactacgccatacttgcaaagtgtgaaaaaaaaggtgcagtttgatggaacaaattccgcatttaaagagctgaagtttttaacaccagtgagacgttctcgacgtcttcaagagaaaacttctaaattgccagatatgttaaaagatcattatccttgtgtgtcttcattggaacagctaacggagttgatgttatcgcccaacaccgtggtgaagcaaggcttggagcctccctccttcgtgggctggttccttggctgggatgatgattactggtctgtggaccccttggacagggccatggctgagctggctgcctgaggaggggcagggcccacccatgtcaccggtcagtgcctttgggaactgtccttccctcaaagaggccttagagcgagcagggcagctctgctatgagtgtgtgtgtgtgtgtgtgtgtggtctcttttttttttttaagagtatccaaaaatagcccggaaaaaatccagagtcctcgcaaagtggtctacaggg

SEQ ID NO: 357725 - DNA, 2005 bp, Homo sapiens
ggcttattcaattcacgcaggaaccaatgggcggagacggcagccgcgccgtctgacggcttagccgcggtgcagactgcggcggcggtggtctgaggaagttctatcttggcgctaaagcggagacgcatcccccgacccgaggctacgatgagcacaccggccgtgccccaggacctgcagctgcccccgagtcagagggcgcagtccgcattcaaagagcaaagaagacaaaaactcaaggaacatctgttgagaagaaaaacgctttttgcatacaagcaggaaaatgagatgttatccagtagagatcagagagttgtgacatctgaggaccaagttcaagaagggactaaagtgctgaaacttaaaacaaaaatggctgataaagaaaacatgaagagacctgcagagagcaaaaataatacagtggtggggaaacattgtattcctttaaaaccttcaaatgaactaaccaattcaactgtagtaattgacacacataaacctaaggatagtaatcaaactccgcatttgttactaactgaagatgatccccaaagtcaacatatgacattaagccaggcatttcaccttaaaaacaatagtaaaaagaaacaaatgactacagaaaaacaaaagcaagatgctaacatgcccaagaaacctgtgcttggatcttatcgtggccagattgttcagtctaagattaattcatttagaaaacctctacaagtcaaagatgagagttctgcagcaacaaagaaactttcagccactatacctaaagccacaaaacctcagcctgtaaacaccagcagtgtaacagtgaaaagtaatagatcctccaatatgactgccactactaaatttgtgagcactacatctcagaacacacaacttgtgcgacctcctattagaagtcatcacagtaatacccgggacactgtgaaacaaggcatcagtagaacctctgccaatgttacaatccggaaagggcctcatgaaaaagaactattacaatcaaaaacagctttatctagtgtcaaaaccagttcttctcaaggtataataagaaataagactctatcaagatccatagcatctgaagttgtagccaggcctgcttcattgtctaatgataaactgatggaaaagtcagagcccgttgaccagcgaagacatactgcaggaaaagcaattgttgatagtagatcagctcagcccaaagaaacctcggaagagagaaaagctcgtctgagtgagtggaaagctggcaaaggaagagtgctaaaaaggccccctaattcagtagttactcagcatgagcctgcaggacaaaatgaaaaaccagttgggtctttttggactaccatggcagaagaagatgaacaaagattatttactgaaaaagtaaacaacacattttctgaatgcctgaacttgattaatgagggatgtccaaaagaagatatactggtcacactgaatgacctgattaaaaatattccagatgccaaaaagcttgttaagtattggatatgtcttgcacttattgaaccaatcacaagtcctattgaaaatattattgcaatctatgagaaagccattctggcaggggctcaggtaagataaaaatttactgatctttacaattacagtgtagtagacaattcggaattaatttgaaacacatcacaacataacttgagaaaattttctttgtatatgtagtggtaataaatgtttaaaggctgcaaggattgcattataaaagctgtttgttggctttctaagtcttttattcctgtattgggaataatcagattttagaaaatggatataagctgaaatgtatatttaatgaaactttctgcatgaaatgttttagcatattattgtatgcatttcctggttggaagtttactgggagactgaatgtaatattaaaatttgtttattgaatataaagcaaaagggattaaattcgctttttaaatgttat

SEQ ID NO: 357726 - DNA, 735 bp, Homo sapiens
ctgcttcattgtctaatgataaactgatggaaaagtcagagcccgttgaccagcgaagacatactgcaggaaaagcaattgttgatagtagatcagctcagcccaaagaaacctcggaagagagaaagtaagtagatataattttctttattacattagttttcaataaagtactgtttgtagatttggattataatttccttgactgcattagaattttctttcatggtttctcttctgtcatatgcaggcaaatttatattgtggaacaatatgacctaaaagtttttgtgtttgagtatgttttataaggttgctttttaaaatctaaggtaaatgcttaataataattgggaaatactttataatctcaaatcaaaaaatgcattcatggaatcattgagcataattgacgttgatatgtttaatatttcttcaagcttgtgaactatatatgccattaaagtaagattacttaaaaatatgattttttcttttaactttatttgacagagttctgtcagcaatttcaaagtaacgtttatatctgcttctaactatagagctcgtctgagtgagtggaaagctggcaaaggaagagtgctaaaaaggccccctaattcagtagttactcagcatgagcctgcaggacaaaatgaaaaaccagttgggtctttttggactaccatggcagaagaagatgaacaaagattatttactgaaaaagtaaacaac

SEQ ID NO: 357727 - DNA, 3419 bp, Homo sapiens
ggcttattcaattcacgcaggaaccaatgggcggagacggcagccgcgccgtctgacggcttagccgcggtgcagactgcggcggcggtggtctgaggaagttctatcttggcgctaaagcggagacgcatcccccgacccgaggctacgatgagcacaccggccgtgccccaggacctgcagctgcccccgagtcagagggcgcagtccgcattcaaagagcaaagaagacaaaaactcaaggaacatctgttgagaagaaaaacgctttttgcatacaagcaggaaaatgagatgttatccagtagagatcagagagttgtgacatctgaggaccaagttcaagaagggactaaagtgctgaaacttaaaacaaaaatggctgataaagaaaacatgaagagacctgcagagagcaaaaataatacagtggtggggaaacattgtattcctttaaaaccttcaaatgaactaaccaattcaactgtagtaattgacacacataaacctaaggatagtaatcaaactccgcatttgttactaactgaagatgatccccaaagtcaacatatgacattaagccaggcatttcaccttaaaaacaatagtaaaaagaaacaaatgactacagaaaaacaaaagcaagatgctaacatgcccaagaaacctgtgcttggatcttatcgtggccagattgttcagtctaagattaattcatttagaaaacctctacaagtcaaagatgagagttctgcagcaacaaagaaactttcagccactatacctaaagccacaaaacctcagcctgtaaacaccagcagtgtaacagtgaaaagtaatagatcctccaatatgactgccactactaaatttgtgagcactacatctcagaacacacaacttgtgcgacctcctattagaagtcatcacagtaatacccgggacactgtgaaacaaggcatcagtagaacctctgccaatgttacaatccggaaagggcctcatgaaaaagaactattacaatcaaaaacagctttatctagtgtcaaaaccagttcttctcaaggtataataagaaataagactctatcaagatccatagcatctgaagttgtagccaggcctgcttcattgtctaatgataaactgatggaaaagtcagagcccgttgaccagcgaagacatactgcaggaaaagcaattgttgatagtagatcagctcagcccaaagaaacctcggaagagagaaaagctcgtctgagtgagtggaaagctggcaaaggaagagtgctaaaaaggccccctaattcagtagttactcagcatgagcctgcaggacaaaatgaaaaaccagttgggtctttttggactaccatggcagaagaagatgaacaaagattatttactgaaaaagtaaacaacacattttctgaatgcctgaacttgattaatgagggatgtccaaaagaagatatactggtcacactgaatgacctgattaaaaatattccagatgccaaaaagcttgttaagtattggatatgtcttgcacttattgaaccaatcacaagtcctattgaaaatattattgcaatctatgagaaagccattctggcaggggctcagcctattgaagagatgcgacacacgattgtagatattctaacaatgaagagtcaagaaaaagctaatttaggagaaaatatggagaagtcttgtgcaagcaaggaagaagtcaaagaagtcagtattgaagatacaggtgttgatgtagatccagaaaaactggaaatggagagtaaacttcatagaaatttgctatttcaagattgtgaaaaagagcaagacaacaaaacaaaagatccaacccatgatgttaaaacccccaatacagaaacgaggacaagttgcttaattaaatataatgtgtctactacgccatacttgcaaagtgtgaaaaaaaaggtgcagtttgatggaacaaattccgcatttaaagagctgaagtttttaacaccagtgagacgttctcgacgtcttcaagagaaaacttctaaattgccagatatgttaaaagatcattatccttgtgtgtcttcattggaacagctaacggagttgggaagagaaactgatgcttttgtatgccgccctaatgcagcactgtgccgggtgtactatgaggctgatacaacataagagaaataaagctctgttagggaatggggtttttattatttgtggggtgttttgttttgagtagctttatattgctcttaggtctggagttggccatgtacctatgtatcctaagcattcacggcagtgagctcctttactaacattcatgttatggcaagagttgtcctctacattggaaagctaatcctaccttgtcagtttcaaccaactgagttttttctttaagaaaggtaaattttgtcagctagtttactatgttccttgaatataaacaggttataatactaccctgttcactttactaaatataagtacagtaatgatgcataattagaaaatgaggtattctaggtaaaatgtatgtttgccttgacatgtttttaaaagttatgatgtacctccctgcctttaaacagaatacttttttcttttttttggcctttctcagattagtcaaaaattctatagaatgactcacttcgaatactaagacacaggaggtttagcctgctttcttaccaaattcatgttacccagacttgtgttctcttgcgtcccttggactgcctgttgattgatggaaagtgtctgcactgacacttttcgtcagtagtctgtagtttcgtggcctcttttgattataactggggtcaccaagaaggtttacttaattaaataccgcatttctaagagaagatactttgtgtaagaaaagatgccacatttagtggtttaacttttgtaacttcacttgatagtttttaagcaattagaatggagttagggaaagaacatatcatactgaacaaatgtcattctagtttagatagcatttctaagataactgatactaatacttgttttcttccctataacataaaaaacttcactgttaagtcatgtcccttgaaacatgatagttacatacacagttttctctccacacataaataacaccactaaagttgttttgtaaggttccaaactaatatggcatatatcaactctacagtttcaaataaatgactttttaattgtaaaagattagttgaaaaactgtatgaatgtgaagatcacatgcttagtcatttttatgttcattccactttgtatatcttttctatttattgacttctcatgttctagagagtaggacttttattccgtgtacctgatatatatacaattaaaatatctgtataattatgttttaatga

SEQ ID NO: 357728 - DNA, 3689 bp, Homo sapiens
ggcttattcaattcacgcaggaaccaatgggcggagacggcagccgcgccgtctgacggcttagccgcggtgcagactgcggcggcggtggtctgaggaagttctatcttggcgctaaagcggagacgcatcccccgacccgaggctacgatgagcacaccggccgtgccccaggacctgcagctgcccccgagtcagagggcgcagtccgcattcaaagagcaaagaagacaaaaactcaaggaacatctgttgagaagaaaaacgctttttgcatacaagcaggaaaatgagatgttatccagtagagatcagagagttgtgacatctgaggaccaagttcaagaagggactaaagtgctgaaacttaaaacaaaaatggctgataaagaaaacatgaagagacctgcagagagcaaaaataatacagtggtggggaaacattgtattcctttaaaaccttcaaatgaactaaccaattcaactgtagtaattgacacacataaacctaaggatagtaatcaaactccgcatttgttactaactgaagatgatccccaaagtcaacatatgacattaagccaggcatttcaccttaaaaacaatagtaaaaagaaacaaatgactacagaaaaacaaaagcaagatgctaacatgcccaagaaacctgtgcttggatcttatcgtggccagattgttcagtctaagattaattcatttagaaaacctctacaagtcaaagatgagagttctgcagcaacaaagaaactttcagccactatacctaaagccacaaaacctcagcctgtaaacaccagcagtgtaacagtgaaaagtaatagatcctccaatatgactgccactactaaatttgtgagcactacatctcagaacacacaacttgtgcgacctcctattagaagtcatcacagtaatacccgggacactgtgaaacaaggcatcagtagaacctctgccaatgttacaatccggaaagggcctcatgaaaaagaactattacaatcaaaaacagctttatctagtgtcaaaaccagttcttctcaaggtataataagaaataagactctatcaagatccatagcatctgaagttgtagccaggcctgcttcattgtctaatgataaactgatggaaaagtcagagcccgttgaccagcgaagacatactgcaggaaaagcaattgttgatagtagatcagctcagcccaaagaaacctcggaagagagaaaagctcgtctgagtgagtggaaagctggcaaaggaagagtgctaaaaaggccccctaattcagtagttactcagcatgagcctgcaggacaaaatgaaaaaccagttgggtctttttggactaccatggcagaagaagatgaacaaagattatttactgaaaaagtaaacaacacattttctgaatgcctgaacttgattaatgagggatgtccaaaagaagatatactggtcacactgaatgacctgattaaaaatattccagatgccaaaaagcttgttaagtattggatatgtcttgcacttattgaaccaatcacaagtcctattgaaaatattattgcaatctatgagaaagccattctggcaggggctcagcctattgaagagatgcgacacacgattgtagatattctaacaatgaagagtcaagaaaaagctaatttaggagaaaatatggagaagtcttgtgcaagcaaggaagaagtcaaagaagtcagtattgaagatacaggtgttgatgtagatccagaaaaactggaaatggagagtaaacttcatagaaatttgctatttcaagattgtgaaaaagagcaagacaacaaaacaaaagatccaacccatgatgttaaaacccccaatacagaaacgaggacaagttgcttaattaaatataatgtgtctactacgccatacttgcaaagtgtgaaaaaaaaggtgcagtttgatggaacaaattccgcatttaaagagctgaagtttttaacaccagtgagacgttctcgacgtcttcaagagaaaacttctaaattgccagatatgttaaaagatcattatccttgtgtgtcttcattggaacagctaacggagttgggaagagaaactgatgcttttgtatgccgccctaatgcagcactgtgccgggtgtactatgaggctgatacaacataagagaaataaagctctgttagggaatggggtttttattatttgtggggtgttttgttttgagtagctttatattgctcttaggtctggagttggccatgtacctatgtatcctaagcattcacggcagtgagctcctttactaacattcatgttatggcaagagttgtcctctacattggaaagctaatcctaccttgtcagtttcaaccaactgagttttttctttaagaaaggtaaattttgtcagctagtttactatgttccttgaatataaacaggttataatactaccctgttcactttactaaatataagtacagtaatgatgcataattagaaaatgaggtattctaggtaaaatgtatgtttgccttgacatgtttttaaaagttatgatgtacctccctgcctttaaacagaatacttttttcttttttttggcctttctcagattagtcaaaaattctatagaatgactcacttcgaatactaagacacaggaggtttagcctgctttcttaccaaattcatgttacccagacttgtgttctcttgcgtcccttggactgcctgttgattgatggaaagtgtctgcactgacacttttcgtcagtagtctgtagtttcgtggcctcttttgattataactggggtcaccaagaaggtttacttaattaaataccgcatttctaagagaagatactttgtgtaagaaaagatgccacatttagtggtttaacttttgtaacttcacttgatagtttttaagcaattagaatggagttagggaaagaacatatcatactgaacaaatgtcattctagtttagatagcatttctaagataactgatactaatacttgttttcttccctataacataaaaaacttcactgttaagtcatgtcccttgaaacatgatagttacatacacagttttctctccacacataaataacaccactaaagttgttttgtaaggttccaaactaatatggcatatatcaactctacagtttcaaataaatgactttttaattgtaaaagattagttgaaaaactgtatgaatgtgaagatcacatgcttagtcatttttatgttcattccactttgtatatcttttctatttattgacttctcatgttctagagagtaggacttttattccgtgtacctgatatatatacaattaaaatatctgtataattatgttttaatgaagtttatttcaacagatattttatgaaatgcagtttaaccacagtgaatgaattttagctttgcttttgaaatacattgtaagatttgacttgaggtttttgacacttaagtacatgcttaatgatatattttcaaaagtcatcagtctacttacataaactttacctaatttttttcactttaacaaaaacataactatgcccttgttttttcatactttgacccaaaatatgccattttgaaataaaatttaagctttgaaaaaaaaa

SEQ ID NO: 357729 - DNA, 2241 bp, Homo sapiens
gtgcccagccaagacagccatttttcaatcttaattgtaagtggtctgagaagcatggtttaagagccactcttactttaaaatacagtatgaaaatttaatcgcgacttggatacctagttaatgtcagagaaaataaaacttacatggatctgctttcttcattaaaaaaattaagcctattgaagagatgcgacacacgattgtagatattctaacaatgaagagtcaagaaaaagctaatttaggagaaaatatggagaagtcttgtgcaagcaaggaagaagtcaaagaagtcagtattgaagatacaggtgttgatgtagatccagaaaaactggaaatggagagtaaacttcatagaaatttgctatttcaagattgtgaaaaagagcaagacaacaaaacaaaagatccaacccatgatgttaaaacccccaatacagaaacgaggacaagttgcttaattaaatataatgtgtctactacgccatacttgcaaagtgtgaaaaaaaaggtgcagtttgatggaacaaattccgcatttaaagagctgaagtttttaacaccagtgagacgttctcgacgtcttcaagagaaaacttctaaattgccagatatgttaaaagatcattatccttgtgtgtcttcattggaacagctaacggagttgggaagagaaactgatgcttttgtatgccgccctaatgcagcactgtgccgggtgtactatgaggctgatacaacataagagaaataaagctctgttagggaatggggtttttattatttgtggggtgttttgttttgagtagctttatattgctcttaggtctggagttggccatgtacctatgtatcctaagcattcacggcagtgagctcctttactaacattcatgttatggcaagagttgtcctctacattggaaagctaatcctaccttgtcagtttcaaccaactgagttttttctttaagaaaggtaaattttgtcagctagtttactatgttccttgaatataaacaggttataatactaccctgttcactttactaaatataagtacagtaatgatgcataattagaaaatgaggtattctaggtaaaatgtatgtttgccttgacatgtttttaaaagttatgatgtacctccctgcctttaaacagaatacttttttcttttttttggcctttctcagattagtcaaaaattctatagaatgactcacttcgaatactaagacacaggaggtttagcctgctttcttaccaaattcatgttacccagacttgtgttctcttgcgtcccttggactgcctgttgattgatggaaagtgtctgcactgacacttttcgtcagtagtctgtagtttcgtggcctcttttgattataactggggtcaccaagaaggtttacttaattaaataccgcatttctaagagaagatactttgtgtaagaaaagatgccacatttagtggtttaacttttgtaacttcacttgatagtttttaagcaattagaatggagttagggaaagaacatatcatactgaacaaatgtcattctagtttagatagcatttctaagataactgatactaatacttgttttcttccctataacataaaaaacttcactgttaagtcatgtcccttgaaacatgatagttacatacacagttttctctccacacataaataacaccactaaagttgttttgtaaggttccaaactaatatggcatatatcaactctacagtttcaaataaatgactttttaattgtaaaagattagttgaaaaactgtatgaatgtgaagatcacatgcttagtcatttttatgttcattccactttgtatatcttttctatttattgacttctcatgttctagagagtaggacttttattccgtgtacctgatatatatacaattaaaatatctgtataattatgttttaatgaagtttatttcaacagatattttatgaaatgcagtttaaccacagtgaatgaattttagctttgcttttgaaatacattgtaagatttgacttgaggtttttgacacttaagtacatgcttaatgatatattttcaaaagtcatcagtctacttacataaactttacctaatttttttcactttaacaaaaacataactatgcccttgttttttcatactttgacccaaaatatgccattttgaaataaaatttaagctttgaaaaaaaaa

SEQ ID NO: 357730 - DNA, 2228 bp, Homo sapiens
ggcttattcaattcacgcaggaaccaatgggcggagacggcagccgcgccgtctgacggcttagccgcggtgcagactgcggcggcggtggtctgaggaagttctatcttggcgctaaagcggagacgcatcccccgacccgaggctacgatgagcacaccggccgtgccccaggacctgcagctgcccccgagtcagagggcgcagtccgcattcaaagagcaaagaagacaaaaactcaaggaacatctgttgagaagaaaaacgctttttgcatacaagcaggaaaatgagatgttatccagtagagatcagagagttgtgacatctgaggaccaagttcaagaagggactaaagtgctgaaacttaaaacaaaaatggctgataaagaaaacatgaagagacctgcagagagcaaaaataatacagtggtggggaaacattgtattcctttaaaaccttcaaatgaactaaccaattcaactgtagtaattgacacacataaacctaaggatagtaatcaaactccgcatttgttactaactgaagatgatccccaaagtcaacatatgacattaagccaggcatttcaccttaaaaacaatagtaaaaagaaacaaatgactacagaaaaacaaaagcaagatgctaacatgcccaagaaacctgtgcttggatcttatcgtggccagattgttcagtctaagattaattcatttagaaaacctctacaagtcaaagatgagagttctgcagcaacaaagaaactttcagccactatacctaaagccacaaaacctcagcctgtaaacaccagcagtgtaacagtgaaaagtaatagatcctccaatatgactgccactactaaatttgtgagcactacatctcagaacacacaacttgtgcgacctcctattagaagtcatcacagtaatacccgggacactgtgaaacaaggcatcagtagaacctctgccaatgttacaatccggaaagggcctcatgaaaaagaactattacaatcaaaaacagctttatctagtgtcaaaaccagttcttctcaaggtataataagaaataagactctatcaagatccatagcatctgaagttgtagccaggcctgcttcattgtctaatgataaactgatggaaaagtcagagcccgttgaccagcgaagacatactgcaggaaaagcaattgttgatagtagatcagctcagcccaaagaaacctcggaagagagaaaagctcgtctgagtgagtggaaagctggcaaaggaagagtgctaaaaaggccccctaattcagtagttactcagcatgagcctgcaggacaaaatgaaaaaccagttgggtctttttggactaccatggcagaagaagatgaacaaagattatttactgaaaaagtaaacaacacattttctgaatgcctgaacttgattaatgagggatgtccaaaagaagatatactggtcacactgaatgacctgattaaaaatattccagatgccaaaaagcttgttaagtattggatatgtcttgcacttattgaaccaatcacaagtcctattgaaaatattattgcaatctatgagaaagccattctggcaggggctcagcctattgaagagatgcgacacacgattgtagatattctaacaatgaagagtcaagaaaaagctaatttaggagaaaatatggagaagtcttgtgcaagcaaggaagaagtcaaagaagtcagtattgaagatacaggtgttgatgtagatccagaaaaactggaaatggagagtaaacttcatagaaatttgctatttcaagattgtgaaaaagagcaagacaacaaaacaaaagatccaacccatgatgttaaaacccccaatacagaaacgaggacaagttgcttaattaaatataatgtgtctactacgccatacttgcaaagtgtgaaaaaaaaggtgcagtttgatggaacaaattccgcatttaaagagctgaagtttttaacaccagtgagacgttctcgacgtcttcaagagaaaacttctaaattgccagatatgttaaaagatcattatccttgtgtgtcttcattggaacagctaacggagttgggaagagaaactgatgcttttgtatgccgccctaatgcagcactgtgccgggtgtactatgaggctgatacaacataagagaaataaagctctgttagggaatgggg

SEQ ID NO: 357731 - DNA, 2882 bp, Homo sapiens
ggcttattcaattcacgcaggaaccaatgggcggagacggcagccgcgccgtctgacggcttagccgcggtgcagactgcggcggcggtggtctgaggaagttctatcttggcgctaaagcggagacgcatcccccgacccgaggctacgatgagcacaccggccgtgccccaggacctgcagctgcccccgagtcagagggcgcagtccgcattcaaagagcaaagaagacaaaaactcaaggaacatctgttgagaagaaaaacgctttttgcatacaagcaggaaaatgagatgttatccagtagagatcagagagttgtgacatctgaggaccaagttcaagaagggactaaagtgctgaaacttaaaacaaaaatggctgataaagaaaacatgaagagacctgcagagagcaaaaataatacagtggtggggaaacattgtattcctttaaaaccttcaaatgaactaaccaattcaactgtagtaattgacacacataaacctaaggatagtaatcaaactccgcatttgttactaactgaagatgatccccaaagtcaacatatgacattaagccaggcatttcaccttaaaaacaatagtaaaaagaaacaaatgactacagaaaaacaaaagcaagatgctaacatgcccaagaaacctgtgcttggatcttatcgtggccagattgttcagtctaagattaattcatttagaaaacctctacaagtcaaagatgagagttctgcagcaacaaagaaactttcagccactatacctaaagccacaaaacctcagcctgtaaacaccagcagtgtaacagtgaaaagtaatagatcctccaatatgactgccactactaaatttgtgagcactacatctcagaacacacaacttgtgcgacctcctattagaagtcatcacagtaatacccgggacactgtgaaacaaggcatcagtagaacctctgccaatgttacaatccggaaagggcctcatgaaaaagaactattacaatcaaaaacagctttatctagtgtcaaaaccagttcttctcaaggtataataagaaataagactctatcaagatccatagcatctgaagttgtagccaggcctgcttcattgtctaatgataaactgatggaaaagtcagagcccgttgaccagcgaagacatactgcaggaaaagcaattgttgatagtagatcagctcagcccaaagaaacctcggaagagagaaaagctcgtctgagtgagtggaaagctggcaaaggaagagtgctaaaaaggccccctaattcagtagttactcagcatgagcctgcaggacaaaatgaaaaaccagttgggtctttttggactaccatggcagaagaagatgaacaaagattatttactgaaaaagtaaacaacacattttctgaatgcctgaacttgattaatgagggatgtccaaaagaagatatactggtcacactgaatgacctgattaaaaatattccagatgccaaaaagcttgttaagtattggatatgtcttgcacttattgaaccaatcacaagtcctattgaaaatattattgcaatctatgagaaagccattctggcaggggctcagcctattgaagagatgcgacacacgattgtagatattctaacaatgaagagtcaagaaaaagctaatttaggagaaaatatggagaagtcttgtgcaagcaaggaagaagtcaaagaagtcagtattgaagatacaggtgttgatgtagatccagaaaaactggaaatggagagtaaacttcatagaaatttgctatttcaagattgtgaaaaagagcaagacaacaaaacaaaagatccaacccatgatgttaaaacccccaatacagaaacgaggacaagttgcttaattaaatataatgtgtctactacgccatacttgcaaagtgtgaaaaaaaaggtgcagtttgatggaacaaattccgcatttaaagagctgaagtttttaacaccagtgagacgttctcgacgtcttcaagagaaaacttctaaattgccagatatgttaaaagatcattatccttgtgtgtcttcattggaacagctaacggagttgggaagagaaactgatgcttttgtatgccgccctaatgcagcactgtgccgggtgtactatgaggctgatacaacataagagaaataaagctctgttagggaatggggaaaaaaaaaaaaaaaaaaaaaaaaaaaaaaaaaaaaaaaaaaaaaaacaaaaacaaaaaaaacaaaacaagaggggggggccgccacaaagaaatacccccgagaggagggcccccaatgttagccagcaccccacacttcgttgagcacaacaaggtgggcccccaaagtaggcggcgagctgctattaaaaagaccgagaagacgacggggcgcggccacgtataaaacaaaacgcctgcaggaaagcaggagaaacacagcgcgccccacacgtcgagggaaattctctggagagaagagacacacaccacctcaaaagcagagcgggggggagcgacaaccaaactcagccggcgccaacaacaacccacacatcccatatacgaagaaaaatatttatcttcataacgccgccccacatacagagcggcaacaaatcaaactataatacaacagcctctttatcgcccagcgaacgctgtcatatactaatgtcgcgggtggttcgcaccaacaactcagacgcctgccgcataattaagttgacgacgcgcgtagtcgtctatcagaaagaacaatgtcgcgcttgcacacaactcgcgggctagcatcatacattgttaccaggaagacacttatttttttctaccg

SEQ ID NO: 357732 - DNA, 490 bp, Homo sapiens
gagaaaagctttgttaatgaaagattttgtgatagagctgatgcttatacatctattctataacagtgatgaatattaacacaaaggaaatatggagaactgttataactgagtgttagaacagtcgtgtacattgatcagtattgagtccatttttaggatggattagtcagttcttttcattggtcttgaaagtaattttggctggtcgcggtggctcacgcctgtaatcccagcactttgggaggccgaggcgggcggatcacgaggtcaggagatcgagaccatcccggctaaaacggtgaaaccccgtctctactaaaaatacaaaaaattagccgggcgtagtggcgggcgcctgtagtcccagctacttgggaggctgaggcaggagaatggcgtgaacccgggaggcggagcttgcagtgagccgagatcccgccactgcactccagcctgggcgacagagcgagactccgtctcaaaaaaa

SEQ ID NO: 357733 - DNA, 2080 bp, Homo sapiens
ataatggcaaaaggagattcctggcttcctgtttccagggtgacgtagatttttttccttcgccagtctcaccgttacccggggcaacagctgagccgtctgggaagggatgcatcttttcttctgtatgcttgagtcaagaactctaagtcatcttggtaataccgggttggatgcttaaagctgcagcaaaaagaccagaactttcaggaaaaaacactatatccaacaactcagatatggcagaagtgaagtcaatgttccgggaagttcttccaaagcaagggccactgtttgtggaagatataatgacaatggtgctgtgtaaacccaaacttttacccttaaaatctctgactctggaaaaactagagaaaatgcatcaagcagcacagaatacaattcgccaacaagaaatggcagaaaaggatcaacggcaaataacccactgaatgataactgagcactttagggaacaacctgccttatctactatttaacaataactagaaaatatgcttctgtgtgctgaaagtagtatgtgttatcaataaaattgatagtattcatagaaatacaaaaatatccaagattgatgaaatttgtattgtgaatgtaaacactctggtttgtattgaacataaacagttaaactatgaaccaagttttatggggtttaagtcatgtttttagaattgcaaattaaattatttgttcaccattcctattgctatcttttatagataacattcttgggatcttttatagcattcttgggcacaagggattaaatacaacttttatatacagaggatctttacatgtttattaaatctgaatttgaagatacattccaatcttgcataaagtgtttgttgggcttttacattacgtaattaaaaaacaaaattttttaaccaattttatgtgccatgtcacgtttaatgctatcttgtgtgaccagatcccaccagtaatgacaaaactgtcttaaacctcatttttttttttttttgagacaagagtttcactcttgttgcccaaacgagagcaatggcaccatctcgactcactgcaacctctgcctcccaggttcaagcaattctcctgcctcagcctcccaagtagctgggattacacgcatgcgccaccatgcctggctacttttgtatttttaatagagacagggtttcttcatgttggtcaagctggtcatgaactcccaacctcaagtgatccgcccacctcggcctcccaaagtgctgggattacaggcatgagccaccgtgcccagcccttaaatctcatttttaagaaaccctcacctattctgtagtcagctaagcttttaattacattaattttaagcacttgagaataaaatgactgcatttatcatccaagtgtcaaacaattaaaaacctaaaaagggtaactatatataagctgaggtaatatgggcttgataaagcccatgaggtaaatatgaacactaaacttggttttaattctaacagactatatctaaacctgtaagcagtatactcctaacagtaccctcataaattctgaatataattcttgtttgctgcagtcaatatttggcagtttaaattagcacagacgttgaggccttgctgagttattaggctatgtaaaagaggttaaaaatatgatcattctttattgttaattggtaatattttctcatacattaggtaaatgtcaagctttgggtctctggagtataactttttgtaacattagccattatttggtaacagaatttaaggatgatggaatgatggaaggtattacatatttctaaaacttaattaagctctaggtcagataacaatggagtaaagtgatacctgcatttttttccccagtgtaatcttaatttactattgtatttttcacttaaaattttgtagggaaaaaaagttttcaagggaacactaagattaaattgactaggttcaaatatgcttccttatgagattcaaaatttactgtgtgaaattaaagtttaagagacctaaaaaaatgtactcccataaagaatcaatactgcttc

SEQ ID NO: 357734 - DNA, 888 bp, Homo sapiens
ataatggcaaaaggagattcctggcttcctgtttccagggtgacgtagatttttttccttcgccagtctcaccgttacccggggcaacagctgagccgtctgggaagggatgcatcttttcttctgtatgcttgagtcaagaactctaagtcatcttggtaataccgggttggatgcttaaagctgcagcaaaaagaccagaactttcaggaaaaaacactatatccaacaactcagatatggcagaagtgaagtcaatgttccgggaagttcttccaaagcaagggccactgtttgtggaagatataatgacaatggtgctgtgtaaacccaaacttttacccttaaaatctctgactctggaaaaactagagaaaatgcatcaagcagcacagaatacaattcgccaacaagaaatggcagaaaaggatcaacggcaaataacccactgaatgataactgagcactttagggaacaacctgccttatctactatttaacaataactagaaaatatgcttctgtgtgctgaaagtagtatgtgttatcaataaaattgatagtattcatagaaatacaaaaatatccaagattgatgaaatttgtattgtgaatgtaaacactctggtttgtattgaacataaacagttaaactatgaaccaagttttatggggtttaagtcatgtttttagaattgcaaattaaattatttgttcaccattcctattgctatcttttatagataacattcttgggatcttttatagcattcttgggcacaagggattaaatacagtttttttacgagggcctacggtttttagcggattgaagacttccagctgcaaaggtggggggtaccacgcattgtttggcacgtgtgccgc

SEQ ID NO: 357735 - DNA, 1570 bp, Homo sapiens
ataatggcaaaaggagattcctggcttcctgtttccagggtgacgtagatttttttccttcgccagtctcaccgttacccggggcaacagctgagccgtctgggaagggatgcatcttttcttctgtatgcttgagtcaagaactctaagtcatcttggtaataccgggttggatgcttaaagctgcagcaaaaagaccagaactttcagggcttctcaaatttaataactatggaatcttatcagaaagtccattaacatctcaaagaacaacgtggttattgtatcaatcaccatcctttataccaggatttgcatatccttcaagatgcctgaagacaatcggaggggtatacaagcaagcgaggttaagaacaatcacttttcagatcctaaacttttatatgtagtgtctgctgataatgcattccctgagaaaatggacctgtggataaaccatcatgcttcatctcatttcctgtctcctctttcaccatttttctttcttttcttttcttttttttttttttttcttgagacaagctcttactctgtcacctaagctagaatgcagtggcgtgatcatatctcactgcaacctaaaactcaggctcaagcagtaccctcacctcagcctcccgagtagctgagactaacaggcacactccatcatgcccgaataatttttgttaattttttgtagagatgaggtcttgctttgttgtctaggctggtcttgaactgggctcaagcgatcctcccactttggccttccaaagtgctgggattccagatgcgagccaccgcaccagtcccccaattatttttctaaggatgtatgaaggaaaggcatctctctagcctggtagaatcttactatgacaaaaatgctccagaaaataaacatctcttaggagctacacacagagacaaggaaacactggtaactcaagaaagactaagggcttcgctaattattaagtaagtagtgcttctgcaagtcaagagactgttctcagctttcaacaatactgaaggaatacctaattgagtagtctgctggtcatttaaaattatttcttgatgataggtcactacgtgattgttagcatataacgtaagttcaaagattgaaaaaaattttcccattttcatctcagtgtttacatctacaaaaatgaagaatagggctgggcacagtggctcacgcctgtaatcccagcactttgggaggccaacgggggcggatcacttgaggtcagaagttcgagaccagcctggccaacatggtgaaaccctgtctctactgaaaatacaaagattggccgggcatggtggcatgcgcctgtggtcccggctactcgggagtctcaggcaggagaattgcttgaatccaggtggcggaggttgcagtgagccgagatcgtgccactgcaccccagcctgggcaacagagcaagactccatctcaaaaaaaaaggaagaagaatagaattgtagcaataagtaaatttcagccatgtatatacgtgaactaattgagaaaataaagctgtcttcttattaacag

SEQ ID NO: 357736 - DNA, 579 bp, Homo sapiens
ataatggcaaaaggagattcctggcttcctgtttccagggtgacgtagatttttttccttcgccagtctcaccgttacccggggcaacagctgagccgtctgggaagggatgcatcttttcttctgtatgcttgagtcaagaactctaagtcatcttggtaataccgggttggatgcttaaagctgcagcaaaaagaccagaactttcaggaaaaaacactatatccaacaactcagatatggcagaagtgaagtcaatgttccgggaagttcttccaaagcaagggccactgtttgtggaagatataatgacaatggtgctgtgtaaacccaaacttttacccttaaaatctctgactctggaaaaactagagaaaatgcatcaagcagcacagaatacaattcgccaacaagaaatggcagaaaaggatcaacggcaaataacccactgaatgataactgagcactttagggaacaacctgccttatctactatttaacaataactagaaaatatgcttctgtgtgctgaaagtagtatgtgttatcaataaaattgatagtattcatagaaataca

SEQ ID NO: 357737 - DNA, 582 bp, Homo sapiens
ggaccgtctagaaaagcatctgtgtttggaaagggaccattctacagcttagtccagaacaccttgaacacacagcatagcagaatcttgactgtaatacttggagcaaatgtcactggcaaaaatggcatatatgctgggatgttcataacaaatagttaaatattgttggtcctttcgcatatagaatctcggtattagaggaaaatagtaaactgaaactctatttctgttctgcaagagccaatttcacctattgtattacttcgttaccaattgcagctgtgtagtcagtcatccataggattctttttgttagacacaaagtagaaaccagctgttggccgttgagacaagtaggaatcttaggaaatgttagcctgccagttcctacttttcctaactacctgcctcaccacccccatcaaatggtggtcatgttttttgtcacccaccattcaggggagatgctatcaacgaaccacgctggctacacacaaataccttttcctcagatgatattaatcatctttgccttaaaaactgaagctctaccaagttttcactatgagagaaaaaaaa

SEQ ID NO: 357738 - DNA, 676 bp, Homo sapiens
ataatggcaaaaggagattcctggcttcctgtttccagggtgacgtagatttttttccttcgccagtctcaccgttacccggggcaacagctgagccgtctgggaagggatgcatcttttcttctgtatgcttgagtcaagaactctaagtcatcttggtaataccgggttggatgcttaaagctgcagcaaaaagaccagaactttcaggaaaaaacactatatccaacaactcagatatggcagaagtgaagtcaatgttccgggaagttcttccaaagcaagagaagggatctcaatgtgttgcctaggctggtctcaaacccctgggctcaaacaaacaatccaacccctttggcatcccaaagtgctgggataacagggccactgtttgtggaagatataatgacaatggtgctgtgtaaacccaaacttttacccttaaaatctctgactctggaaaaactagagaaaatgcatcaagcagcacagaatacaattcgccaacaagaaatggcagaaaaggatcaacggcaaataacccactgaatgataactgagcactttagggaacaacctgccttatctactatttaacaataactagaaaatatgcttctgtgtgctgaaagtagtatgtgttatcaataaaattgatagtattcatagaaataca

SEQ ID NO: 357739 - DNA, 2026 bp, Homo sapiens
ataatggcaaaaggagattcctggcttcctgtttccagggtgacgtagatttttttccttcgccagtctcaccgttacccggggcaacagctgagccgtctgggaagggatgcatcttttcttctgtatgcttgagtcaagaactctaagtcatcttggtaataccgggttggatgcttaaagctgcagcaaaaagaccagaactttcaggaaaaaacactatatccaacaactcagatatggcagaagtgaagtcaatgttccgggaagttcttccaaagcaagggccactgtttgtggaagatataatgacaatggtgctgtgtaaacccaaacttttacccttaaaatctctgactctggaaaaactagagaaaatgcatcaagcagcacagaatacaattcgccaacaagaaatggcagaaaaggatcaacggcaaataacccactgaatgataactgagcactttagggaacaacctgccttatctactatttaacaataactagaaaatatgcttctgtgtgctgaaagtagtatgtgttatcaataaaattgatagtattcatagaaatacaaaaatatccaagattgatgaaatttgtattgtgaatgtaaacactctggtttgtattgaacataaacagttaaactatgaaccaagttttatggggtttaagtcatgtttttagaattgcaaattaaattatttgttcaccattcctattgctatcttttatagataacattcttgggatcttttatagcattcttgggcacaagggattaaatacaacttttatatacagaggatctttacatgtttattaaatctgaatttgaagatacattccaatcttgcataaagtgtttgttgggcttttacattacgtaattaaaaaacaaaattttttaaccaattttatgtgccatgtcacgtttaatgctatcttgtgtgaccagatcccaccagtaatgacaaaactgtcttaaacctcatttttttttttttttgagacaagagtttcactcttgttgcccaaacgagagcaatggcaccatctcgactcactgcaacctctgcctcccaggttcaagcaattctcctgcctcagcctcccaagtagctgggattacacgcatgcgccaccatgcctggctacttttgtatttttaatagagacagggtttcttcatgttggtcaagctggtcatgaactcccaacctcaagtgatccgcccacctcggcctcccaaagtgctgggattacaggcatgagccaccgtgcccagcccttaaatctcatttttaagaaaccctcacctattctgtagtcagctaagcttttaattacattaattttaagcacttgagaataaaatgactgcatttatcatccaagtgtcaaacaattaaaaacctagtaaatatgaacactaaacttggttttaattctaacagactatatctaaacctgtaagcagtatactcctaacagtaccctcataaattctgaatataattcttgtttgctgcagtcaatatttggcagtttaaattagcacagacgttgaggccttgctgagttattaggctatgtaaaagaggttaaaaatatgatcattctttattgttaattggtaatattttctcatacattaggtaaatgtcaagctttgggtctctggagtataactttttgtaacattagccattatttggtaacagaatttaaggatgatggaatgatggaaggtattacatatttctaaaacttaattaagctctaggtcagataacaatggagtaaagtgatacctgcatttttttccccagtgtaatcttaatttactattgtatttttcacttaaaattttgtagggaaaaaaagttttcaagggaacactaagattaaattgactaggttcaaatatgcttccttatgagattcaaaatttactgtgtgaaattaaagtttaagagacctaaaaaaatgtactcccataaagaatcaatactgcttc

SEQ ID NO: 357740 - DNA, 1987 bp, Homo sapiens
ataatggcaaaaggagattcctggcttcctgtttccagggtgacgtagatttttttccttcgccagtctcaccgttacccggggcaacagctgagccgtctgggaagggatgcatctgaaaaaacactatatccaacaactcagatatggcagaagtgaagtcaatgttccgggaagttcttccaaagcaagggccactgtttgtggaagatataatgacaatggtgctgtgtaaacccaaacttttacccttaaaatctctgactctggaaaaactagagaaaatgcatcaagcagcacagaatacaattcgccaacaagaaatggcagaaaaggatcaacggcaaataacccactgaatgataactgagcactttagggaacaacctgccttatctactatttaacaataactagaaaatatgcttctgtgtgctgaaagtagtatgtgttatcaataaaattgatagtattcatagaaatacaaaaatatccaagattgatgaaatttgtattgtgaatgtaaacactctggtttgtattgaacataaacagttaaactatgaaccaagttttatggggtttaagtcatgtttttagaattgcaaattaaattatttgttcaccattcctattgctatcttttatagataacattcttgggatcttttatagcattcttgggcacaagggattaaatacaacttttatatacagaggatctttacatgtttattaaatctgaatttgaagatacattccaatcttgcataaagtgtttgttgggcttttacattacgtaattaaaaaacaaaattttttaaccaattttatgtgccatgtcacgtttaatgctatcttgtgtgaccagatcccaccagtaatgacaaaactgtcttaaacctcatttttttttttttttgagacaagagtttcactcttgttgcccaaacgagagcaatggcaccatctcgactcactgcaacctctgcctcccaggttcaagcaattctcctgcctcagcctcccaagtagctgggattacacgcatgcgccaccatgcctggctacttttgtatttttaatagagacagggtttcttcatgttggtcaagctggtcatgaactcccaacctcaagtgatccgcccacctcggcctcccaaagtgctgggattacaggcatgagccaccgtgcccagcccttaaatctcatttttaagaaaccctcacctattctgtagtcagctaagcttttaattacattaattttaagcacttgagaataaaatgactgcatttatcatccaagtgtcaaacaattaaaaacctaaaaagggtaactatatataagctgaggtaatatgggcttgataaagcccatgaggtaaatatgaacactaaacttggttttaattctaacagactatatctaaacctgtaagcagtatactcctaacagtaccctcataaattctgaatataattcttgtttgctgcagtcaatatttggcagtttaaattagcacagacgttgaggccttgctgagttattaggctatgtaaaagaggttaaaaatatgatcattctttattgttaattggtaatattttctcatacattaggtaaatgtcaagctttgggtctctggagtataactttttgtaacattagccattatttggtaacagaatttaaggatgatggaatgatggaaggtattacatatttctaaaacttaattaagctctaggtcagataacaatggagtaaagtgatacctgcatttttttccccagtgtaatcttaatttactattgtatttttcacttaaaattttgtagggaaaaaaagttttcaagggaacactaagattaaattgactaggttcaaatatgcttccttatgagattcaaaatttactgtgtgaaattaaagtttaagagacctaaaaaaatgtactcccataaagaatcaatactgcttc

SEQ ID NO: 357741 - DNA, 2237 bp, Homo sapiens
ataatggcaaaaggagattcctggcttcctgtttccagggtgacgtagatttttttccttcgccagtctcaccgttacccggggcaacagctgagccgtctgggaagggatgcatcttttcttctgtatgcttgagtcaagaactctaagtcatcttggtaataccgggttggatgcttaaagctgcagcaaaaagaccagaactttcagggcttctcaaatttaataactatggaatcttatcagaaagtccattaacatctcaaagaacaacgtggttattgtatcaatcaccatcctttataccaggatttgcatatccttcaagatgcctgaagacaatcggaggggtatacaagcaagcgaggaaaaaacactatatccaacaactcagatatggcagaagtgaagtcaatgttccgggaagttcttccaaagcaagggccactgtttgtggaagatataatgacaatggtgctgtgtaaacccaaacttttacccttaaaatctctgactctggaaaaactagagaaaatgcatcaagcagcacagaatacaattcgccaacaagaaatggcagaaaaggatcaacggcaaataacccactgaatgataactgagcactttagggaacaacctgccttatctactatttaacaataactagaaaatatgcttctgtgtgctgaaagtagtatgtgttatcaataaaattgatagtattcatagaaatacaaaaatatccaagattgatgaaatttgtattgtgaatgtaaacactctggtttgtattgaacataaacagttaaactatgaaccaagttttatggggtttaagtcatgtttttagaattgcaaattaaattatttgttcaccattcctattgctatcttttatagataacattcttgggatcttttatagcattcttgggcacaagggattaaatacaacttttatatacagaggatctttacatgtttattaaatctgaatttgaagatacattccaatcttgcataaagtgtttgttgggcttttacattacgtaattaaaaaacaaaattttttaaccaattttatgtgccatgtcacgtttaatgctatcttgtgtgaccagatcccaccagtaatgacaaaactgtcttaaacctcatttttttttttttttgagacaagagtttcactcttgttgcccaaacgagagcaatggcaccatctcgactcactgcaacctctgcctcccaggttcaagcaattctcctgcctcagcctcccaagtagctgggattacacgcatgcgccaccatgcctggctacttttgtatttttaatagagacagggtttcttcatgttggtcaagctggtcatgaactcccaacctcaagtgatccgcccacctcggcctcccaaagtgctgggattacaggcatgagccaccgtgcccagcccttaaatctcatttttaagaaaccctcacctattctgtagtcagctaagcttttaattacattaattttaagcacttgagaataaaatgactgcatttatcatccaagtgtcaaacaattaaaaacctaaaaagggtaactatatataagctgaggtaatatgggcttgataaagcccatgaggtaaatatgaacactaaacttggttttaattctaacagactatatctaaacctgtaagcagtatactcctaacagtaccctcataaattctgaatataattcttgtttgctgcagtcaatatttggcagtttaaattagcacagacgttgaggccttgctgagttattaggctatgtaaaagaggttaaaaatatgatcattctttattgttaattggtaatattttctcatacattaggtaaatgtcaagctttgggtctctggagtataactttttgtaacattagccattatttggtaacagaatttaaggatgatggaatgatggaaggtattacatatttctaaaacttaattaagctctaggtcagataacaatggagtaaagtgatacctgcatttttttccccagtgtaatcttaatttactattgtatttttcacttaaaattttgtagggaaaaaaagttttcaagggaacactaagattaaattgactaggttcaaatatgcttccttatgagattcaaaatttactgtgtgaaattaaagtttaagagacctaaaaaaatgtactcccataaagaatcaatactgcttc

SEQ ID NO: 357742 - DNA, 2676 bp, Homo sapiens
ataatggcaaaaggagattcctggcttcctgtttccagggtgacgtagatttttttccttcgccagtctcaccgttacccggggcaacagctgagccgtctgggaagggatgcatcttttcttctgtatgcttgagtcaagaactctaagtcatcttggtaataccgggttggatgcttaaagctgcagcaaaaagaccagaactttcaggaaaaaacactatatccaacaactcagatatggcagaagtgaagtcaatgttccgggaagttcttccaaagcaagagaagggatctcaatgtgttgcctaggctggtctcaaacccctgggctcaaacaaacaatccaacccctttggcatcccaaagtgctgggataacaggtaagagctaccatgccctactcaatatgaaacttcagtgaaagaaataatggaatttactatgttaaataaggtctgaaagtggagaaagagaaacctgaagcaacagtaagaaaagccgaaggtttaaaccttcagtcatttgaatatttacgttaaatatcatattttgctatatttttttgcactatgtatatatatattctgccaaatcttattttaagattaaacttctgacacaaaaagttgtgtcttatggtagcatagattcttgggtagaacgctcaaaacttgtcttcctcagaagcaccctactagtaagaaatgcgcttatagaatgacaatgatctttctggttccagagcaaaactcaatttaggtacaagagtttttcagtgacaagagattaattttttagaccttcattctagctgcaaatccaactacaaacaactgggttatctttcttgaattaattcttatttcttgttaaacttagggccactgtttgtggaagatataatgacaatggtgctgtgtaaacccaaacttttacccttaaaatctctgactctggaaaaactagagaaaatgcatcaagcagcacagaatacaattcgccaacaagaaatggcagaaaaggatcaacggcaaataacccactgaatgataactgagcactttagggaacaacctgccttatctactatttaacaataactagaaaatatgcttctgtgtgctgaaagtagtatgtgttatcaataaaattgatagtattcatagaaatacaaaaatatccaagattgatgaaatttgtattgtgaatgtaaacactctggtttgtattgaacataaacagttaaactatgaaccaagttttatggggtttaagtcatgtttttagaattgcaaattaaattatttgttcaccattcctattgctatcttttatagataacattcttgggatcttttatagcattcttgggcacaagggattaaatacaacttttatatacagaggatctttacatgtttattaaatctgaatttgaagatacattccaatcttgcataaagtgtttgttgggcttttacattacgtaattaaaaaacaaaattttttaaccaattttatgtgccatgtcacgtttaatgctatcttgtgtgaccagatcccaccagtaatgacaaaactgtcttaaacctcatttttttttttttttgagacaagagtttcactcttgttgcccaaacgagagcaatggcaccatctcgactcactgcaacctctgcctcccaggttcaagcaattctcctgcctcagcctcccaagtagctgggattacacgcatgcgccaccatgcctggctacttttgtatttttaatagagacagggtttcttcatgttggtcaagctggtcatgaactcccaacctcaagtgatccgcccacctcggcctcccaaagtgctgggattacaggcatgagccaccgtgcccagcccttaaatctcatttttaagaaaccctcacctattctgtagtcagctaagcttttaattacattaattttaagcacttgagaataaaatgactgcatttatcatccaagtgtcaaacaattaaaaacctaaaaagggtaactatatataagctgaggtaatatgggcttgataaagcccatgaggtaaatatgaacactaaacttggttttaattctaacagactatatctaaacctgtaagcagtatactcctaacagtaccctcataaattctgaatataattcttgtttgctgcagtcaatatttggcagtttaaattagcacagacgttgaggccttgctgagttattaggctatgtaaaagaggttaaaaatatgatcattctttattgttaattggtaatattttctcatacattaggtaaatgtcaagctttgggtctctggagtataactttttgtaacattagccattatttggtaacagaatttaaggatgatggaatgatggaaggtattacatatttctaaaacttaattaagctctaggtcagataacaatggagtaaagtgatacctgcatttttttccccagtgtaatcttaatttactattgtatttttcacttaaaattttgtagggaaaaaaagttttcaagggaacactaagattaaattgactaggttcaaatatgcttccttatgagattcaaaatttactgtgtgaaattaaagtttaagagacctaaaaaaatgtactcccataaagaatcaatactgcttc

SEQ ID NO: 357743 - DNA, 2005 bp, Homo sapiens
ataatggcaaaaggagattcctggcttcctgtttccagggtgacgtagatttttttccttcgccagtctcaccgttacccggggcaacagctgagccgtctgggaagggatgcatcttttcttctgtatgcttgagtcaagaactctaagtcatcttggtaataccgggttggatgcttaaagctgcagcaaaaagaccagaactttcagggccactgtttgtggaagatataatgacaatggtgctgtgtaaacccaaacttttacccttaaaatctctgactctggaaaaactagagaaaatgcatcaagcagcacagaatacaattcgccaacaagaaatggcagaaaaggatcaacggcaaataacccactgaatgataactgagcactttagggaacaacctgccttatctactatttaacaataactagaaaatatgcttctgtgtgctgaaagtagtatgtgttatcaataaaattgatagtattcatagaaatacaaaaatatccaagattgatgaaatttgtattgtgaatgtaaacactctggtttgtattgaacataaacagttaaactatgaaccaagttttatggggtttaagtcatgtttttagaattgcaaattaaattatttgttcaccattcctattgctatcttttatagataacattcttgggatcttttatagcattcttgggcacaagggattaaatacaacttttatatacagaggatctttacatgtttattaaatctgaatttgaagatacattccaatcttgcataaagtgtttgttgggcttttacattacgtaattaaaaaacaaaattttttaaccaattttatgtgccatgtcacgtttaatgctatcttgtgtgaccagatcccaccagtaatgacaaaactgtcttaaacctcatttttttttttttttgagacaagagtttcactcttgttgcccaaacgagagcaatggcaccatctcgactcactgcaacctctgcctcccaggttcaagcaattctcctgcctcagcctcccaagtagctgggattacacgcatgcgccaccatgcctggctacttttgtatttttaatagagacagggtttcttcatgttggtcaagctggtcatgaactcccaacctcaagtgatccgcccacctcggcctcccaaagtgctgggattacaggcatgagccaccgtgcccagcccttaaatctcatttttaagaaaccctcacctattctgtagtcagctaagcttttaattacattaattttaagcacttgagaataaaatgactgcatttatcatccaagtgtcaaacaattaaaaacctaaaaagggtaactatatataagctgaggtaatatgggcttgataaagcccatgaggtaaatatgaacactaaacttggttttaattctaacagactatatctaaacctgtaagcagtatactcctaacagtaccctcataaattctgaatataattcttgtttgctgcagtcaatatttggcagtttaaattagcacagacgttgaggccttgctgagttattaggctatgtaaaagaggttaaaaatatgatcattctttattgttaattggtaatattttctcatacattaggtaaatgtcaagctttgggtctctggagtataactttttgtaacattagccattatttggtaacagaatttaaggatgatggaatgatggaaggtattacatatttctaaaacttaattaagctctaggtcagataacaatggagtaaagtgatacctgcatttttttccccagtgtaatcttaatttactattgtatttttcacttaaaattttgtagggaaaaaaagttttcaagggaacactaagattaaattgactaggttcaaatatgcttccttatgagattcaaaatttactgtgtgaaattaaagtttaagagacctaaaaaaatgtactcccataaagaatcaatactgcttc

SEQ ID NO: 357744 - DNA, 1122 bp, Homo sapiens
ataatggcaaaaggagattcctggcttcctgtttccagggtgacgtagatttttttccttcgccagtctcaccgttacccggggcaacagctgagccgtctgggaagggatgcatcttttcttctgtatgcttgagtcaagaactctaagtcatcttggtaataccgggttggatgcttaaagctgcagcaaaaagaccagaactttcaggtaaaattgaaaatggttaatatccagccagtcaacaatacagatgcaaacctaccttctcgacttaatttctgcttccttagtacttacacgccagccaaaatgaactactcttgtttctttgctgttaattactgaaatctgttgtagcagtcaccttttgtgattctgtatctgattctgttacccgtggagatgtgtttccagattcttcccagcaggaagtaatttcctctgagtttagcattttttgtacatcttttatgacaatcagtatgttatatatataatagcgcttatgtttttagcttcactaccatgtctgcacctaaatagaatggtttgtatcagattcgtcttcccgtcattttcaccatgcacatgatattattttggtaaatacttactgaaagtttgaatatatcgggtgtctcttggatgcccaagacacttccagccaagttttagagaccttcaatttatcagaaattcagctgagcgcctgctactcaatctttgttttacgtttcccctgtgaagtctttctgacatgatttttttccccagtgttttattatgaaagtgttcatatatttaaaagctgaaagaaataatttaatgaatattcatgtacccatcatctatatgcagcagttaacattttgccattttttttcattcctccccactttttcattgtcataaaaagttgcagacacttattgttaggcaagacacccttaagatttccagcatgaatttcctaagaattttgaagttctccagcaaaacacaatatcattatttcagctgttttgtaacttttaaaatctaggccaagtgctaattttcctaatttacccaggaatatcttttataccttctccttcccaatcctgcaaaaaaaaaaaa

SEQ ID NO: 357745 - DNA, 1064 bp, Homo sapiens
ataatggcaaaaggagattcctggcttcctgtttccagggtgacgtagatttttttccttcgccagtctcaccgttacccggggcaacagctgagccgtctgggaagggatgcatcttttcttctgtatgcttgagtcaagaactctaagtcatcttggtaataccgggttggatgcttaaagctgcagcaaaaagaccagaactttcaggtaaaattgaaaatggttaatatccagccagtcaacaatacagatgcaaacctaccttctcgacttaatttctgcttccttagtacttacacgccagccaaaatgaactactcttgtttctttgctgttaattactgaaatctgttgtagcagtcaccttttgtgattctgtatctgattctgttacccgtggagatgtgtttccagattcttcccagcaggaagtaatttcctctgagtttagcattttttgtacatcttttatgacaatcagtatgttatatatataatagcgcttatgtttttagcttcactaccatgtctgcacctaaatagaatggtttgtatcagattcgtcttcccgtcattttcaccatgcacatgatattattttggtaaatacttactgaaagtttgaatatatcgggtgtctcttggatgcccaagacacttccagccaagttttagagaccttcaatttatcagaaattcagctgagcgcctgctactcaatctttgttttacgtttcccctgtgaagtctttctgacatgatttttttccccagtgttttattatgaaagtgttcatatatttaaaagctgaaagaaataatttacattcctccccactttttcattgtcataaaaagttgcagacacttattgttaggcaagacacccttaagatttccagcatgaatttcctaagaattttgaagttctccagcaaaacacaatatcattatttcagctgttttgtaacttttaaaatctaggccaagtgctaattttcctaatttacccaggaatatcttttataccttctccttcccaatcctgcaaaaaaaaaaaa

SEQ ID NO: 357746 - DNA, 1175 bp, Homo sapiens
ataatggcaaaaggagattcctggcttcctgtttccagggtgacgtagatttttttccttcgccagtctcaccgttacccggggcaacagctgagccgtctgggaagggatgcatcttttcttctgtatgcttgagtcaagaactctaagtcatcttggtaataccgggttggatgcttaaagctgcagcaaaaagaccagaactttcaggaaaaaacactatatccaacaactcagatatggcagaagtgaagtcaatgttccgggaagttcttccaaagcaagagaagggatctcaatgtgttgcctaggctggtctcaaacccctgggctcaaacaaacaatccaacccctttggcatcccaaagtgctgggataacaggtaagagctaccatgccctactcaatatgaaacttcagtgaaagaaataatggaatttactatgttaaataaggtctgaaagtggagaaagagaaacctgaagcaacagtaagaaaagccgaaggtttaaaccttcagtcatttgaatatttacgttaaatatcatattttgctatatttttttgcactatgtatatatatattctgccaaatcttattttaagattaaacttctgacacaaaaagttgtgtcttatggtagcatagattcttgggtagaacgctcaaaacttgtcttcctcagaagcaccctactagtaagaaatgcgcttatagaatgacaatgatctttctggttccagagcaaaactcaatttaggtacaagagtttttcagtgacaagagattaattttttagaccttcattctagctgcaaatccaactacaaacaactgggttatctttcttgaattaattcttatttcttgttaaacttagggccactgtttgtggaagatataatgacaatggtgctgtgtaaacccaaacttttacccttaaaatctctgactctggaaaaactagagaaaatgcatcaagcagcacagaatacaattcgccaacaagaaatggcagaaaaggatcaacggcaaataacccactgaatgataactgagcactttagggaacaacctgccttatctactatttaacaataactagaaaatatgcttctgtgtgctgaaagtagtatgtgttatcaataaaattgatagtattcatagaaataca

SEQ ID NO: 357747 - DNA, 1016 bp, Homo sapiens
ataatggcaaaaggagattcctggcttcctgtttccagggtgacgtagatttttttccttcgccagtctcaccgttacccggggcaacagctgagccgtctgggaagggatgcatcttttcttctgtatgcttgagtcaagaactctaagtcatcttggtaataccgggttggatgcttaaagctgcagcaaaaagaccagaactttcagggcttctcaaatttaataactatggaatcttatcagaaagtccattaacatctcaaagaacaacgtggttattgtatcaatcaccatcctttataccaggatttgcatatccttcaagatgcctgaagacaatcggaggggtatacaagcaagcgaggttaagaacaatcacttttcagatcctaaacttttatatgtagtgtctgctgataatgcattccctgagaaaatggacctgtggataaaccatcatgcttcatctcatttcctgtctcctctttcaccatttttctttcttttcttttcttttttttttttttttcttgagacaagctcttactctgtcacctaagctagaatgcagtggcgtgatcatatctcactgcaacctaaaactcaggctcaagcagtaccctcacctcagcctcccgagtagctgagactaacaggcacactccatcatgcccgaataatttttgttaattttttgtagagatgaggtcttgctttgttgtctaggctggtcttgaactgggctcaagcgatcctcccactttggccttccaaagtgctgggattccagatgcgagccaccgcaccagtcccccaattatttttctaaggatgtatgaaggaaaggcatctctctagcctggtagaatcttactatgacaaaaatgctccagaaaataaacatctcttaggagctacacacagagacaaggaaacactggtaactcaagaaatgtcttacgggttatcagcgaacctacaagggtattcacctgctcgcagcaataaacacc

SEQ ID NO: 357748 - DNA, 611 bp, Homo sapiens
gccgttgagacaagtaggaatcttaggaaatgttagcctgccagttcctacttttcctaactacctgcctcaccacccccatcaaatggtggtcatgttttttgtcacccaccattcaggggagatgctatcaacgaaccacgctggctacacacaaataccttttcctcagatgatattaatcatctttgccttaaaaactgaagctctaccaagttttcactatgagagaaaaaaaattacaacacctagccttgtagttaacaccacaactgactaatggaagttgacaagatctaaatgcttatacaaactatcccaaggtcacaggaaattaatggcaatattatacaaggttagggtagttcactttctataggaatttggattttacttcttaaactacaatggaaatgtctcaggcagtctgctttgggaatgtattcttgaataatactgatttctcattgaaggaaaaaacactatatccaacaactcagatatggcagaagtgaagtcaatgttccgggaagttcttccaaagcaaggtatgtacatcacaaatattgaggtcattgattattacaggactaaagaagtcataggcagtg

SEQ ID NO: 357749 - DNA, 459 bp, Homo sapiens
ataatggcaaaaggagattcctggcttcctgtttccagggtgacgtagatttttttccttcgccagtctcaccgttacccggggcaacagctgagccgtctgggaagggatgcatctatatggcagaagtgaagtcaatgttccgggaagttcttccaaagcaagggccactgtttgtggaagatataatgacaatggtgctgtgtaaacccaaacttttacccttaaaatctctgactctggaaaaactagagaaaatgcatcaagcagcacagaatacaattcgccaacaagaaatggcagaaaaggatcaacggcaaataacccactgaatgataactgagcactttagggaacaacctgccttatctactatttaacaataactagaaaatatgcttctgtgtgctgaaagtagtatgtgttatcaataaaattgatagtattcatagaaataca

SEQ ID NO: 357750 - DNA, 736 bp, Homo sapiens
ataatggcaaaaggagattcctggcttcctgtttccagggtgacgtagatttttttccttcgccagtctcaccgttacccggggcaacagctgagccgtctgggaagggatgcatcttttcttctgtatgcttgagtcaagaactctaagtcatcttggtaataccgggttggatgcttaaagctgcagcaaaaagaccagaactttcagggcttctcaaatttaataactatggaatcttatcagaaagtccattaacatctcaaagaacaacgtggttattgtatcaatcaccatcctttataccaggatttgcatatccttcaagatgcctgaagacaatcggaggggtatacaagcaagcgaggaaaaaacactatatccaacaactcagatatggcagaagtgaagtcaatgttccgggaagttcttccaaagcaagggccactgtttgtggaagatataatgacaatggtgctgtgtaaacccaaacttttacccttaaaatctctgactctggaaaaactagagaaaatgcatcaagcagcacagaatacaattcgccaacaagaaatggcagaaaaggatcaacggcaaataacccactgaatgataactgagcactttagggaacaacctgccttatctactatttaacaataactagaaaatatgcttctgtgtgctgaaagtagtatgtgttatcaataaaattgatagtattcatagaaataca

SEQ ID NO: 357751 - DNA, 543 bp, Homo sapiens
gagatgaagtctcgctctattgcccaggatggagtgcagtggcgcgatcatggctcaccgcaacctccacctctcaggctcaagcgattctcccgcctcagcctcccgagtagccgccaatctaatgcctgtttttgaaacattctatgcaactagtctattttctattttattgttcagattttaccacatttctaatcaggctgccaaataaatttttagaaaagaaagttataagcccagaaaaaaaaattatatatttttctagaactctgtacaataatccctaaagaaatcttttatgtgcataaaaaaaatctcaaaacaaattctactgaaattacgttgagactatcaataaccattgccaataattatcaatggacattttaagggatagaatagagaaatacaatacattccatggcgtttcaattaattagaacatgacaactgaagcacgcttaattccatccttttaagatgcatgtgtgagaaagatttccatcatcaagggaagcctacttttacatttcccacgtg

SEQ ID NO: 357752 - DNA, 412 bp, Homo sapiens
ctggagtgcagtggtgcagtcttggctcactgcagcctccacctcccaggttcaagtgattctcctgcctcagcctcctgagtagctgggattacaggcacctgactaatttttgtatttttagtagagatggggtttcaccatgttggccaggctggtcttgaactcctgacctcaaatgatctgtcagccttggcctcccaaagtactgggattgcaggcgtaagccatccagccctgtcaaagttgtcttttttttttttatagttggttgtttaaagattccaatgaagtctacacgttgcacttggcttaatgtctgtataagagtctcttttaaggagtgatttttgttatttgttttaaacaaaagtgttaggattttatttttatttttttgtaggttagaacc

SEQ ID NO: 357753 - DNA, 1309 bp, Homo sapiens
atatgtatttttgtcagaaggttagctaggcagaggtcttagacatgagagtgctggaaagaaaagtatagaggacagattggtaggagagggatccagataggtattcatggacccagtcttgaagggcagatatgttatgcaagggagttagctagattctgtagtcatgcaaaaattttaagcatagaagataattgtgtaccatattagaaaggttactctcgcagcattggtttggacgggttggaacagaggtgtgaattgtgttggaaataggtgattttactatagtattttagatgaaagatgaatagtatttgtgggtcagtgagaatgaggaaggaggtgagagaaaaatagaatcaacataatcagtaattgcttagatatgaggggagtaagaatatgaggaatctgtgataattcacaggtttgtaacttgggcaacccagtgtgccatccactgaaatttgtaatactgaaggggaggagtaggtgaaatagacaaagatgagtttattatatgcatcttttaaaaggttcaaaaacaaacacttgggtgttgtaaagtcatcaccctttgtggggcacaaaggaagaggttggctgagaaggggctgtggagtagaaaggtgaagaatagggccttcgtgaacacagacacgtggacaggctgagtaagtagagcctgcaaagaatactgaagatgacagagaggtagaagccaagctaaaggattatggtcataaaattgagagaagtgaatgtttcaagaagggagggtaaatagtgccagttgctgcagtgaagtaacattagaggaaaccttagaagtacttggagtttttcagcatctaggttattgatgatcataggggaggcgtttcaatggagtgatacgttagagcagcttgttacttatctcagtgagaggtgaaggtttggaaatcagcagtctggacattctgagagatggctatgaaagaaaaagacagtggacgagtaagaattcagttgcaagaataaggctcaagatagttttaaatttttaagagggcttactccagttacaggagggaaggaattaagtataggtacaggaaaatgaactaggaagggcagaagcacaggtaggtagttgaagaagttcatcatcatagttcatagttttaatttttttatgaggtggaatcaagcttatgttttgggagaagggactggactaaaattgaggccgaagcgggcagatcacgaggtcaggagatcgagaccatcctggctaatatggtgaaaccccgtctctact

SEQ ID NO: 357754 - DNA, 1048 bp, Homo sapiens
ttgagccagacaacatggttcagggaagaaatggaatagggatgaaagagaagtctgtgagtgaaccatctttagtgagtgaaggaggtgagagaaaaatagaatcaacataatcagtaattgcttagatatgaggggagtaagaatatgaggaatctgtgataattcacaggtttgtaacttgggcaacccagtgtgccatccactgaaatttgtaatactgaaggggaggagtaggtgaaatagacaaagatgagtttattatatgcatcttttaaaaggttcaaaaacaaacacttgggtgttgtaaagtcatcaccctttgtggggcacaaaggaagaggttggctgagaaggggctgtggagtagaaaggtgaagaatagggccttcgtgaacacagacacgtggacaggctgagtaagtagagcctgcaaagaatactgaagatgacagagaggtagaagccaagctaaaggattatggtcataaaattgagagaagtgaatgtttcaagaagggagggtaaatagtgccagttgctgcagtgaagtaacattagaggaaaccttagaagtacttggagtttttcagcatctaggttattgatgatcataggggaggcgtttcaatggagtgatacgttagagcagcttgttacttatctcagtgagaggtgaaggtttggaaatcagcagtctggacattctgagagatggctatgaaagaaaaagacagtggacgagtaagaattcagttgcaagaataaggctcaagatagttttaaatttttaagagggcttactccagttacaggagggaaggaattaagtataggtacaggaaaatgaactaggaagggcagaagcacaggtaggtagttgaagaagttcatcatcatagttcatagttttaatttttttatgaggtggaatcaagcttatgttttgggagaagggactggactaaaattgaggccgaagcgggcagatcacgaggtcaggagatcgagaccatcctggctaatatggtgaaaccccgtctctact

SEQ ID NO: 357755 - DNA, 366 bp, Homo sapiens
aactttaggtatgtccagctatcaaacttaaatttttttctttctctgtagagctgctctggataaggctaccgtgcttctgagtatgtctaaaggtggaaagcgtaaagatagtgtgtggggctctggaggtgggcagcaatctgtcaatcaccttgttaaagaggtaatgattgggtattgtttttaacttaatttatatgtattcctctgagtgaaataaattgtggctactagctggtatttttatggacaaaaattaagttcggtcttacagctgcaattggaaaatgaaataatttttttaatatgtggctttataaccttttattataaattatatgattaaaaaatgagtctgttaaa

SEQ ID NO: 357756 - DNA, 3599 bp, Homo sapiens
agctccggctccgccgccacgattggccagccgaccacccggcctcggccaataagcgccgccctctcgcccccgtgttactgggtagaagaaaacaaaaacaaacagagcgagaagggccagagactctccgaggcggcggcagagacagaagagcggggtcggggccggctgaccaggaacctgggcgagcagcggcgggggcccgagggattctgaaggaagatttccattaggtaatttgtttaatcagtgcaagcgaaattaagggaaaatggatgtagaaaatgagcagatactgaatgtaaaccctgcagatcctgataacttaagtgactctctcttttccggtgatgaagaaaatgctgggactgaggaagtaaagaatgaaataaatggaaattggatttcagcatcctccattaacgaagctagaattaatgccaaggcaaaaaggcgactaaggaaaaactcatcccgggactctggcagaggcgattcggtcagcgacagtgggagtgacgcccttagaagtggattaactgtgccaaccagtccaaagggaaggttgctggataggcgatccagatctgggaaaggaaggggactaccaaagaaaggtggtgcaggaggcaaaggtgtctggggtacacctggacaggtgtatgatgtggaggaggtggatgtgaaagatcctaactatgatgatgaccaggagaactgtgtttatgaaactgtagttttgcctttggatgaaagggcatttgagaagactttaacaccaatcatacaggaatattttgagcatggagatactaatgaagttgcggaaatgttaagagatttaaatcttggtgaaatgaaaagtggagtaccagtgttggcagtatccttagcattggaggggaaggctagtcatagagagatgacatctaagcttctttctgacctttgtgggacagtaatgagcacaactgatgtggaaaaatcatttgataaattgttgaaagatctacctgaattagcactggatactcctagagcaccacagttggtgggccagtttattgctagagctgttggagatggaattttatgtaatacctatattgatagttacaaaggaactgtagattgtgtgcaggctagagctgctctggataaggctaccgtgcttctgagtatgtctaaaggtggaaagcgtaaagatagtgtgtggggctctggaggtgggcagcaatctgtcaatcaccttgttaaagagattgatatgctgctgaaagaatatttactctctggagacatatctgaagctgaacattgccttaaggaactggaagtacctcattttcaccatgagcttgtatatgaagctattataatggttttagagtcaactggagaaagtacatttaagatgattttggatttattaaagtccctttggaagtcttctaccattactgtagaccaaatgaaaagaggttatgagagaatttacaatgaaattccggacattaatctggatgtcccacattcatactctgtgctggagcggtttgtagaagaatgttttcaggctggaataatttccaaacaactcagagatctttgtccttcaaggggcagaaagcgttttgtaagcgaaggagatggaggtcgtcttaaaccagagagctactgaatataagaactcttgcagtcttagatgttataaaaatatatatctgaattgtaagagttgttagcacaagtttttttttttttttttttaagcacttgttttgggtacaaggcatttctgacattttataaacctacatttaaggggaatttttaaaggaaatgttttttctttttttttgtttttcgagggggcaaggagggacagaaaagtaacctcttcttaagtggaatattctaataagctaccttttgtaagtgccatgtttattatctaatcattccaagttttgcattgatgtctgactgccactcctttctttcaaggacagtgttttttgtagtaaaatcactggtttatacaaagctttatttagggggtaaagttaagctgctaaaaccccatgttggctgctgctgttgagatactgtgctttgggagtaaaaaaagaaagttatttctttgtcttaaagaatttttaaaaaattagtcatgagacttattcatctttccagggaacatactgattggtcttaaaagactagacagttaagtaaaaggtggctggaacatctatttttctacaaaactggaaaaatgaacctggttctagaagaatgtacaccaaaataaaacatgtgaagcagtattgattctttattgggagtacatttttttaggtctcttaaactttaatttcacacagtaaattttgaatctcataaggaagcatatttgaacctagtcaatttaatcttagtgttcccttgaaaactttttttccctacaaaattttaagtgaaaaatacaatagtaaattaagattacactggggaaaaaaatgcaggtatcactttactccattgttatctgacctagagcttaattaagttttagaaatatgtaataccttccatcattccatcatccttaaattctgttaccaaataatggctaatgttacaaaaagttatactccagagacccaaagcttgacatttacctaatgtatgagaaaatattaccaattaacaataaagaatgatcatatttttaacctcttttacatagcctaataactcagcaaggcctcaacgtctgtgctaatttaaactgccaaatattgactgcagcaaacaagaattatattcagaatttatgagggtactgttaggagtatactgcttacaggtttagatatagtctgttagaattaaaaccaagtttagtgttcatatttacctcatgggctttatcaagcccatattacctcagcttatatatagttaccatttttaggtttttaattgtttgacacttggatgataaatgcagtcattttattctcaagtgcttaaaattaatgtaattaaaagcttagctgactacagaataggtgagggtttcttaaaaatgagatttaagggctgggcacggtggctcatgcctgtaatcccagcactttgggaggccgaggtgggcggatcacttgaggttgggagttcatgaccagcttgaccaacatgaagaaaccctgtctctattaaaaatacaaaagtagccaggcatggtggcgcatgcgtgtaatcccagctacttgggaggctgaggcaggagaattgcttgaacctgggaggcagaggttgcagtgagtcgagatggtgccattgctctcgtttgggcaacaagagtgaaactcttgtctcaaaaaaaaaaaaaatgaggtttaagacagttttgtcattactggtgggatctggtcacacaagatagcattaaacgtgacatggcacataaaattggttaaaaaattttgttttttaattacgtaatgtaaaagcccaacaaacactttatgcaagattggaatgtatcttcaaattcagatttaataaacatgtaaagatcctctgta

SEQ ID NO: 357757 - DNA, 4105 bp, Homo sapiens
agctccggctccgccgccacgattggccagccgaccacccggcctcggccaataagcgccgccctctcgcccccgtgttactgggtagaagaaaacaaaaacaaacagagcgagaagggccagagactctccgaggcggcggcagagacagaagagcggggtcggggccggctgaccaggaacctgggcgagcagcggcgggggcccgagggattctgaaggaagatttccattaggtaatttgtttaatcagtgcaagcgaaattaagggaaaatggatgtagaaaatgagcagatactgaatgtaaaccctgcagatcctgataacttaagtgactctctcttttccggtgatgaagaaaatgctgggactgaggaagtaaagaatgaaataaatggaaattggatttcagcatcctccattaacgaagctagaattaatgccaaggcaaaaaggcgactaaggaaaaactcatcccgggactctggcagaggcgattcggtcagcgacagtgggagtgacgcccttagaagtggattaactgtgccaaccagtccaaagggaaggttgctggataggcgatccagatctgggaaaggaaggggactaccaaagaaaggtggtgcaggaggcaaaggtgtctggggtacacctggacaggtgtatgatgtggaggaggtggatgtgaaagatcctaactatgatgatgaccaggagaactgtgtttatgaaactgtagttttgcctttggatgaaagggcatttgagaagactttaacaccaatcatacaggaatattttgagcatggagatactaatgaagttgcggaaatgttaagagatttaaatcttggtgaaatgaaaagtggagtaccagtgttggcagtatccttagcattggaggggaaggctagtcatagagagatgacatctaagcttctttctgacctttgtgggacagtaatgagcacaactgatgtggaaaaatcatttgataaattgttgaaagatctacctgaattagcactggatactcctagagcaccacagttggtgggccagtttattgctagagctgttggagatggaattttatgtaatacctatattgatagttacaaaggaactgtagattgtgtgcaggctagagctgctctggataaggctaccgtgcttctgagtatgtctaaaggtggaaagcgtaaagatagtgtgtggggctctggaggtgggcagcaatctgtcaatcaccttgttaaagagattgatatgctgctgaaagaatatttactctctggagacatatctgaagctgaacattgccttaaggaactggaagtacctcattttcaccatgagcttgtatatgaagctattataatggttttagagtcaactggagaaagtacatttaagatgattttggatttattaaagtccctttggaagtcttctaccattactgtagaccaaatgaaaagaggttatgagagaatttacaatgaaattccggacattaatctggatgtcccacattcatactctgtgctggagcggtttgtagaagaatgttttcaggctggaataatttccaaacaactcagagatctttgtccttcaaggggcagaaagcgttttgtaagcgaaggagatggaggtcgtcttaaaccagagagctactgaatataagaactcttgcagtcttagatgttataaaaatatatatctgaattgtaagagttgttagcacaagtttttttttttttttttttaagcacttgttttgggtacaaggcatttctgacattttataaacctacatttaaggggaatttttaaaggaaatgttttttctttttttttgtttttcgagggggcaaggagggacagaaaagtaacctcttcttaagtggaatattctaataagctaccttttgtaagtgccatgtttattatctaatcattccaagttttgcattgatgtctgactgccactcctttctttcaaggacagtgttttttgtagtaaaatcactggtttatacaaagctttatttagggggtaaagttaagctgctaaaaccccatgttggctgctgctgttgagatactgtgctttgggagtaaaaaaagaaagttatttctttgtcttaaagaatttttaaaaaattagtcatgagacttattcatctttccagggaacatactgattggtcttaaaagactagacagttaagtaaaaggtggctggaacatctatttttctacaaaactggaaaaatgaacctggttctagaagaatgtacaccaaaataaaacatgtgaagcagtattgattctttattgggagtacatttttttaggtctcttaaactttaatttcacacagtaaattttgaatctcataaggaagcatatttgaacctagtcaatttaatcttagtgttcccttgaaaactttttttccctacaaaattttaagtgaaaaatacaatagtaaattaagattacactggggaaaaaaatgcaggtatcactttactccattgttatctgacctagagcttaattaagttttagaaatatgtaataccttccatcattccatcatccttaaattctgttaccaaataatggctaatgttacaaaaagttatactccagagacccaaagcttgacatttacctaatgtatgagaaaatattaccaattaacaataaagaatgatcatatttttaacctcttttacatagcctaataactcagcaaggcctcaacgtctgtgctaatttaaactgccaaatattgactgcagcaaacaagaattatattcagaatttatgagggtactgttaggagtatactgcttacaggtttagatatagtctgttagaattaaaaccaagtttagtgttcatatttacctcatgggctttatcaagcccatattacctcagcttatatatagttaccatttttaggtttttaattgtttgacacttggatgataaatgcagtcattttattctcaagtgcttaaaattaatgtaattaaaagcttagctgactacagaataggtgagggtttcttaaaaatgagatttaagggctgggcacggtggctcatgcctgtaatcccagcactttgggaggccgaggtgggcggatcacttgaggttgggagttcatgaccagcttgaccaacatgaagaaaccctgtctctattaaaaatacaaaagtagccaggcatggtggcgcatgcgtgtaatcccagctacttgggaggctgaggcaggagaattgcttgaacctgggaggcagaggttgcagtgagtcgagatggtgccattgctctcgtttgggcaacaagagtgaaactcttgtctcaaaaaaaaaaaaaatgaggtttaagacagttttgtcattactggtgggatctggtcacacaagatagcattaaacgtgacatggcacataaaattggttaaaaaattttgttttttaattacgtaatgtaaaagcccaacaaacactttatgcaagattggaatgtatcttcaaattcagatttaataaacatgtaaagatcctctgtatataaaagttgtatttaatcccttgtgcccaagaatgctataaaagatcccaagaatgttatctataaaagatagcaataggaatggtgaacaaataatttaatttgcaattctaaaaacatgacttaaaccccataaaacttggttcatagtttaactgtttatgttcaatacaaaccagagtgtttacattcacaatacaaatttcatcaatcttggatatttttgtatttctatgaatactatcaattttattgataacacatactactttcagcacacagaagcatattttctagttattgttaaatagtagataaggcaggttgttccctaaagtgctcagttatcattcagtgggttatttgccgttgatccttttctgccatttcttgttggcgaattgtattctgtgctgcttgatgcattttctctagtttttccagagtcagagattttaagggtaaaagtttgggtttacacagcaccattgtcattatatcttc

SEQ ID NO: 357758 - DNA, 3552 bp, Homo sapiens
agctccggctccgccgccacgattggccagccgaccacccggcctcggccaataagcgccgccctctcgcccccgtgttactgggtagaagaaaacaaaaacaaacagagcgagaagggccagagactctccgaggcggcggcagagacagaagagcggggtcggggccggctgaccaggaacctgggcgagcagcggcgggggcccgagggattctgaaggaagatttccattaggtaatttgtttaatcagtgcaagcgaaattaagggaaaatggatgtagaaaatgagcagatactgaatgtaaaccctgcagatcctgataacttaagtgactctctcttttccggtgatgaagaaaatgctgggactgaggaagtaaagaatgaaataaatggaaattggatttcagcatcctccattaacgaagctagaattaatgccaaggcaaaaaggcgactaaggaaaaactcatcccgggactctggcagaggcgattcggtcagcgacagtgggagtgacgcccttagaagtggattaactgtgccaaccagtccaaagggaaggttgctggataggcgatccagatctgggaaaggaaggggactaccaaagaaaggtggtgcaggaggcaaaggtgtctggggtacacctggacaggtgtatgatgtggaggaggtggatgtgaaagatcctaactatgatgatgaccaggagaactgtgtttatgaaactgtagttttgcctttggatgaaagggcatttgagaagactttaacaccaatcatacaggaatattttgagcatggagatactaatgaagttgcggaaatgttaagagatttaaatcttggtgaaatgaaaagtggagtaccagtgttggcagtatccttagcattggaggggaaggctagtcatagagagatgacatctaagcttctttctgacctttgtgggacagtaatgagcacaactgatgtggaaaaatcatttgataaattgttgaaagatctacctgaattagcactggatactcctagagcaccacagttggtgggccagtttattgctagagctgttggagatggaattttatgtaatacctatattgatagttacaaaggaactgtagattgtgtgcaggctagagctgctctggataaggctaccgtgcttctgagtatgtctaaaggtggaaagcgtaaagatagtgtgtggggctctggaggtgggcagcaatctgtcaatcaccttgttaaagagattgatatgctgctgaaagaatatttactctctggagacatatctgaagctgaacattgccttaaggaactggaagtacctcattttcaccatgagcttgtatatgaagctattataatggttttagagtcaactggagaaagtacatttaagatgattttggatttattaaagtccctttggaagtcttctaccattactgtagaccaaatgaaaagaggttatgagagaatttacaatgaaattccggacattaatctggatgtcccacattcatactctgtgctggagcggtttgtagaagaatgttttcaggctggaataatttccaaacaactcagagatctttgtccttcaaggggcagaaagcgttttgtaagcgaaggagatggaggtcgtcttaaaccagagagctactgaatataagaactcttgcagtcttagatgttataaaaatatatatctgaattgtaagagttgttagcacaagtttttttttttttttttttaagcacttgttttgggtacaaggcatttctgacattttataaacctacatttaaggggaatttttaaaggaaatgttttttctttttttttgtttttcgagggggcaaggagggacagaaaagtaacctcttcttaagtggaatattctaataagctaccttttgtaagtgccatgtttattatctaatcattccaagttttgcattgatgtctgactgccactcctttctttcaaggacagtgttttttgtagtaaaatcactggtttatacaaagctttatttagggggtaaagttaagctgctaaaaccccatgttggctgctgctgttgagatactgtgctttgggagtaaaaaaagaaagttatttctttgtcttaaagaatttttaaaaaattagtcatgagacttattcatctttccagggaacatactgattggtcttaaaagactagacagttaagtaaaaggtggctggaacatctatttttctacaaaactggaaaaatgaacctggttctagaagaatgtacaccaaaataaaacatgtgaagcagtattgattctttattgggagtacatttttttaggtctcttaaactttaatttcacacagtaaattttgaatctcataaggaagcatatttgaacctagtcaatttaatcttagtgttcccttgaaaactttttttccctacaaaattttaagtgaaaaatacaatagtaaattaagattacactggggaaaaaaatgcaggtatcactttactccattgttatctgacctagagcttaattaagttttagaaatatgtaataccttccatcattccatcatccttaaattctgttaccaaataatggctaatgttacaaaaagttatactccagagacccaaagcttgacatttacctaatgtatgagaaaatattaccaattaacaataaagaatgatcatatttttaacctcttttacatagcctaataactcagcaaggcctcaacgtctgtgctaatttaaactgccaaatattgactgcagcaaacaagaattatattcagaatttatgagggtactgttaggagtatactgcttacaggtttagatatagtctgttagaattaaaaccaagtttagtgttcatatttacctcatgggctttatcaagcccatattacctcagcttatatatagttaccatttttaggtttttaattgtttgacacttggatgataaatgcagtcattttattctcaagtgcttaaaattaatgtaattaaaagcttagctgactacagaataggtgagggtttcttaaaaatgagatttaagggctgggcacggtggctcatgcctgtaatcccagcactttgggagaccaacatgaagaaaccctgtctctattaaaaatacaaaagtagccaggcatggtggcgcatgcgtgtaatcccagctacttgggaggctgaggcaggagaattgcttgaacctgggaggcagaggttgcagtgagtcgagatggtgccattgctctcgtttgggcaacaagagtgaaactcttgtctcaaaaaaaaaaaaaatgaggtttaagacagttttgtcattactggtgggatctggtcacacaagatagcattaaacgtgacatggcacataaaattggttaaaaaattttgttttttaattacgtaatgtaaaagcccaacaaacactttatgcaagattggaatgtatcttcaaattcagatttaataaacatgtaaagatcctctgta

SEQ ID NO: 357759 - DNA, 3726 bp, Homo sapiens
gaacaaaactgtggcccagtggtagctaattcagtagcctttctgacttaaagagctttcagggcaaagccaagtgcctccacttgatctccatggaatttgagtatgaaggacactctgctaggtgatggggatacaaagaaggacatacagtctagttgtggtttctcctttgaagcttatgacttagttggaagaaaaagactgctatataaaaagaaagtgatttccatgacgtgttgaatgaatagtatgtgagcaattagtgttcctgtacctagagttgtaagggaagttttaatgcagggagtaagacttgggctatatcctaaaggattttgataactgaaaataacagtgagggcgacattctactgggaactccagtatgttgatctctttcagaagaatcaattttatataggctggaagatttacaggatgatcctgataacttaagtgactctctcttttccggtgatgaagaaaatgctgggactgaggaagtaaagaatgaaataaatggaaattggatttcagcatcctccattaacgaagctagaattaatgccaaggcaaaaaggcgactaaggaaaaactcatcccgggactctggcagaggcgattcggtcagcgacagtgggagtgacgcccttagaagtggattaactgtgccaaccagtccaaagggaaggttgctggataggcgatccagatctgggaaaggaaggggactaccaaagaaaggtggtgcaggaggcaaaggtgtctggggtacacctggacaggtgtatgatgtggaggaggtggatgtgaaagatcctaactatgatgatgaccaggagaactgtgtttatgaaactgtagttttgcctttggatgaaagggcatttgagaagactttaacaccaatcatacaggaatattttgagcatggagatactaatgaagttgcggaaatgttaagagatttaaatcttggtgaaatgaaaagtggagtaccagtgttggcagtatccttagcattggaggggaaggctagtcatagagagatgacatctaagcttctttctgacctttgtgggacagtaatgagcacaactgatgtggaaaaatcatttgataaattgttgaaagatctacctgaattagcactggatactcctagagcaccacagttggtgggccagtttattgctagagctgttggagatggaattttatgtaatacctatattgatagttacaaaggaactgtagattgtgtgcaggctagagctgctctggataaggctaccgtgcttctgagtatgtctaaaggtggaaagcgtaaagatagtgtgtggggctctggaggtgggcagcaatctgtcaatcaccttgttaaagagattgatatgctgctgaaagaatatttactctctggagacatatctgaagctgaacattgccttaaggaactggaagtacctcattttcaccatgagcttgtatatgaagctattataatggttttagagtcaactggagaaagtacatttaagatgattttggatttattaaagtccctttggaagtcttctaccattactgtagaccaaatgaaaagaggttatgagagaatttacaatgaaattccggacattaatctggatgtcccacattcatactctgtgctggagcggtttgtagaagaatgttttcaggctggaataatttccaaacaactcagagatctttgtccttcaaggggcagaaagcgttttgtaagcgaaggagatggaggtcgtcttaaaccagagagctactgaatataagaactcttgcagtcttagatgttataaaaatatatatctgaattgtaagagttgttagcacaagtttttttttttttttttttaagcacttgttttgggtacaaggcatttctgacattttataaacctacatttaaggggaatttttaaaggaaatgttttttctttttttttgtttttcgagggggcaaggagggacagaaaagtaacctcttcttaagtggaatattctaataagctaccttttgtaagtgccatgtttattatctaatcattccaagttttgcattgatgtctgactgccactcctttctttcaaggacagtgttttttgtagtaaaatcactggtttatacaaagctttatttagggggtaaagttaagctgctaaaaccccatgttggctgctgctgttgagatactgtgctttgggagtaaaaaaagaaagttatttctttgtcttaaagaatttttaaaaaattagtcatgagacttattcatctttccagggaacatactgattggtcttaaaagactagacagttaagtaaaaggtggctggaacatctatttttctacaaaactggaaaaatgaacctggttctagaagaatgtacaccaaaataaaacatgtgaagcagtattgattctttattgggagtacatttttttaggtctcttaaactttaatttcacacagtaaattttgaatctcataaggaagcatatttgaacctagtcaatttaatcttagtgttcccttgaaaactttttttccctacaaaattttaagtgaaaaatacaatagtaaattaagattacactggggaaaaaaatgcaggtatcactttactccattgttatctgacctagagcttaattaagttttagaaatatgtaataccttccatcattccatcatccttaaattctgttaccaaataatggctaatgttacaaaaagttatactccagagacccaaagcttgacatttacctaatgtatgagaaaatattaccaattaacaataaagaatgatcatatttttaacctcttttacatagcctaataactcagcaaggcctcaacgtctgtgctaatttaaactgccaaatattgactgcagcaaacaagaattatattcagaatttatgagggtactgttaggagtatactgcttacaggtttagatatagtctgttagaattaaaaccaagtttagtgttcatatttacctcatgggctttatcaagcccatattacctcagcttatatatagttaccatttttaggtttttaattgtttgacacttggatgataaatgcagtcattttattctcaagtgcttaaaattaatgtaattaaaagcttagctgactacagaataggtgagggtttcttaaaaatgagatttaagggctgggcacggtggctcatgcctgtaatcccagcactttgggaggccgaggtgggcggatcacttgaggttgggagttcatgaccagcttgaccaacatgaagaaaccctgtctctattaaaaatacaaaagtagccaggcatggtggcgcatgcgtgtaatcccagctacttgggaggctgaggcaggagaattgcttgaacctgggaggcagaggttgcagtgagtcgagatggtgccattgctctcgtttgggcaacaagagtgaaactcttgtctcaaaaaaaaaaaaaatgaggtttaagacagttttgtcattactggtgggatctggtcacacaagatagcattaaacgtgacatggcacataaaattggttaaaaaattttgttttttaattacgtaatgtaaaagcccaacaaacactttatgcaagattggaatgtatcttcaaattcagatttaataaacatgtaaagatcctctgta

SEQ ID NO: 357760 - DNA, 3494 bp, Homo sapiens
agctccggctccgccgccacgattggccagccgaccacccggcctcggccaataagcgccgccctctcgcccccgtgttactgggtagaagaaaacaaaaacaaacagagcgagaagggccagagactctccgaggcggcggcagagacagaagagcggggtcggggccggctgaccaggaacctgggcgagcagcggcgggggcccgagggatcctgataacttaagtgactctctcttttccggtgatgaagaaaatgctgggactgaggaagtaaagaatgaaataaatggaaattggatttcagcatcctccattaacgaagctagaattaatgccaaggcaaaaaggcgactaaggaaaaactcatcccgggactctggcagaggcgattcggtcagcgacagtgggagtgacgcccttagaagtggattaactgtgccaaccagtccaaagggaaggttgctggataggcgatccagatctgggaaaggaaggggactaccaaagaaaggtggtgcaggaggcaaaggtgtctggggtacacctggacaggtgtatgatgtggaggaggtggatgtgaaagatcctaactatgatgatgaccaggagaactgtgtttatgaaactgtagttttgcctttggatgaaagggcatttgagaagactttaacaccaatcatacaggaatattttgagcatggagatactaatgaagttgcggaaatgttaagagatttaaatcttggtgaaatgaaaagtggagtaccagtgttggcagtatccttagcattggaggggaaggctagtcatagagagatgacatctaagcttctttctgacctttgtgggacagtaatgagcacaactgatgtggaaaaatcatttgataaattgttgaaagatctacctgaattagcactggatactcctagagcaccacagttggtgggccagtttattgctagagctgttggagatggaattttatgtaatacctatattgatagttacaaaggaactgtagattgtgtgcaggctagagctgctctggataaggctaccgtgcttctgagtatgtctaaaggtggaaagcgtaaagatagtgtgtggggctctggaggtgggcagcaatctgtcaatcaccttgttaaagagattgatatgctgctgaaagaatatttactctctggagacatatctgaagctgaacattgccttaaggaactggaagtacctcattttcaccatgagcttgtatatgaagctattataatggttttagagtcaactggagaaagtacatttaagatgattttggatttattaaagtccctttggaagtcttctaccattactgtagaccaaatgaaaagaggttatgagagaatttacaatgaaattccggacattaatctggatgtcccacattcatactctgtgctggagcggtttgtagaagaatgttttcaggctggaataatttccaaacaactcagagatctttgtccttcaaggggcagaaagcgttttgtaagcgaaggagatggaggtcgtcttaaaccagagagctactgaatataagaactcttgcagtcttagatgttataaaaatatatatctgaattgtaagagttgttagcacaagtttttttttttttttttttaagcacttgttttgggtacaaggcatttctgacattttataaacctacatttaaggggaatttttaaaggaaatgttttttctttttttttgtttttcgagggggcaaggagggacagaaaagtaacctcttcttaagtggaatattctaataagctaccttttgtaagtgccatgtttattatctaatcattccaagttttgcattgatgtctgactgccactcctttctttcaaggacagtgttttttgtagtaaaatcactggtttatacaaagctttatttagggggtaaagttaagctgctaaaaccccatgttggctgctgctgttgagatactgtgctttgggagtaaaaaaagaaagttatttctttgtcttaaagaatttttaaaaaattagtcatgagacttattcatctttccagggaacatactgattggtcttaaaagactagacagttaagtaaaaggtggctggaacatctatttttctacaaaactggaaaaatgaacctggttctagaagaatgtacaccaaaataaaacatgtgaagcagtattgattctttattgggagtacatttttttaggtctcttaaactttaatttcacacagtaaattttgaatctcataaggaagcatatttgaacctagtcaatttaatcttagtgttcccttgaaaactttttttccctacaaaattttaagtgaaaaatacaatagtaaattaagattacactggggaaaaaaatgcaggtatcactttactccattgttatctgacctagagcttaattaagttttagaaatatgtaataccttccatcattccatcatccttaaattctgttaccaaataatggctaatgttacaaaaagttatactccagagacccaaagcttgacatttacctaatgtatgagaaaatattaccaattaacaataaagaatgatcatatttttaacctcttttacatagcctaataactcagcaaggcctcaacgtctgtgctaatttaaactgccaaatattgactgcagcaaacaagaattatattcagaatttatgagggtactgttaggagtatactgcttacaggtttagatatagtctgttagaattaaaaccaagtttagtgttcatatttacctcatgggctttatcaagcccatattacctcagcttatatatagttaccatttttaggtttttaattgtttgacacttggatgataaatgcagtcattttattctcaagtgcttaaaattaatgtaattaaaagcttagctgactacagaataggtgagggtttcttaaaaatgagatttaagggctgggcacggtggctcatgcctgtaatcccagcactttgggaggccgaggtgggcggatcacttgaggttgggagttcatgaccagcttgaccaacatgaagaaaccctgtctctattaaaaatacaaaagtagccaggcatggtggcgcatgcgtgtaatcccagctacttgggaggctgaggcaggagaattgcttgaacctgggaggcagaggttgcagtgagtcgagatggtgccattgctctcgtttgggcaacaagagtgaaactcttgtctcaaaaaaaaaaaaaatgaggtttaagacagttttgtcattactggtgggatctggtcacacaagatagcattaaacgtgacatggcacataaaattggttaaaaaattttgttttttaattacgtaatgtaaaagcccaacaaacactttatgcaagattggaatgtatcttcaaattcagatttaataaacatgtaaagatcctctgta

SEQ ID NO: 357761 - DNA, 2479 bp, Homo sapiens
agctccggctccgccgccacgattggccagccgaccacccggcctcggccaataagcgccgccctctcgcccccgtgttactgggtagaagaaaacaaaaacaaacagagcgagaagggccagagactctccgaggcggcggcagagacagaagagcggggtcggggccggctgaccaggaacctgggcgagcagcggcgggggcccgagggattctgaaggaagatttccattaggtaatttgtttaatcagtgcaagcgaaattaagggaaaatggatgtagaaaatgagcagatactgaatgtaaaccctgcagatcctgataacttaagtgactctctcttttccggtgatgaagaaaatgctgggactgaggaagtaaagaatgaaataaatggaaattggatttcagcatcctccattaacgaagctagaattaatgccaaggcaaaaaggcgactaaggaaaaactcatcccgggactctggcagaggcgattcggtcagcgacagtgggagtgacgcccttagaagtggattaactgtgccaaccagtccaaagggaaggttgctggataggcgatccagatctgggaaaggaaggggactaccaaagaaaggtggtgcaggaggcaaaggtgtctggggtacacctggacaggtgtatgatgtggaggaggtggatgtgaaagatcctaactatgatgatgaccaggagaactgtgtttatgaaactgtagttttgcctttggatgaaagggcatttgagaagactttaacaccaatcatacaggaatattttgagcatggagatactaatgaagttgcggaaatgttaagagatttaaatcttggtgaaatgaaaagtggagtaccagtgttggcagtatccttagcattggaggggaaggctagtcatagagagatgacatctaagcttctttctgacctttgtgggacagtaatgagcacaactgatgtggaaaaatcatttgataaattgttgaaagatctacctgaattagcactggatactcctagagcaccacagttggtgggccagtttattgctagagctgttggagatggaattttatgtaatacctatattgatagttacaaaggaactgtagattgtgtgcaggctagagctgctctggataaggctaccgtgcttctgagtatgtctaaaggtggaaagcgtaaagatagtgtgtggggctctggaggtgggcagcaatctgtcaatcaccttgttaaagagattgatatgctgctgaaagaatatttactctctggagacatatctgaagctgaacattgccttaaggaactggaagtacctcattttcaccatgagcttgtatatgaagctattataatggttttagagtcaactggagaaagtacatttaagatgattttggatttattaaagtccctttggaagtcttctaccattactgtagaccaaatgaaaagaggttatgagagaatttacaatgaaattccggacattaatctggatgtcccacattcatactctgtgctggagcggtttgtagaagaatgttttcaggctggaataatttccaaacaactcagagatctttgtccttcaaggggcagaaagcgttttgtaagcgaaggagatggaggtcgtcttaaaccagagagctactgaatataagaactcttgcagtcttagatgttataaaaatatatatctgaattgtaagagttgttagcacaagtttttttttttttttttttaagcacttgttttgggtacaaggcatttctgacattttataaacctacatttaaggggaatttttaaaggaaatgttttttctttttttttgtttttcgagggggcaaggagggacagaaaagtaacctcttcttaagtggaatattctaataagctaccttttgtaagtgccatgtttattatctaatcattccaagttttgcattgatgtctgactgccactcctttctttcaaggacagtgttttttgtagtaaaatcactggtttatacaaagctttatttagggggtaaagttaagctgctaaaaccccatgttggctgctgctgttgagatactgtgctttgggagtaaaaaaagaaagttatttctttgtcttaaagaatttttaaaaaattagtcatgagacttattcatctttccagggaacatactgattggtcttaaaagactagacagttaagtaaaaggtggctggaacatctatttttctacaaaactggaaaaatgaacctggttctagaagaatgtacaccaaaataaaacatgtgaagcagtattgattctttattgggagtacatttttttaggtctcttaaactttaatttcacacagtaaattttgaatctcaacagcaccagacacatggggttttagcagcttaactttaccccctacataaagctttgtaaaacccgtgattg

SEQ ID NO: 357762 - DNA, 4177 bp, Homo sapiens
tttttaggctgaagccagtcacaagttgtaaatatagcagtcccctcttatccgtggtttcactttccgcagtttcagttacccatggtccaatgtggtttgaaaatattgagtggaaactttcagaagtaattcataagttttaaattgcatgccattctgagtagtgtgatgagatctcctgctgtccagcttcatccacctcatcctgcccaggatgtgagccattccgttgtccagcgtgtatccgcaatgtatacactactcgtgcattcgtcacatggtagctgtctaggttatcggattgagaaaacagtatttattgggttcggtactatctgtggtttaaggcatcctcggacggggcttggaacataccccttgtagataagggggcactacatttcagagcttttttagcatggggagagaggaatggtttgatgatggatgttaattttctttttgaaatttcaattgaacagtgcttttttccttagagattttttttctgtcactacaacattgatctttgtgttatactttttattataataatgctaatcgtgaaggctttggttcctgcttcatttttttttaaagtgaaattttaattaaaacaccatttatgataggaagccatcatgaaactttttgattactaaaagattggttttgagagagacataaaaattttgagagaaaaaattaacagaagacatgggggttgggagcaaattatgtatttgctgtggttaatgattctaatctatatattggcttattgtattctgattttgtaaaagagcagtgacatataaattctactatttttattatgatttattattattattttttagctttgttgtccaggctggagtgcagtgatgaattatagctcactgcagcctcgaactcttgggcttaagagatccttctgcctcagcttcctgagtagctaggactacaggggcaagctaccatgtctggctaatttttaaaacttttttgtagagacagggtcttgctatgtttcccaggctagtattgaactccaggcctcaagtgaacctcccgcctttgcctcccaaagtgttgggattataggtatgagtctccttgcctggcctagattctatttttatatgcgatcaatgtatgtagcatgtctttgtcttgtgctaagtggggattattaaccacttagaatataaaattgtacaacaatttcacttgtttatttgcattttgttttttataactcttactccaggtcttttcccctcaaaggagaactgtgtttatgaaactgtagttttgcctttggatgaaagggcatttgagaagactttaacaccaatcatacaggaatattttgagcatggagatactaatgaagttgcggaaatgttaagagatttaaatcttggtgaaatgaaaagtggagtaccagtgttggcagtatccttagcattggaggggaaggctagtcatagagagatgacatctaagcttctttctgacctttgtgggacagtaatgagcacaactgatgtggaaaaatcatttgataaattgttgaaagatctacctgaattagcactggatactcctagagcaccacagttggtgggccagtttattgctagagctgttggagatggaattttatgtaatacctatattgatagttacaaaggaactgtagattgtgtgcaggctagagctgctctggataaggctaccgtgcttctgagtatgtctaaaggtggaaagcgtaaagatagtgtgtggggctctggaggtgggcagcaatctgtcaatcaccttgttaaagagattgatatgctgctgaaagaatatttactctctggagacatatctgaagctgaacattgccttaaggaactggaagtacctcattttcaccatgagcttgtatatgaagctattataatggttttagagtcaactggagaaagtacatttaagatgattttggatttattaaagtccctttggaagtcttctaccattactgtagaccaaatgaaaagaggttatgagagaatttacaatgaaattccggacattaatctggatgtcccacattcatactctgtgctggagcggtttgtagaagaatgttttcaggctggaataatttccaaacaactcagagatctttgtccttcaaggggcagaaagcgttttgtaagcgaaggagatggaggtcgtcttaaaccagagagctactgaatataagaactcttgcagtcttagatgttataaaaatatatatctgaattgtaagagttgttagcacaagtttttttttttttttttttaagcacttgttttgggtacaaggcatttctgacattttataaacctacatttaaggggaatttttaaaggaaatgttttttctttttttttgtttttcgagggggcaaggagggacagaaaagtaacctcttcttaagtggaatattctaataagctaccttttgtaagtgccatgtttattatctaatcattccaagttttgcattgatgtctgactgccactcctttctttcaaggacagtgttttttgtagtaaaatcactggtttatacaaagctttatttagggggtaaagttaagctgctaaaaccccatgttggctgctgctgttgagatactgtgctttgggagtaaaaaaagaaagttatttctttgtcttaaagaatttttaaaaaattagtcatgagacttattcatctttccagggaacatactgattggtcttaaaagactagacagttaagtaaaaggtggctggaacatctatttttctacaaaactggaaaaatgaacctggttctagaagaatgtacaccaaaataaaacatgtgaagcagtattgattctttattgggagtacatttttttaggtctcttaaactttaatttcacacagtaaattttgaatctcataaggaagcatatttgaacctagtcaatttaatcttagtgttcccttgaaaactttttttccctacaaaattttaagtgaaaaatacaatagtaaattaagattacactggggaaaaaaatgcaggtatcactttactccattgttatctgacctagagcttaattaagttttagaaatatgtaataccttccatcattccatcatccttaaattctgttaccaaataatggctaatgttacaaaaagttatactccagagacccaaagcttgacatttacctaatgtatgagaaaatattaccaattaacaataaagaatgatcatatttttaacctcttttacatagcctaataactcagcaaggcctcaacgtctgtgctaatttaaactgccaaatattgactgcagcaaacaagaattatattcagaatttatgagggtactgttaggagtatactgcttacaggtttagatatagtctgttagaattaaaaccaagtttagtgttcatatttacctcatgggctttatcaagcccatattacctcagcttatatatagttaccatttttaggtttttaattgtttgacacttggatgataaatgcagtcattttattctcaagtgcttaaaattaatgtaattaaaagcttagctgactacagaataggtgagggtttcttaaaaatgagatttaagggctgggcacggtggctcatgcctgtaatcccagcactttgggaggccgaggtgggcggatcacttgaggttgggagttcatgaccagcttgaccaacatgaagaaaccctgtctctattaaaaatacaaaagtagccaggcatggtggcgcatgcgtgtaatcccagctacttgggaggctgaggcaggagaattgcttgaacctgggaggcagaggttgcagtgagtcgagatggtgccattgctctcgtttgggcaacaagagtgaaactcttgtctcaaaaaaaaaaaaaatgaggtttaagacagttttgtcattactggtgggatctggtcacacaagatagcattaaacgtgacatggcacataaaattggttaaaaaattttgttttttaattacgtaatgtaaaagcccaacaaacactttatgcaagattggaatgtatcttcaaattcagatttaataaacatgtaaagatcctctgta

SEQ ID NO: 357763 - DNA, 3385 bp, Homo sapiens
agctccggctccgccgccacgattggccagccgaccacccggcctcggccaataagcgccgccctctcgcccccgtgttactgggtagaagaaaacaaaaacaaacagagcgagaagggccagagactctccgaggcggcggcagagacagaagagcggggtcggggccggctgaccaggaacctgggcgagcagcggcgggggcccgagggattctgaaggaagatttccattaggtaatttgtttaatcagtgcaagcgaaattaagggaaaatggatgtagaaaatgagcagatactgaatgtaaaccctgcagatcctgataacttaagtgactctctcttttccggtgatgaagaaaatgctgggactgaggaagtaaagaatgaaataaatggaaattggatttcagcatcctccattaacgaagctagaattaatgccaaggcaaaaaggcgactaaggaaaaactcatcccgggactctggcagaggcgattcggtcagcgacagtgggagtgacgcccttagaagtggattaactgtgccaaccagtccaaagggaaggttgctggataggcgatccagatctgggaaaggaaggggactaccaaagaaaggtggtgcaggaggcaaaggtgtctggggtacacctggacaggtgtatgatgtggaggaggtggatgtgaaagatcctaactatgatgatgaccaggagaactgtgtttatgaaactgtagttttgcctttggatgaaagggcatttgagaagactttaacaccaatcatacaggaatattttgagcatggagatactaatgaagttgcggaaatgttaagagatttaaatcttggtgaaatgaaaagtggagtaccagtgttggcagtatccttagcattggaggggaaggctagtcatagagagatgacatctaagcttctttctgacctttgtgggacagtaatgagcacaactgatgtggaaagcgtaaagatagtgtgtggggctctggaggtgggcagcaatctgtcaatcaccttgttaaagagattgatatgctgctgaaagaatatttactctctggagacatatctgaagctgaacattgccttaaggaactggaagtacctcattttcaccatgagcttgtatatgaagctattataatggttttagagtcaactggagaaagtacatttaagatgattttggatttattaaagtccctttggaagtcttctaccattactgtagaccaaatgaaaagaggttatgagagaatttacaatgaaattccggacattaatctggatgtcccacattcatactctgtgctggagcggtttgtagaagaatgttttcaggctggaataatttccaaacaactcagagatctttgtccttcaaggggcagaaagcgttttgtaagcgaaggagatggaggtcgtcttaaaccagagagctactgaatataagaactcttgcagtcttagatgttataaaaatatatatctgaattgtaagagttgttagcacaagtttttttttttttttttttaagcacttgttttgggtacaaggcatttctgacattttataaacctacatttaaggggaatttttaaaggaaatgttttttctttttttttgtttttcgagggggcaaggagggacagaaaagtaacctcttcttaagtggaatattctaataagctaccttttgtaagtgccatgtttattatctaatcattccaagttttgcattgatgtctgactgccactcctttctttcaaggacagtgttttttgtagtaaaatcactggtttatacaaagctttatttagggggtaaagttaagctgctaaaaccccatgttggctgctgctgttgagatactgtgctttgggagtaaaaaaagaaagttatttctttgtcttaaagaatttttaaaaaattagtcatgagacttattcatctttccagggaacatactgattggtcttaaaagactagacagttaagtaaaaggtggctggaacatctatttttctacaaaactggaaaaatgaacctggttctagaagaatgtacaccaaaataaaacatgtgaagcagtattgattctttattgggagtacatttttttaggtctcttaaactttaatttcacacagtaaattttgaatctcataaggaagcatatttgaacctagtcaatttaatcttagtgttcccttgaaaactttttttccctacaaaattttaagtgaaaaatacaatagtaaattaagattacactggggaaaaaaatgcaggtatcactttactccattgttatctgacctagagcttaattaagttttagaaatatgtaataccttccatcattccatcatccttaaattctgttaccaaataatggctaatgttacaaaaagttatactccagagacccaaagcttgacatttacctaatgtatgagaaaatattaccaattaacaataaagaatgatcatatttttaacctcttttacatagcctaataactcagcaaggcctcaacgtctgtgctaatttaaactgccaaatattgactgcagcaaacaagaattatattcagaatttatgagggtactgttaggagtatactgcttacaggtttagatatagtctgttagaattaaaaccaagtttagtgttcatatttacctcatgggctttatcaagcccatattacctcagcttatatatagttaccatttttaggtttttaattgtttgacacttggatgataaatgcagtcattttattctcaagtgcttaaaattaatgtaattaaaagcttagctgactacagaataggtgagggtttcttaaaaatgagatttaagggctgggcacggtggctcatgcctgtaatcccagcactttgggaggccgaggtgggcggatcacttgaggttgggagttcatgaccagcttgaccaacatgaagaaaccctgtctctattaaaaatacaaaagtagccaggcatggtggcgcatgcgtgtaatcccagctacttgggaggctgaggcaggagaattgcttgaacctgggaggcagaggttgcagtgagtcgagatggtgccattgctctcgtttgggcaacaagagtgaaactcttgtctcaaaaaaaaaaaaaatgaggtttaagacagttttgtcattactggtgggatctggtcacacaagatagcattaaacgtgacatggcacataaaattggttaaaaaattttgttttttaattacgtaatgtaaaagcccaacaaacactttatgcaagattggaatgtatcttcaaattcagatttaataaacatgtaaagatcctctgta

SEQ ID NO: 357764 - DNA, 2928 bp, Homo sapiens
tgctggtcacgttaaggatcccccagggtcttttcccctcaaaggagaactgtgtttatgaaactgtagttttgcctttggatgaaagggcatttgagaagactttaacaccaatcatacaggaatattttgagcatggagatactaatgaagttgcggaaatgttaagagatttaaatcttggtgaaatgaaaagtggagtaccagtgttggcagtatccttagcattggaggggaaggctagtcatagagagatgacatctaagcttctttctgacctttgtgggacagtaatgagcacaactgatgtggaaaaatcatttgataaattgttgaaagatctacctgaattagcactggatactcctagagcaccacagttggtgggccagtttattgctagagctgttggagatggaattttatgtaatacctatattgatagttacaaaggaactgtagattgtgtgcaggctagagctgctctggataaggctaccgtgcttctgagtatgtctaaaggtggaaagcgtaaagatagtgtgtggggctctggaggtgggcagcaatctgtcaatcaccttgttaaagagattgatatgctgctgaaagaatatttactctctggagacatatctgaagctgaacattgccttaaggaactggaagtacctcattttcaccatgagcttgtatatgaagctattataatggttttagagtcaactggagaaagtacatttaagatgattttggatttattaaagtccctttggaagtcttctaccattactgtagaccaaatgaaaagaggttatgagagaatttacaatgaaattccggacattaatctggatgtcccacattcatactctgtgctggagcggtttgtagaagaatgttttcaggctggaataatttccaaacaactcagagatctttgtccttcaaggggcagaaagcgttttgtaagcgaaggagatggaggtcgtcttaaaccagagagctactgaatataagaactcttgcagtcttagatgttataaaaatatatatctgaattgtaagagttgttagcacaagtttttttttttttttttttaagcacttgttttgggtacaaggcatttctgacattttataaacctacatttaaggggaatttttaaaggaaatgttttttctttttttttgtttttcgagggggcaaggagggacagaaaagtaacctcttcttaagtggaatattctaataagctaccttttgtaagtgccatgtttattatctaatcattccaagttttgcattgatgtctgactgccactcctttctttcaaggacagtgttttttgtagtaaaatcactggtttatacaaagctttatttagggggtaaagttaagctgctaaaaccccatgttggctgctgctgttgagatactgtgctttgggagtaaaaaaagaaagttatttctttgtcttaaagaatttttaaaaaattagtcatgagacttattcatctttccagggaacatactgattggtcttaaaagactagacagttaagtaaaaggtggctggaacatctatttttctacaaaactggaaaaatgaacctggttctagaagaatgtacaccaaaataaaacatgtgaagcagtattgattctttattgggagtacatttttttaggtctcttaaactttaatttcacacagtaaattttgaatctcataaggaagcatatttgaacctagtcaatttaatcttagtgttcccttgaaaactttttttccctacaaaattttaagtgaaaaatacaatagtaaattaagattacactggggaaaaaaatgcaggtatcactttactccattgttatctgacctagagcttaattaagttttagaaatatgtaataccttccatcattccatcatccttaaattctgttaccaaataatggctaatgttacaaaaagttatactccagagacccaaagcttgacatttacctaatgtatgagaaaatattaccaattaacaataaagaatgatcatatttttaacctcttttacatagcctaataactcagcaaggcctcaacgtctgtgctaatttaaactgccaaatattgactgcagcaaacaagaattatattcagaatttatgagggtactgttaggagtatactgcttacaggtttagatatagtctgttagaattaaaaccaagtttagtgttcatatttacctcatgggctttatcaagcccatattacctcagcttatatatagttaccatttttaggtttttaattgtttgacacttggatgataaatgcagtcattttattctcaagtgcttaaaattaatgtaattaaaagcttagctgactacagaataggtgagggtttcttaaaaatgagatttaagggctgggcacggtggctcatgcctgtaatcccagcactttgggaggccgaggtgggcggatcacttgaggttgggagttcatgaccagcttgaccaacatgaagaaaccctgtctctattaaaaatacaaaagtagccaggcatggtggcgcatgcgtgtaatcccagctacttgggaggctgaggcaggagaattgcttgaacctgggaggcagaggttgcagtgagtcgagatggtgccattgctctcgtttgggcaacaagagtgaaactcttgtctcaaaaaaaaaaaaaatgaggtttaagacagttttgtcattactggtgggatctggtcacacaagatagcattaaacgtgacatggcacataaaattggttaaaaaattttgttttttaattacgtaatgtaaaagcccaacaaacactttatgcaagattggaatgtatcttcaaattcagatttaataaacatgtaaagatcctctgta

SEQ ID NO: 357765 - DNA, 2234 bp, Homo sapiens
agctccggctccgccgccacgattggccagccgaccacccggcctcggccaataagcgccgccctctcgcccccgtgttactgggtagaagaaaacaaaaacaaacagagcgagaagggccagagactctccgaggcggcggcagagacagaagagcggggtcggggccggctgaccaggaacctgggcgagcagcggcgggggcccgagggattctgaaggaagatttccattaggtaatttgtttaatcagtgcaagcgaaattaagggaaaatggatgtagaaaatgagcagatactgaatgtaaaccctgcagatcctgataacttaagtgactctctcttttccggtgatgaagaaaatgctgggactgaggaagtaaagaatgaaataaatggaaattggatttcagcatcctccattaacgaagctagaattaatgccaaggcaaaaaggcgactaaggaaaaactcatcccgggactctggcagaggcgattcggtcagcgacagtgggagtgacgcccttagaagtggattaactgtgccaaccagtccaaagggaaggttgctggataggcgatccagatctgggaaaggaaggggactaccaaagaaaggtggtgcaggaggcaaaggtgtctggggtacacctggacaggtgtatgatgtggaggaggtggatgtgaaagatcctaactatgatgatgaccaggagaactgtgtttatgaaactgtagttttgcctttggatgaaagggcatttgagaagactttaacaccaatcatacaggaatattttgagcatggagatactaatgaagttgcggaaatgttaagagatttaaatcttggtgaaatgaaaagtggagtaccagtgttggcagtatccttagcattggaggggaaggctagtcatagagagatgacatctaagcttctttctgacctttgtgggacagtaatgagcacaactgatgtggaaaaatcatttgataaattgttgaaagatctacctgaattagcactggatactcctagagcaccacagttggtgggccagtttattgctagagctgttggagatggaattttatgtaatacctatattgatagttacaaaggaactgtagattgtgtgcaggctagagctgctctggataaggctaccgtgcttctgagtatgtctaaaggtggaaagcgtaaagatagtgtgtggggctctggaggtgggcagcaatctgtcaatcaccttgttaaagaggctattataatggttttagagtcaactggagaaagtacatttaagatgattttggatttattaaagtccctttggaagtcttctaccattactgtagaccaaatgaaaagaggttatgagagaatttacaatgaaattccggacattaatctggatgtcccacattcatactctgtgctggagcggtttgtagaagaatgttttcaggctggaataatttccaaacaactcagagatctttgtccttcaaggggcagaaagcgttttgtaagcgaaggagatggaggtcgtcttaaaccagagagctactgaatataagaactcttgcagtcttagatgttataaaaatatatatctgaattgtaagagttgttagcacaagtttttttttttttttttttaagcacttgttttgggtacaaggcatttctgacattttataaacctacatttaaggggaatttttaaaggaaatgttttttctttttttttgtttttcgagggggcaaggagggacagaaaagtaacctcttcttaagtggaatattctaataagctaccttttgtaagtgccatgtttattatctaatcattccaagttttgcattgatgtctgactgccactcctttctttcaaggacagtgttttttgtagtaaaatcactggtttatacaaagctttatttagggggtaaagttaagctgctaaaaccccatgttggctgctgctgttgagatactgtgctttgggagtaaaaaaagaaagttatttctttgtcttaaagaatttttaaaaaattagtcatgagacttattcatctttccagggaacatactgattggtcttaaaagactagacagttaagtaaaaggtggctggaacatctatttttctacaaaactggaaaaatgaacctggttctagaagaatgtacaccaaaataaaacatgtgaagcagtattgattctt

SEQ ID NO: 357766 - DNA, 2897 bp, Homo sapiens
  misc_feature (27)..(28): n is a, c, g, or t
cttgaaccgttaccaagtcgcgctcgnnccccttcaaacgcctgcaacacctgaaagggcatttgagaagactttaacaccaatcatacaggaatattttgagcatggagatactaatgaagttgcggaaatgttaagagatttaaatcttggtgaaatgaaaagtggagtaccagtgttggcagtatccttagcattggaggggaaggctagtcatagagagatgacatctaagcttctttctgacctttgtgggacagtaatgagcacaactgatgtggaaaaatcatttgataaattgttgaaagatctacctgaattagcactggatactcctagagcaccacagttggtgggccagtttattgctagagctgttggagatggaattttatgtaatacctatattgatagttacaaaggaactgtagattgtgtgcaggctagagctgctctggataaggctaccgtgcttctgagtatgtctaaaggtggaaagcgtaaagatagtgtgtggggctctggaggtgggcagcaatctgtcaatcaccttgttaaagagattgatatgctgctgaaagaatatttactctctggagacatatctgaagctgaacattgccttaaggaactggaagtacctcattttcaccatgagcttgtatatgaagctattataatggttttagagtcaactggagaaagtacatttaagatgattttggatttattaaagtccctttggaagtcttctaccattactgtagaccaaatgaaaagaggttatgagagaatttacaatgaaattccggacattaatctggatgtcccacattcatactctgtgctggagcggtttgtagaagaatgttttcaggctggaataatttccaaacaactcagagatctttgtccttcaaggggcagaaagcgttttgtaagcgaaggagatggaggtcgtcttaaaccagagagctactgaatataagaactcttgcagtcttagatgttataaaaatatatatctgaattgtaagagttgttagcacaagtttttttttttttttttttaagcacttgttttgggtacaaggcatttctgacattttataaacctacatttaaggggaatttttaaaggaaatgttttttctttttttttgtttttcgagggggcaaggagggacagaaaagtaacctcttcttaagtggaatattctaataagctaccttttgtaagtgccatgtttattatctaatcattccaagttttgcattgatgtctgactgccactcctttctttcaaggacagtgttttttgtagtaaaatcactggtttatacaaagctttatttagggggtaaagttaagctgctaaaaccccatgttggctgctgctgttgagatactgtgctttgggagtaaaaaaagaaagttatttctttgtcttaaagaatttttaaaaaattagtcatgagacttattcatctttccagggaacatactgattggtcttaaaagactagacagttaagtaaaaggtggctggaacatctatttttctacaaaactggaaaaatgaacctggttctagaagaatgtacaccaaaataaaacatgtgaagcagtattgattctttattgggagtacatttttttaggtctcttaaactttaatttcacacagtaaattttgaatctcataaggaagcatatttgaacctagtcaatttaatcttagtgttcccttgaaaactttttttccctacaaaattttaagtgaaaaatacaatagtaaattaagattacactggggaaaaaaatgcaggtatcactttactccattgttatctgacctagagcttaattaagttttagaaatatgtaataccttccatcattccatcatccttaaattctgttaccaaataatggctaatgttacaaaaagttatactccagagacccaaagcttgacatttacctaatgtatgagaaaatattaccaattaacaataaagaatgatcatatttttaacctcttttacatagcctaataactcagcaaggcctcaacgtctgtgctaatttaaactgccaaatattgactgcagcaaacaagaattatattcagaatttatgagggtactgttaggagtatactgcttacaggtttagatatagtctgttagaattaaaaccaagtttagtgttcatatttacctcatgggctttatcaagcccatattacctcagcttatatatagttaccatttttaggtttttaattgtttgacacttggatgataaatgcagtcattttattctcaagtgcttaaaattaatgtaattaaaagcttagctgactacagaataggtgagggtttcttaaaaatgagatttaagggctgggcacggtggctcatgcctgtaatcccagcactttgggaggccgaggtgggcggatcacttgaggttgggagttcatgaccagcttgaccaacatgaagaaaccctgtctctattaaaaatacaaaagtagccaggcatggtggcgcatgcgtgtaatcccagctacttgggaggctgaggcaggagaattgcttgaacctgggaggcagaggttgcagtgagtcgagatggtgccattgctctcgtttgggcaacaagagtgaaactcttgtctcaaaaaaaaaaaaaatgaggtttaagacagttttgtcattactggtgggatctggtcacacaagatagcattaaacgtgacatggcacataaaattggttaaaaaattttgttttttaattacgtaatgtaaaagcccaacaaacactttatgcaagattggaatgtatcttcaaattcagatttaataaacatgtaaagatcctctgta

SEQ ID NO: 357767 - DNA, 2631 bp, Homo sapiens
agctccggctccgccgccacgattggccagccgaccacccggcctcggccaataagcgccgccctctcgcccccgtgttactgggtagaagaaaacaaaaacaaacagagcgagaagggccagagactctccgaggcggcggcagagacagaagagcggggtcggggccggctgaccaggaacctgggcgagcagcggcgggggcccgagggattctgaaggaagatttccattaggtaatttgtttaatcagtgcaagcgaaattaagggaaaatggatgtagaaaatgagcagatactgaatgtaaaccctgcagatcctgataacttaagtgactctctcttttccggtgatgaagaaaatgctgggactgaggaagtaaagaatgaaataaatggaaattggatttcagcatcctccattaacgaagctagaattaatgccaaggcaaaaaggcgactaaggaaaaactcatcccgggactctggcagaggcgattcggtcagcgacagtgggagtgacgcccttagaagtggattaactgtgccaaccagtccaaagggaaggttgctggataggcgatccagatctgggaaaggaaggggactaccaaagaaaggtggtgcaggaggcaaaggtgtctggggtacacctggacaggtgtatgatgtggaggaggtggatgtgaaagatcctaactatgatgatgaccaggagaactgtgtttatgaaactgtagttttgcctttggatgaaagggcatttgagaagactttaacaccaatcatacaggaatattttgagcatggagatactaatgaagttgcggaaatgttaagagatttaaatcttggtgaaatgaaaagtggagtaccagtgttggcagtatccttagcattggaggggaaggctagtcatagagagatgacatctaagcttctttctgacctttgtgggacagtaatgagcacaactgatgtggaaaaatcatttgataaattgttgaaagatctacctgaattagcactggatactcctagagcaccacagttggtgggccagtttattgctagagctgttggagatggaattttatgtaatacctatattgatagttacaaaggaactgtagattgtgtgcaggctagagctgctctggataaggctaccgtgcttctgagtatgtctaaaggtggaaagcgtaaagatagtgtgtggggctctggaggtgggcagcaatctgtcaatcaccttgttaaagagattgatatgctgctgaaagaatatttactctctggagacatatctgaagctgaacattgccttaaggaactggaagtacctcattttcaccatgagcttgtatatgaagctattataatggttttagagtcaactggagaaagtacatttaagatgattttggatttattaaagtccctttggaagtcttctaccattactgtagaccaaatgaaaagaggttatgagagaatttacaatgaaattccggacattaatctggatgtcccacattcatactctgtgctggagcggtttgtagaagaatgttttcaggctggaataatttccaaacaactcagagatctttgtccttcaaggggcagaaagcgttttgtaagcgaaggagatggaggtcgtcttaaaccagagagctactgaatataagaactcttgcagtcttagatgttataaaaatatatatctgaattgtaagagttgttagcacaagtttttttttttttttttttaagcacttgttttgggtacaaggcatttctgacattttataaacctacatttaaggggaatttttaaaggaaatgttttttctttttttttatgtgtggtttctcgcggagggggccagaggagagggcacagaaaagagttacaccctcttctcttatagagcgtggaaaatatctcataatatagagccataccccttggtggataagtgtgccgagtgtgttatattatactctataatctctattctcccaaagttttgtgccattggaaagtgtctctgtgcactgtgcgcactctcgctttctctttctcagaggacacgaggtgtgttttgtgtggatagtaaaaaactcagcgtggggtttatatatcacaagagctctcttaatttagaggggggcgtcaagaggtttaaagcgcgggcgtctaaaaaacccccagtgtgtgtggccgtgacgtgcgcgtgctgtgagagaaataaacgtgtgggccatgtgagggagagtgtcaaaacagagagacacagagttatcatatcccattgttcgtctttataaagagaaacacttttttatcacacaaacacactttgagtctcctagtgagacgaaactctctattctcataatctgtttctccccgaggggggcaacccctatcaccggtgggagtggtgcggcctcttactaaaagatgacactttatcacaacgcggttatagaagtcttatacaacgaggggggggccgtgggcaaccccatttctcataaatttttatctccatcaacaaaaaacaactgtgggaacaacaaagttggaaaaccccgtggggttcttctttagacaaagaaaat

SEQ ID NO: 357768 - DNA, 2031 bp, Homo sapiens
  misc_feature (47)..(47): n is a, c, g, or t
aaaaaaaaaaaaaaaaaaaaaaaaaaaaaaaaaaaagagatctttgnccttcaaggggcagaaagcgttttgtaagcgaaggagatggaggtcgtcttaaaccagagagctactgaatataagaactcttgcagtcttagatgttataaaaatatatatctgaattgtaagagttgttagcacaagtttttttttttttttttttaagcacttgttttgggtacaaggcatttctgacattttataaacctacatttaaggggaatttttaaaggaaatgttttttctttttttttgtttttcgagggggcaaggagggacagaaaagtaacctcttcttaagtggaatattctaataagctaccttttgtaagtgccatgtttattatctaatcattccaagttttgcattgatgtctgactgccactcctttctttcaaggacagtgttttttgtagtaaaatcactggtttatacaaagctttatttagggggtaaagttaagctgctaaaaccccatgttggctgctgctgttgagatactgtgctttgggagtaaaaaaagaaagttatttctttgtcttaaagaatttttaaaaaattagtcatgagacttattcatctttccagggaacatactgattggtcttaaaagactagacagttaagtaaaaggtggctggaacatctatttttctacaaaactggaaaaatgaacctggttctagaagaatgtacaccaaaataaaacatgtgaagcagtattgattctttattgggagtacatttttttaggtctcttaaactttaatttcacacagtaaattttgaatctcataaggaagcatatttgaacctagtcaatttaatcttagtgttcccttgaaaactttttttccctacaaaattttaagtgaaaaatacaatagtaaattaagattacactggggaaaaaaatgcaggtatcactttactccattgttatctgacctagagcttaattaagttttagaaatatgtaataccttccatcattccatcatccttaaattctgttaccaaataatggctaatgttacaaaaagttatactccagagacccaaagcttgacatttacctaatgtatgagaaaatattaccaattaacaataaagaatgatcatatttttaacctcttttacatagcctaataactcagcaaggcctcaacgtctgtgctaatttaaactgccaaatattgactgcagcaaacaagaattatattcagaatttatgagggtactgttaggagtatactgcttacaggtttagatatagtctgttagaattaaaaccaagtttagtgttcatatttacctcatgggctttatcaagcccatattacctcagcttatatatagttaccatttttaggtttttaattgtttgacacttggatgataaatgcagtcattttattctcaagtgcttaaaattaatgtaattaaaagcttagctgactacagaataggtgagggtttcttaaaaatgagatttaagggctgggcacggtggctcatgcctgtaatcccagcactttgggaggccgaggtgggcggatcacttgaggttgggagttcatgaccagcttgaccaacatgaagaaaccctgtctctattaaaaatacaaaagtagccaggcatggtggcgcatgcgtgtaatcccagctacttgggaggctgaggcaggagaattgcttgaacctgggaggcagaggttgcagtgagtcgagatggtgccattgctctcgtttgggcaacaagagtgaaactcttgtctcaaaaaaaaaaaaaatgaggtttaagacagttttgtcattactggtgggatctggtcacacaagatagcattaaacgtgacatggcacataaaattggttaaaaaattttgttttttaattacgtaatgtaaaagcccaacaaacactttatgcaagattggaatgtatcttcaaattcagatttaataaacatgtaaagatcctctgta

SEQ ID NO: 357769 - DNA, 1168 bp, Homo sapiens
agctccggctccgccgccacgattggccagccgaccacccggcctcggccaataagcgccgccctctcgcccccgtgttactgggtagaagaaaacaaaaacaaacagagcgagaagggccagagactctccgaggcggcggcagagacagaagagcggggtcggggccggctgaccaggaacctgggcgagcagcggcgggggcccgagggattctgaaggaagatttccattaggtaatttgtttaatcagtgcaagcgaaattaagggaaaatggatgtagaaaatgagcagatactgaatgtaaaccctgcagatcctgataacttaagtgactctctcttttccggtgatgaagaaaatgctgggactgaggaagtaaagaatgaaataaatggaaattggatttcagcatcctccattaacgaagctagaattaatgccaaggcaaaaaggcgactaaggaaaaactcatcccgggactctggcagaggcgattcggtcagcgacagtgggagtgacgcccttagaagtggattaactgtgccaaccagtccaaagggaaggttgctggataggcgatccagatctgggaaaggaaggggactaccaaagaaaggtggtgcaggaggcaaaggtgtctggggtacacctggacaggtgtatgatgtggaggaggtggatgtgaaagatcctaactatgatgatgaccaggagaactgtgtttatgaaactgtagttttgcctttggatgaaagggcatttgagaagactttaacaccaatcatacaggaatattttgagcatggagatactaatgaagttgcggaaatgttaagagatttaaatcttggtgaaatgaaaagtggagtaccagtgttggcagtatccttagcattggaggggaaggctagtcatagagagatgacatctaagcttctttctgacctttgtgggacagtaatgagcacaactgatgtggaaaaatcatttgataaattgttgaaagatctacctgaattagcactggatactcctagagcaccacagttggtgggccagtttattgctagagctgttggagatggaattttatgtaatacctatattgatagttacaaaggaactgtagattgtgtgcaggctaggtaagtaaatcacttttcc

SEQ ID NO: 357770 - DNA, 1989 bp, Homo sapiens
tgcagctcgtgccgaattcggcacgaggagagaactagtctcgagtttttttttttcttcattacaggggcagaaagcgttttgtaagcgaaggagatggaggtcgtcttaaaccagagagctactgaatataagaactcttgcagtcttagatgttataaaaatatatatctgaattgtaagagttgttagcacaagtttttttttttttttttttaagcacttgttttgggtacaaggcatttctgacattttataaacctacatttaaggggaatttttaaaggaaatgttttttctttttttttgtttttcgagggggcaaggagggacagcatgtttattatctaatcattccaagttttgcattgatgtctgactgccactcctttctttcaaggacagtgttttttgtagtaaaatcactggtttatacaaagctttatttagggggtaaagttaagctgctaaaaccccatgttggctgctgctgttgagatactgtgctttgggagtaaaaaaagaaagttatttctttgtcttaaagaatttttaaaaaattagtcatgagacttattcatctttccagggaacatactgattggtcttaaaagactagacagttaagtaaaaggtggctggaacatctatttttctacaaaactggaaaaatgaacctggttctagaagaatgtacaccaaaataaaacatgtgaagcagtattgattctttattgggagtacatttttttaggtctcttaaactttaatttcacacagtaaattttgaatctcataaggaagcatatttgaacctagtcaatttaatcttagtgttcccttgaaaactttttttccctacaaaattttaagtgaaaaatacaatagtaaattaagattacactggggaaaaaaatgcaggtatcactttactccattgttatctgacctagagcttaattaagttttagaaatatgtaataccttccatcattccatcatccttaaattctgttaccaaataatggctaatgttacaaaaagttatactccagagacccaaagcttgacatttacctaatgtatgagaaaatattaccaattaacaataaagaatgatcatatttttaacctcttttacatagcctaataactcagcaaggcctcaacgtctgtgctaatttaaactgccaaatattgactgcagcaaacaagaattatattcagaatttatgagggtactgttaggagtatactgcttacaggtttagatatagtctgttagaattaaaaccaagtttagtgttcatatttacctcatgggctttatcaagcccatattacctcagcttatatatagttaccatttttaggtttttaattgtttgacacttggatgataaatgcagtcattttattctcaagtgcttaaaattaatgtaattaaaagcttagctgactacagaataggtgagggtttcttaaaaatgagatttaagggctgggcacggtggctcatgcctgtaatcccagcactttgggaggccgaggtgggcggatcacttgaggttgggagttcatgaccagcttgaccaacatgaagaaaccctgtctctattaaaaatacaaaagtagccaggcatggtggcgcatgcgtgtaatcccagctacttgggaggctgaggcaggagaattgcttgaacctgggaggcagaggttgcagtgagtcgagatggtgccattgctctcgtttgggcaacaagagtgaaactcttgtctcaaaaaaaaaaaaaatgaggtttaagacagttttgtcattactggtgggatctggtcacacaagatagcattaaacgtgacatggcacataaaattggttaaaaaattttgttttttaattacgtaatgtaaaagcccaacaaacactttatgcaagattggaatgtatcttcaaattcagatttaataaacatgtaaagatcctctgta

SEQ ID NO: 357771 - DNA, 299 bp, Homo sapiens
aaagctaacacgtaacgaaaaaataccaagtttttaatttttttatatattgactatagtcagaatttgtatctgttttcatgtctttttttttcttcattacaggggcagaaagcgttttgtaagcgaaggagatggaggtcgtcttaaaccagagagctactgaatataagaactcttgcagtcttagatgttataaaaatatatatctgaattgtaagagttgttagcacaagtttttttttttttttttttaagcacttgttttgggtacaaggcatttctgacattttataaac

SEQ ID NO: 357772 - DNA, 378 bp, Homo sapiens
tggtaaaaacaaacaaatttggtttgtttttggtaagaaacaaacatgctttgttaaaattcagtgccttggtttactttccttgataatgtgaaaagtaatcttatttagttgtttattagattgaagtagatgaaattcccaatatgtgactgtaatttacctacaaaaatggtaatgtcatgtgattcaacctaatctaacttaccactatatctataaaacagtagatacttaaaatacttagaatttttttcttcatttttctctttaagatcctgataacttaagtgactctctcttttccggtgatgaagaaaatgctgggactgaggaagtaaagaatgaaataaatggaaattggatttcagcatcctc

SEQ ID NO: 357773 - DNA, 399 bp, Homo sapiens
ttctcagtgattcagacacactgaagcattgcatttgaatcataattatgaaccatttaaaaattggggatttattttttaattatgaaaaattctgttgtaatagtaccacatccaatgtatatgttattagctgtttgttacccactatttcattatattggaatgagggcaaataatcctgtaggcaagcacgatattttaaaagttaggaattctgacacatctcaacttttaaatctaatagattgatatgctgctgaaagaatatttactctctggagacatatctgaagctgaacattgccttaaggaactggaagtacctcattttcaccatgagcttgtatatgaagtaagattaccttgccatgtcaaagataattattaagtgttcct

SEQ ID NO: 357774 - DNA, 2342 bp, Homo sapiens
agctccggctccgccgccacgattggccagccgaccacccggcctcggccaataagcgccgccctctcgcccccgtgttactgggtagaagaaaacaaaaacaaacagagcgagaagggccagagactctccgaggcggcggcagagacagaagagcggggtcggggccggctgaccaggaacctgggcgagcagcggcgggggcccgagggattctgaaggaagatttccattaggtaatttgtttaatcagtgcaagcgaaattaagggaaaatggatgtagaaaatgagcagatactgaatgtaaaccctgcagatcctgataacttaagtgactctctcttttccggtgatgaagaaaatgctgggactgaggaagtaaagaatgaaataaatggaaattggatttcagcatcctccattaacgaagctagaattaatgccaaggcaaaaaggcgactaaggaaaaactcatcccgggactctggcagaggcgattcggtcagcgacagtgggagtgacgcccttagaagtggattaactgtgccaaccagtccaaagggaaggttgctggataggcgatccagatctgggaaaggaaggggactaccaaagaaaggtggtgcaggaggcaaaggtgtctggggtacacctggacaggtgtatgatgtggaggaggtggatgtgaaagatcctaactatgatgatgaccaggagaactgtgtttatgaaactgtagttttgcctttggatgaaagggcatttgagaagactttaacaccaatcatacaggaatattttgagcatggagatactaatgaagttgcggaaatgttaagagatttaaatcttggtgaaatgaaaagtggagtaccagtgttggcagtatccttagcattggaggggaaggctagtcatagagagatgacatctaagcttctttctgacctttgtgggacagtaatgagcacaactgatgtggaaaaatcatttgataaattgttgaaagatctacctgaattagcactggatactcctagagcaccacagttggtgggccagtttattgctagagctgttggagatggaattttatgtaatacctatattgatagttacaaaggaactgtagattgtgtgcaggctagagctgctctggataaggctaccgtgcttctgagtatgtctaaaggtggaaagcgtaaagatagtgtgtggggctctggaggtgggcagcaatctgtcaatcaccttgttaaagagattgatatgctgctgaaagaatatttactctctggagacatatctgaagctgaacattgccttaaggaactggaagtacctcattttcaccatgagcttgtatatgaagctattataatggttttagagtcaactggagaaagtacatttaagatgattttggatttattaaagtccctttggaagtcttctaccattactgtagaccaaatgaaaagaggttatgagagaatttacaatgaaattccggacattaatctggatgtcccacattcatactctgtgctggagcggtttgtagaagaatgttttcaggctggaataatttccaaacaactcagagatctttgtccttcaaggggcagaaagcgttttgtaagcgaaggagatggaggtcgtcttaaaccagagagctactgaatataagaactcttgcagtcttagatgttataaaaatatatatctgaattgtaagagttgttagcacaagtttttttttttttttttttaagcacttgttttgggtacaaggcatttctgacattttataaacctacatttaaggggaatttttaaaggaaatgttttttctttttttttgtttttcgagggggcaaggagggacagaaaagtaacctcttcttaagtggaatattctaataagctaccttttgtaagtgccatgtttattatctaatcattccaagttttgcattgatgtctgactgccactcctttctttcaaggacagtgttttttgtagtaaaatcactggtttatacaaagctttatttagggggtaaagttaagctgctaaaaccccatgttggctgctgctgttgagatactgtgctttgggagtaaaaaaagaaagttatttctttgtcttaaagaatttttaaaaaattagtcatgagacttattcatctttccagggaacatactgattggtcttaaaagactagacagttaagtaaaaggtggctggaacatctatttttctacaaaactggaaaaatgaacctggttctagaagaatgtacaccaaaataaaacatgtgaagcagtattgattctt

SEQ ID NO: 357775 - DNA, 2740 bp, Homo sapiens
agctccggctccgccgccacgattggccagccgaccacccggcctcggccaataagcgccgccctctcgcccccgtgttactgggtagaagaaaacaaaaacaaacagagcgagaagggccagagactctccgaggcggcggcagagacagaagagcggggtcggggccggctgaccaggaacctgggcgagcagcggcgggggcccgagggattctgaaggaagatttccattaggtaatttgtttaatcagtgcaagcgaaattaagggaaaatggatgtagaaaatgagcagatactgaatgtaaaccctgcagatcctgataacttaagtgactctctcttttccggtgatgaagaaaatgctgggactgaggaagtaaagaatgaaataaatggaaattggatttcagcatcctccattaacgaagctagaattaatgccaaggcaaaaaggcgactaaggaaaaactcatcccgggactctggcagaggcgattcggtcagcgacagtgggagtgacgcccttagaagtggattaactgtgccaaccagtccaaagggaaggttgctggataggcgatccagatctgggaaaggaaggggactaccaaagaaaggtggtgcaggaggcaaaggtgtctggggtacacctggacaggtgtatgatgtggaggaggtggatgtgaaagatcctaactatgatgatgaccaggagaactgtgtttatgaaactgtagttttgcctttggatgaaagggcatttgagaagactttaacaccaatcatacaggaatattttgagcatggagatactaatgaagttgcggaaatgttaagagatttaaatcttggtgaaatgaaaagtggagtaccagtgttggcagtatccttagcattggaggggaaggctagtcatagagagatgacatctaagcttctttctgacctttgtgggacagtaatgagcacaactgatgtggaaaaatcatttgataaattgttgaaagatctacctgaattagcactggatactcctagagcaccacagttggtgggccagtttattgctagagctgttggagatggaattttatgtaatacctatattgatagttacaaaggaactgtagattgtgtgcaggctagagctgctctggataaggctaccgtgcttctgagtatgtctaaaggtggaaagcgtaaagatagtgtgtggggctctggaggtgggcagcaatctgtcaatcaccttgttaaagagattgatatgctgctgaaagaatatttactctctggagacatatctgaagctgaacattgccttaaggaactggaagtacctcattttcaccatgagcttgtatatgaagctattataatggttttagagtcaactggagaaagtacatttaagatgattttggatttattaaagtccctttggaagtcttctaccattactgtagaccaaatgaaaagaggttatgagagaatttacaatgaaattccggacattaatctggatgtcccacattcatactctgtgctggagcggtttgtagaagaatgttttcaggctggaataatttccaaacaactcagagatctttgtccttcaaggggcagaaagcgttttgtaagcgaaggagatggaggtcgtcttaaaccagagagctactgaatataagaactcttgcagtcttagatgttataaaaatatatatctgaattgtaagagttgttagcacaagtttttttttttttttttttaagcacttgttttgggtacaaggcatttctgacattttataaacctacatttaaggggaatttttaaaggaaatgttttttctttttttttgtttttcgagggggcaaggagggacagaaaagtaacctcttcttaagtggaatattctaataagctaccttttgtaagtgccatgtttattatctaatcattccaagttttgcattgatgtctgactgccactcctttctttcaaggacagtgttttttgtagtaaaatcactggtttatacaaagctttatttagggggtaaagttaagctgctaaaaccccatgttggctgctgctgttgagatactgtgctttgggagtaaaaaaagaaagttatttctttgtcttaaagaatttttaaaaaattagtcatgagacttattcatctttccagggaacatactgattggtcttaaaagactagacagttaagtaaaaggtggctggaacatctatttttctacaaaactggaaaaatgaacctggttctagaagaatgtacaccaaaataaaacatgtgaagcagtattgattctttattgggagtacatttttttaggtctcttaaactttaatttcacacagtaaattttgaatctcataaggaagcatatttgaacctagtcaatttaatcttagtgttcccttgaaaactttttttccctacaaaattttaagtgaaaaatacaatagtaaattaagattacactggggaaaaaaatgcaggtatcactttactccattgttatctgacctagagcttaattaagttttagaaatatgtaataccttccatcattccatcatccttaaattctgttaccaaataatggctaatgttacaaaaagttatactccagagacccaaagcttgacatttacctaatgtatgagaaaatattaccaattaacaataaagaatgatcatattttta

SEQ ID NO: 357776 - DNA, 3557 bp, Homo sapiens
agctccggctccgccgccacgattggccagccgaccacccggcctcggccaataagcgccgccctctcgcccccgtgttactgggtagaagaaaacaaaaacaaacagagcgagaagggccagagactctccgaggcggcggcagagacagaagagcggggtcggggccggctgaccaggaacctgggcgagcagcggcgggggcccgagggattctgaaggaagatttccattaggtaatttgtttaatcagtgcaagcgaaattaagggaaaatggatgtagaaaatgagcagatactgaatgtaaaccctgcagaaaatgctgggactgaggaagtaaagaatgaaataaatggaaattggatttcagcatcctccattaacgaagctagaattaatgccaaggcaaaaaggcgactaaggaaaaactcatcccgggactctggcagaggcgattcggtcagcgacagtgggagtgacgcccttagaagtggattaactgtgccaaccagtccaaagggaaggttgctggataggcgatccagatctgggaaaggaaggggactaccaaagaaaggtggtgcaggaggcaaaggtgtctggggtacacctggacaggtgtatgatgtggaggaggtggatgtgaaagatcctaactatgatgatgaccaggagaactgtgtttatgaaactgtagttttgcctttggatgaaagggcatttgagaagactttaacaccaatcatacaggaatattttgagcatggagatactaatgaagttgcggaaatgttaagagatttaaatcttggtgaaatgaaaagtggagtaccagtgttggcagtatccttagcattggaggggaaggctagtcatagagagatgacatctaagcttctttctgacctttgtgggacagtaatgagcacaactgatgtggaaaaatcatttgataaattgttgaaagatctacctgaattagcactggatactcctagagcaccacagttggtgggccagtttattgctagagctgttggagatggaattttatgtaatacctatattgatagttacaaaggaactgtagattgtgtgcaggctagagctgctctggataaggctaccgtgcttctgagtatgtctaaaggtggaaagcgtaaagatagtgtgtggggctctggaggtgggcagcaatctgtcaatcaccttgttaaagagattgatatgctgctgaaagaatatttactctctggagacatatctgaagctgaacattgccttaaggaactggaagtacctcattttcaccatgagcttgtatatgaagctattataatggttttagagtcaactggagaaagtacatttaagatgattttggatttattaaagtccctttggaagtcttctaccattactgtagaccaaatgaaaagaggttatgagagaatttacaatgaaattccggacattaatctggatgtcccacattcatactctgtgctggagcggtttgtagaagaatgttttcaggctggaataatttccaaacaactcagagatctttgtccttcaaggggcagaaagcgttttgtaagcgaaggagatggaggtcgtcttaaaccagagagctactgaatataagaactcttgcagtcttagatgttataaaaatatatatctgaattgtaagagttgttagcacaagtttttttttttttttttttaagcacttgttttgggtacaaggcatttctgacattttataaacctacatttaaggggaatttttaaaggaaatgttttttctttttttttgtttttcgagggggcaaggagggacagaaaagtaacctcttcttaagtggaatattctaataagctaccttttgtaagtgccatgtttattatctaatcattccaagttttgcattgatgtctgactgccactcctttctttcaaggacagtgttttttgtagtaaaatcactggtttatacaaagctttatttagggggtaaagttaagctgctaaaaccccatgttggctgctgctgttgagatactgtgctttgggagtaaaaaaagaaagttatttctttgtcttaaagaatttttaaaaaattagtcatgagacttattcatctttccagggaacatactgattggtcttaaaagactagacagttaagtaaaaggtggctggaacatctatttttctacaaaactggaaaaatgaacctggttctagaagaatgtacaccaaaataaaacatgtgaagcagtattgattctttattgggagtacatttttttaggtctcttaaactttaatttcacacagtaaattttgaatctcataaggaagcatatttgaacctagtcaatttaatcttagtgttcccttgaaaactttttttccctacaaaattttaagtgaaaaatacaatagtaaattaagattacactggggaaaaaaatgcaggtatcactttactccattgttatctgacctagagcttaattaagttttagaaatatgtaataccttccatcattccatcatccttaaattctgttaccaaataatggctaatgttacaaaaagttatactccagagacccaaagcttgacatttacctaatgtatgagaaaatattaccaattaacaataaagaatgatcatatttttaacctcttttacatagcctaataactcagcaaggcctcaacgtctgtgctaatttaaactgccaaatattgactgcagcaaacaagaattatattcagaatttatgagggtactgttaggagtatactgcttacaggtttagatatagtctgttagaattaaaaccaagtttagtgttcatatttacctcatgggctttatcaagcccatattacctcagcttatatatagttaccatttttaggtttttaattgtttgacacttggatgataaatgcagtcattttattctcaagtgcttaaaattaatgtaattaaaagcttagctgactacagaataggtgagggtttcttaaaaatgagatttaagggctgggcacggtggctcatgcctgtaatcccagcactttgggaggccgaggtgggcggatcacttgaggttgggagttcatgaccagcttgaccaacatgaagaaaccctgtctctattaaaaatacaaaagtagccaggcatggtggcgcatgcgtgtaatcccagctacttgggaggctgaggcaggagaattgcttgaacctgggaggcagaggttgcagtgagtcgagatggtgccattgctctcgtttgggcaacaagagtgaaactcttgtctcaaaaaaaaaaaaaatgaggtttaagacagttttgtcattactggtgggatctggtcacacaagatagcattaaacgtgacatggcacataaaattggttaaaaaattttgttttttaattacgtaatgtaaaagcccaacaaacactttatgcaagattggaatgtatcttcaaattcagatttaataaacatgtaaagatcctctgta

SEQ ID NO: 357777 - DNA, 2255 bp, Homo sapiens
agctccggctccgccgccacgattggccagccgaccacccggcctcggccaataagcgccgccctctcgcccccgtgttactgggtagaagaaaacaaaaacaaacagagcgagaagggccagagactctccgaggcggcggcagagacagaagagcggggtcggggccggctgaccaggaacctgggcgagcagcggcgggggcccgagggattctgaaggaagatttccattaggtaatttgtttaatcagtgcaagcgaaattaagggaaaatggatgtagaaaatgagcagatactgaatgtaaaccctgcagatcctgataacttaagtgactctctcttttccggtgatgaagaaaatgctgggactgaggaagtaaagaatgaaataaatggaaattggatttcagcatcctccattaacgaagctagaattaatgccaaggcaaaaaggcgactaaggaaaaactcatcccgggactctggcagaggcgattcggtcagcgacagtgggagtgacgcccttagaagtggattaactgtgccaaccagtccaaagggaaggttgctggataggcgatccagatctgggaaaggaaggggactaccaaagaaaggtggtgcaggaggcaaaggtgtctggggtacacctggacaggtgtatgatgtggaggaggtggatgtgaaagatcctaactatgatgatgaccaggagaactgtgtttatgaaactgtagttttgcctttggatgaaagggcatttgagaagactttaacaccaatcatacaggaatattttgagcatggagatactaatgaagttgcggaaatgttaagagatttaaatcttggtgaaatgaaaagtggagtaccagtgttggcagtatccttagcattggaggggaaggctagtcatagagagatgacatctaagcttctttctgacctttgtgggacagtaatgagcacaactgatgtggaaaaatcatttgataaattgttgaaagatctacctgaattagcactggatactcctagagcaccacagttggtgggccagtttattgctagagctgttggagatggaattttatgtaatacctatattgatagttacaaaggaactgtagattgtgtgcaggctagagctgctctggataaggctaccgtgcttctgagtatgtctaaaggtggaaagcgtaaagatagtgtgtggggctctggaggtgggcagcaatctgtcaatcaccttgttaaagagattgatatgctgctgaaagaatatttactctctggagacatatctgaagctgaacattgccttaaggaactggaagtacctcattttcaccatgagcttgtatatgaagctattataatggttttagagtcaactggagaaagtacatttaagatgattttggatttattaaagtccctttggaagtcttctaccattactgtagaccaaatgaaaagaggttatgagagaatttacaatgaaattccggacattaatctggatgtcccacattcatactctgtgctggagcggtttgtagaagaatgttttcaggctggaataatttccaaacaactcagagatctttgtccttcaaggggcagaaagcgttttgtaagcgaaggagatggaggtcgtcttaaaccagagagctactgaatataagaactcttgcagtcttagatgttataaaaatatatatctgaattgtaagagttgttagcacaagtttttttttttttttttttaagcacttgttttgggtacaaggcatttctgacattttataaacctacatttaaggggaatttttaaaggaaatgttttttctttttttttgtttttcgagggggcaaggagggacagaaaagtaacctcttcttaagtggaatattctaataagctaccttttgtaagtgccatgtttattatctaatcattccaagttttgcattgatgtctgactgccactcctttctttcaaggacagtgttttttgtagtaaaatcactggtttatacaaagctttatttagggggtaaagttaagctgctaaaaccccatgttggctgctgctgttgagatactgtgctttgggagtaaaaaaagaaagttatttctttgtcttaaagaatttttaaaaaattagtcatgagacttattcatctttccagccacctgttacttaactgtctagtcttttaagaccgatcagtatgttccctggaaa

SEQ ID NO: 357778 - DNA, 2222 bp, Homo sapiens
agctccggctccgccgccacgattggccagccgaccacccggcctcggccaataagcgccgccctctcgcccccgtgttactgggtagaagaaaacaaaaacaaacagagcgagaagggccagagactctccgaggcggcggcagagacagaagagcggggtcggggccggctgaccaggaacctgggcgagcagcggcgggggcccgagggattctgaaggaagatttccattaggtaatttgtttaatcagtgcaagcgaaattaagggaaaatggatgtagaaaatgagcagatactgaatgtaaaccctgcagatcctgataacttaagtgactctctcttttccggtgatgaagaaaatgctgggactgaggaagtaaagaatgaaataaatggaaattggatttcagcatcctccattaacgaagctagaattaatgccaaggcaaaaaggcgactaaggaaaaactcatcccgggactctggcagaggcgattcggtcagcgacagtgggagtgacgcccttagaagtggattaactgtgccaaccagtccaaagggaaggttgctggataggcgatccagatctgggaaaggaaggggactaccaaagaaaggtggtgcaggaggcaaaggtgtctggggtacacctggacaggtgtatgatgtggaggaggtggatgtgaaagatcctaactatgatgatgaccaggagaactgtgtttatgaaactgtagttttgcctttggatgaaagggcatttgagaagactttaacaccaatcatacaggaatattttgagcatggagatactaatgaagttgcggaaatgttaagagatttaaatcttggtgaaatgaaaagtggagtaccagtgttggcagtatccttagcattggaggggaaggctagtcatagagagatgacatctaagcttctttctgacctttgtgggacagtaatgagcacaactgatgtggaaaaatcatttgataaattgttgaaagatctacctgaattagcactggatactcctagagcaccacagttggtgggccagtttattgctagagctgttggagatggaattttatgtaatacctatattgatagttacaaaggaactgtagattgtgtgcaggctagagctgctctggataaggctaccgtgcttctgagtatgtctaaaggtggaaagcgtaaagatagtgtgtggggctctggaggtgggcagcaatctgtcaatcaccttgttaaagagattgatatgctgctgaaagaatatttactctctggagacatatctgaagctgaacattgccttaaggaactggaagtacctcattttcaccatgagcttgtatatgaagctattataatggttttagagtcaactggagaaagtacatttaagatgattttggatttattaaagtccctttggaagtcttctaccattactgtagaccaaatgaaaagaggttatgagagaatttacaatgaaattccggacattaatctggatgtcccacattcatactctgtgctggagcggtttgtagaagaatgttttcaggctggaataatttccaaacaactcagagatctttgtccttcaaggggcagaaagcgttttgtaagcgaaggagatggaggtcgtcttaaaccagagagctactgaatataagaactcttgcagtcttagatgttataaaaatatatatctgaattgtaagagttgttagcacaagtttttttttttttttttttaagcacttgttttgggtacaaggcatttctgacattttataaacctacatttaaggggaatttttaaaggaaatgttttttctttttttttgtttttcgagggggcaaggagggacagaaaagtaacctcttcttaagtggaatattctaataagctaccttttgtaagtgccatgtttattatctaatcattccaagttttgcattgatgtctgactgccactcctttctttcaaggacagtgttttttgtagtaaaatcactggtttatacaaagctttatttagggggtaaagttaagctgctaaaaccccatgttggctgctgctgttgagatactgtgctttgggagtaaaaaaagaaacttgtgctaacaactcttacaattcagatatatatttttataacatctaagactgcaagagttcttatattcagtagctctctgg

SEQ ID NO: 357779 - DNA, 2845 bp, Homo sapiens
gactgacctagaggatccccgactagtccaatcatacaggaatattttgagcatggagatactaatgaagttgcggaaatgttaagagatttaaatcttggtgaaatgaaaagtggagtaccagtgttggcagtatccttagcattggaggggaaggctagtcatagagagatgacatctaagcttctttctgacctttgtgggacagtaatgagcacaactgatgtggaaaaatcatttgataaattgttgaaagatctacctgaattagcactggatactcctagagcaccacagttggtgggccagtttattgctagagctgttggagatggaattttatgtaatacctatattgatagttacaaaggaactgtagattgtgtgcaggctagagctgctctggataaggctaccgtgcttctgagtatgtctaaaggtggaaagcgtaaagatagtgtgtggggctctggaggtgggcagcaatctgtcaatcaccttgttaaagagattgatatgctgctgaaagaatatttactctctggagacatatctgaagctgaacattgccttaaggaactggaagtacctcattttcaccatgagcttgtatatgaagctattataatggttttagagtcaactggagaaagtacatttaagatgattttggatttattaaagtccctttggaagtcttctaccattactgtagaccaaatgaaaagaggttatgagagaatttacaatgaaattccggacattaatctggatgtcccacattcatactctgtgctggagcggtttgtagaagaatgttttcaggctggaataatttccaaacaactcagagatctttgtccttcaaggggcagaaagcgttttgtaagcgaaggagatggaggtcgtcttaaaccagagagctactgaatataagaactcttgcagtcttagatgttataaaaatatatatctgaattgtaagagttgttagcacaagtttttttttttttttttttaagcacttgttttgggtacaaggcatttctgacattttataaacctacatttaaggggaatttttaaaggaaatgttttttctttttttttgtttttcgagggggcaaggagggacagaaaagtaacctcttcttaagtggaatattctaataagctaccttttgtaagtgccatgtttattatctaatcattccaagttttgcattgatgtctgactgccactcctttctttcaaggacagtgttttttgtagtaaaatcactggtttatacaaagctttatttagggggtaaagttaagctgctaaaaccccatgttggctgctgctgttgagatactgtgctttgggagtaaaaaaagaaagttatttctttgtcttaaagaatttttaaaaaattagtcatgagacttattcatctttccagggaacatactgattggtcttaaaagactagacagttaagtaaaaggtggctggaacatctatttttctacaaaactggaaaaatgaacctggttctagaagaatgtacaccaaaataaaacatgtgaagcagtattgattctttattgggagtacatttttttaggtctcttaaactttaatttcacacagtaaattttgaatctcataaggaagcatatttgaacctagtcaatttaatcttagtgttcccttgaaaactttttttccctacaaaattttaagtgaaaaatacaatagtaaattaagattacactggggaaaaaaatgcaggtatcactttactccattgttatctgacctagagcttaattaagttttagaaatatgtaataccttccatcattccatcatccttaaattctgttaccaaataatggctaatgttacaaaaagttatactccagagacccaaagcttgacatttacctaatgtatgagaaaatattaccaattaacaataaagaatgatcatatttttaacctcttttacatagcctaataactcagcaaggcctcaacgtctgtgctaatttaaactgccaaatattgactgcagcaaacaagaattatattcagaatttatgagggtactgttaggagtatactgcttacaggtttagatatagtctgttagaattaaaaccaagtttagtgttcatatttacctcatgggctttatcaagcccatattacctcagcttatatatagttaccatttttaggtttttaattgtttgacacttggatgataaatgcagtcattttattctcaagtgcttaaaattaatgtaattaaaagcttagctgactacagaataggtgagggtttcttaaaaatgagatttaagggctgggcacggtggctcatgcctgtaatcccagcactttgggaggccgaggtgggcggatcacttgaggttgggagttcatgaccagcttgaccaacatgaagaaaccctgtctctattaaaaatacaaaagtagccaggcatggtggcgcatgcgtgtaatcccagctacttgggaggctgaggcaggagaattgcttgaacctgggaggcagaggttgcagtgagtcgagatggtgccattgctctcgtttgggcaacaagagtgaaactcttgtctcaaaaaaaaaaaaaatgaggtttaagacagttttgtcattactggtgggatctggtcacacaagatagcattaaacgtgacatggcacataaaattggttaaaaaattttgttttttaattacgtaatgtaaaagcccaacaaacactttatgcaagattggaatgtatcttcaaattcagatttaataaacatgtaaagatcctctgta

SEQ ID NO: 357780 - DNA, 1464 bp, Homo sapiens
agctccggctccgccgccacgattggccagccgaccacccggcctcggccaataagcgccgccctctcgcccccgtgttactgggtagaagaaaacaaaaacaaacagagcgagaagggccagagactctccgaggcggcggcagagacagaagagcggggtcggggccggctgaccaggaacctgggcgagcagcggcgggggcccgagggattctgaaggaagatttccattaggtaatttgtttaatcagtgcaagcgaaattaagggaaaatggatgtagaaaatgagcagatactgaatgtaaaccctgcagatcctgataacttaagtgactctctcttttccggtgatgaagaaaatgctgggactgaggaagtaaagaatgaaataaatggaaattggatttcagcatcctccattaacgaagctagaattaatgccaaggcaaaaaggcgactaaggaaaaactcatcccgggactctggcagaggcgattcggtcagcgacagtgggagtgacgcccttagaagtggattaactgtgccaaccagtccaaagggaaggttgctggataggcgatccagatctgggaaaggaaggggactaccaaagaaaggtggtgcaggaggcaaaggtgtctggggtacacctggacaggtgtatgatgtggaggaggtggatgtgaaagatcctaactatgatgatgaccaggagaactgtgtttatgaaactgtagttttgcctttggatgaaagggcatttgagaagactttaacaccaatcatacaggaatattttgagcatggagatactaatgaagttgcggaaatgttaagagatttaaatcttggtgaaatgaaaagtggagtaccagtgttggcagtatccttagcattggaggggaaggctagtcatagagagatgacatctaagcttctttctgacctttgtgggacagtaatgagcacaactgatgtggaaaaatcatttgataaattgttgaaagatctacctgaattagcactggatactcctagagcaccacagttggtgggccagtttattgctagagctgttggagatggaattttatgtaatacctatattgatagttacaaaggaactgtagattgtgtgcaggctagagctgctctggataaggctaccgtgcttctgagtatgtctaaaggtggaaagcgtaaagatagtgtgtggggctctggaggtgggcagcaatctgtcaatcaccttgttaaagaggtaatgattgggtattgtttttaacttaatttatatgtattcctctgagtgaaataaattgtggctactagctggtatttttatggacaaaaattaagttcggtcttacagctgcaattggaaaatgaaataatttttttaatatgtggctttataaccttttattataaattatatgattaaaaaatgagtctgttaaa

SEQ ID NO: 357781 - DNA, 1337 bp, Homo sapiens
agctccggctccgccgccacgattggccagccgaccacccggcctcggccaataagcgccgccctctcgcccccgtgttactgggtagaagaaaacaaaaacaaacagagcgagaagggccagagactctccgaggcggcggcagagacagaagagcggggtcggggccggctgaccaggaacctgggcgagcagcggcgggggcccgagggattctgaaggaagatttccattaggtaatttgtttaatcagtgcaagcgaaattaagggaaaatggatgtagaaaatgagcagatactgaatgtaaaccctgcagatcctgataacttaagtgactctctcttttccggtgatgaagaaaatgctgggactgaggaagtaaagaatgaaataaatggaaattggatttcagcatcctccattaacgaagctagaattaatgccaaggcaaaaaggcgactaaggaaaaactcatcccgggactctggcagaggcgattcggtcagcgacagtgggagtgacgcccttagaagtggattaactgtgccaaccagtccaaagggaaggttgctggataggcgatccagatctgggaaaggaaggggactaccaaagaaaggtggtgcaggaggcaaaggtgtctggggtacacctggacaggtgtatgatgtggaggaggtggatgtgaaagatcctaactatgatgatgaccaggagaactgtgtttatgaaactgtagttttgcctttggatgaaagggcatttgagaagactttaacaccaatcatacaggaatattttgagcatggagatactaatgaagttgcggaaatgttaagagatttaaatcttggtgaaatgaaaagtggagtaccagtgttggcagtatccttagcattggaggggaaggctagtcatagagagatgacatctaagcttctttctgacctttgtgggacagtaatgagcacaactgatgtggaaaaatcatttgataaattgttgaaagatctacctgaattagcactggatactcctagagcaccacagttggtgggccagtttattgctagagctgttggagatggaattttatgtaatacctatattgatagttacaaaggaactgtagattgtgtgcaggctagcactggacgggcagcctttgaaggctgtggcagacagatgccagcagacaagcactctgctggtggtggaggcaggaggagaggagtgaacgtggtgagtctctggaagcacgttgagcagctctcctcttcttggagctcagggtttttcgatgagtggtggggctgaagctagatgggcagctgac

SEQ ID NO: 357782 - DNA, 938 bp, Homo sapiens
ctagtggtggcttacagtttggtctacttttaaatatttgtatataagttatccttacgttttgcagttttgaatttcacactggtatcttcctgccattcaacttgctttagggttgttggtgttgtgttttgaaagattgtgaagtcgaccttctaaaaatgagttcaaagaaaaatcagtaaagtaaatatcctcctgaaattgtaagtttcttggcaagtagaattttttgtattaacttctgttttaggttatctgcaaactcaagaattgagagaactagacagcataagctcagatttaaggaagataccatttttcatagatatggttttagctgtttttgaattgtgagtgttcagtagcaagcttttcaaagtttttgtaattgtggaaataatgtatgagaaatatttagacagcatctgtttctatttttagactgggctggcttagatgaagatgaagatgcacatgtctgggaggataattgggatgatgacaatgtagaggatgacttctctaatcagttacggtaagttttaagccagatttttattgtagttcagtattaattataagcatggaatatgtaatttacatagatgattaacctcttaaaagctacttaatctttgaaataggtttttgaactgtgtaaagtaagacatattgtcttcatctcctgtgattctaaacatgaacactttgtgtaattgcatacaacttttattctttctggtctttttacaaaggtagtaaaatagaagcatatttgctatttcttatccttaggaatttaattctgtcaatgttaattttctaccaatatcaaataactcagcagaaattagaatcatagagtgctgggacctaatagattggtgattctcaaactggaatggagatagggttccccaggatgtactgtgtca

SEQ ID NO: 357783 - DNA, 822 bp, Homo sapiens
  misc_feature (255)..(255): n is a, c, g, or t
  misc_feature (479)..(479): n is a, c, g, or t
  misc_feature (487)..(487): n is a, c, g, or t
  misc_feature (497)..(497): n is a, c, g, or t
aaactttctagaccattcggttgtgtgcgcggaggctcgatggaggtacaggtgaacactgagtactagtacgcatgatttcctacggagcagtcctggtcatgatctaggtgcattgaatatctcaccaattagaaaacgtcccgggcgggaaacacgatggcgcttgctgatatcaaatgtccagaattggaagtgctgatgtctgttacgtgaattctagtcaataaggaagctccaagtcgaggcatcgantattcataatttacagccccgaagctgaactagagaaacatggttataagatggagacttcatagcatccagaagaagtgttgaagtaacctaaacttgacctgcttaatacattctagggcagagaacccaggatgggacactaaaaaaatgtgtttatttcattatctgcttggatttatttgtgtttttgtaacacaaaaaataaatgttttgatataagnaaaaaaanaaaaaaaaanaaaaaaaaaagggggggggggggcgttatgaaaatttccccggggggggcgcattttatgagctgacccccggtttgtttttgaaaagaaggggcgcccccaattagaggggcggttattaataaggagaaggagggcggcccgattatacaaacgtcggtgggggggagacactgctgtccggagtgatttgtggagaggcccccctcttctggggggggaacaaattggagcacccccccaaagataatagccgcagggaaaaaaaacgcggggtgattgggacccgcgttttcgcggagagagttgctcggatagtggagtc

SEQ ID NO: 357784 - DNA, 883 bp, Homo sapiens
  misc_feature (530)..(530): n is a, c, g, or t
ttccccaagtctctatggtagcgtcagcgtcggaggcggtagtgacggtggcgtttccttgaggaagagtgagggttccaacttttctgcttatctgggaggtgttgggcgcggacagtcgagatgtcagagaaaaagcagccggtagacttaggtctgttagaggaagacgacgagtttgaagagttccctgccgaagactgggctggcttagatgaagatgaagatgcacatgtctgggaggataattgggatgatgacaatgtagaggatgacttctctaatcagttacgagctgaactagagaaacatggttataagatggagacttcatagcatccagaagaagtgttgaagtaacctaaacttgacctgcttaatacattctagggcagagaacccaggatgggacactaaaaaaatgtgtttatttcattatctgcttggatttatttgtgtttttgtaacacaaaaaataaatgttttgatataacaaaaaaaacaaaaaaaaaaaaaaaaaaaaaaaaaanaaaaaaaaaaaaaaaaaaaaagggggggggggctaaaaaatatcaccggggggggcgcccattgggcacccgtttttttggaaaagaggggggcccacaagagggggcgcagtataatcaagcaagaggacagggccgggttgttaaaacaaccgtggagcggggggaaaaacactgactgtcgtggaggcatctggggaaaagaacccacactcgggggggggggacaattaggtggacaacccccagcgaagatatatagcgccgggggaaaaaaacatgagagggtatgcggggcgagcaccgaggtaattgcggcggagaaattggccaaggaaatatagagaaattag

SEQ ID NO: 357785 - DNA, 707 bp, Homo sapiens
  misc_feature (530)..(530): n is a, c, g, or t
  misc_feature (600)..(601): n is a, c, g, or t
ttccccaagtctctatggtagcgtcagcgtcggaggcggtagtgacggtggcgtttccttgaggaagagtgagggttccaacttttctgcttatctgggaggtgttgggcgcggacagtcgagatgtcagagaaaaagcagccggtagacttaggtctgttagaggaagacgacgagtttgaagagttccctgccgaagactgggctggcttagatgaagatgaagatgcacatgtctgggaggataattgggatgatgacaatgtagaggatgacttctctaatcagttacgagctgaactagagaaacatggttataagatggagacttcatagcatccagaagaagtgttgaagtaacctaaacttgacctgcttaatacattctagggcagagaacccaggatgggacactaaaaaaatgtgtttatttcattatctgcttggatttatttgtgtttttgtaacacaaaaaataaatgttttgatataacaaaaaaaacaaaaaaaaaaaaaaaaaaaaaaaaaanaaaaaaaaaaaaaaaaaaaaaaaaaaaaaaaaaagaaaaaaaaaaaaaaaaaaaaaaaaaaaaaaaaaanncctttgggggcccctttggcccagtggttttttaatttggcaaagtttattcctggggcccaatttggggcttctttggccaattcgcccttatggggggggatta

SEQ ID NO: 357786 - DNA, 1096 bp, Homo sapiens
  misc_feature (743)..(743): n is a, c, g, or t
acgttaaagtctttaatccatcttgaattaatttttgtaaaatgtgtaaggaagggatccagtttcagctttctacatatggctagccagttttcccagcaccatttattaaatagggaatcctttccccattgcttgtttttctcaggtttgtcaaagatcagatagttgtagatatgcggcgttatttctgagggctctgttctgttccattgatctatgtctctatggtagcgtcagcgtcggaggcggtagtgacggtggcgtttccttgaggaagagtgagggttccaacttttctgcttatctgggaggtgttgggcgcggacagtcgagatgtcagagaaaaagcagccggtagacttaggtctgttagaggaagacgacgagtttgaagagttccctgccgaagactgggctggcttagatgaagatgaagatgcacatgtctgggaggataattgggatgatgacaatgtagaggatgacttctctaatcagttacgagctgaactagagaaacatggttataagatggagacttcatagcatccagaagaagtgttgaagtaacctaaacttgacctgcttaatacattctagggcagagaacccaggatgggacactaaaaaaatgtgtttatttcattatctgcttggatttatttgtgtttttgtaacacaaaaaataaatgttttgatataacaaaaaaaacaaaaaaaaaaaaaaaaaaaaaaaaaanaaaaaaaaaaaaaaaaaaaaagggggggggggctaaaaaatatcaccggggggggcgcccattgggcacccgtttttttggaaaagaggggggcccacaagagggggcgcagtataatcaagcaagaggacagggccgggttgttaaaacaaccgtggagcggggggaaaaacactgactgtcgtggaggcatctggggaaaagaacccacactcgggggggggggacaattaggtggacaacccccagcgaagatatatagcgccgggggaaaaaaacatgagagggtatgcggggcgagcaccgaggtaattgcggcggagaaattggccaaggaaatatagagaaattag

SEQ ID NO: 357787 - DNA, 963 bp, Homo sapiens
ttccccaagtctctatggtagcgtcagcgtcggaggcggtagtgacggtggcgtttccttgaggaagagtgagggttccaacttttctgcttatctgggaggtgttgggcgcggacagtcgagatgtcagagaaaaagcagccggtagacttaggtctgttagaggaagacgacgagtttgaagagttccctgccgaagactgggctggcttagatgaagatgaagatgcacatgtctgggaggataattgggatgatgacaatgtagaggatgacttctctaatcagttacgagctgaactagagaaacatggttataagatggagacttcatagcatccagaagaagtgttgaagtaacctaaacttgacctgcttaatacattctagggcagagaacccaggatgggacactaaaaaaatgtgtttatttcattatctgcttggatttatttgtgtttttgtaacacaaaaaataaatgttttgatataatcttggtttggttcagaagtcttaatcttttgcttctaatcaattttcttgtcatgattttccaaaaccttattatatatagatagtaaaatttcatattatgaaattttcttttttttttttaatgttaactgagtgaggctcaggttaaatgatctggagtagatttcacctgattcccaattcagtacttttcttaaaccacatcaattaattgttacttctattttataaggaatttcttttacatcacattgaaccttaatctcttctgtattttgatagcttaggcaacatttgctgacatttataaggtgacctttcaaaacctgtgttttaaaaatattaatcattttaaattgctgtaatttacttagttcctgagccattaataatattattaatggttgttagcgtattattggtacttaaagtccaaagtagtttaatcacagtaagaatggtgtctt

SEQ ID NO: 357788 - DNA, 884 bp, Homo sapiens
  misc_feature (541)..(541): n is a, c, g, or t
  misc_feature (549)..(549): n is a, c, g, or t
  misc_feature (559)..(559): n is a, c, g, or t
ttccccaagtctctatggtagcgtcagcgtcggaggcggtagtgacggtggcgtttccttgaggaagagtgagggttccaacttttctgcttatctgggaggtgttgggcgcggacagtcgagatgtcagagaaaaagcagccggtagacttaggtctgttagaggaagacgacgagtttgaagagttccctgccgaagactgggctggcttagatgaagatgaagatgcacatgtctgggaggataattgggatgatgacaatgtagaggatgacttctctaatcagttacgagctgaactagagaaacatggttataagatggagacttcatagcatccagaagaagtgttgaagtaacctaaacttgacctgcttaatacattctagggcagagaacccaggatgggacactaaaaaaatgtgtttatttcattatctgcttggatttatttgtgtttttgtaacacaaaaaataaatgttttgatataaaaaaaaaaaaaaagaaaaaaaaaaaaaaaaaaaaaaaaaaaaaaaagnaaaaaaanaaaaaaaaanaaaaaaaaaagggggggggggggcgttatgaaaatttccccggggggggcgcattttatgagctgacccccggtttgtttttgaaaagaaggggcgcccccaattagaggggcggttattaataaggagaaggagggcggcccgattatacaaacgtcggtgggggggagacactgctgtccggagtgatttgtggagaggcccccctcttctggggggggaacaaattggagcacccccccaaagataatagccgcagggaaaaaaaacgcggggtgattgggacccgcgttttcgcggagagagttgctcggatagtggagtc

SEQ ID NO: 357789 - DNA, 791 bp, Homo sapiens
ttccccaagtctctatggtagcgtcagcgtcggaggcggtagtgacggtggcgtttccttgaggaagagtgagggttccaacttttctgcttatctgggaggtgttgggcgcggacagtcgagatgtcagagaaaaagcagccggtagacttaggtctgttagaggaagacgacgagtttgaagagttccctgccgaagactgggctggcttagatgaagatgaagatgcacatgtctgggaggataattgggatgatgacaatgtagaggatgacttctctaatcagttacgagctgaactagagaaacatggttataagatggagacttcatagcatccagaagaagtgttgaagtaacctaaacttgacctgcttaatacattctagggcagagaacccaggatgggacactaaaaaaatgtgtttatttcattatctgcttggatttatttgtgtttttgtaacacaaaaaataaatgttttgatataaaaaaaaaaaaaaagaaaaaaaaaaaaaaaaaaaaaaaaaaaaaaaatttttgggcgggttgggccctggaaaaagtttttaaaaccctcgcggtggggcgccgggggcgcccaggaagggaactagcagcacggggccacagcgggctcccaaagaaaacccggggacgggacaaggggctgggctcctcccacaataaaaaaccccggggggaaccgagacggtctggacaatctcaatgggagctcagaggcaaacgggaatctacacacgagactcaagaacccgatatcaatac

SEQ ID NO: 357790 - DNA, 672 bp, Homo sapiens
ttccccaagtctctatggtagcgtcagcgtcggaggcggtagtgacggtggcgtttccttgaggaagagtgagggttccaacttttctgcttatctgggaggtgttgggcgcggacagtcgagatgtcagagaaaaagcagccggtagacttaggtctgttagaggaagacgacgagtttgaagagttccctgccgaagactgggctggcttagatgaagatgaagatgcacatgtctgggaggataattgggatgatgacaatgtagaggatgacttctctaatcagttacgagctgaactagagaaacatggttataagatggagacttcatagcatccagaagaagtgttgaagtaacctaaacttgacctgcttaatacattctagggcagagaacccaggatgggacactaaaaaaatgtgtttatttcattatctgcttggatttatttgtgtttttgtaacacaaaaaataaatgttttgatataaaaaaaaaaaaaaagaaaaaaaaaaaaaaaaaaaaaaaaaaaaaaaatttctttttattattctttgtcccctctgtttgtttgtcggtattctcaaactatgagtgttttatgtttttctcgcgctggtttggttatatctgtcggcgtcccctttctcccgccggcgctaacatttct

SEQ ID NO: 357791 - DNA, 813 bp, Homo sapiens
ttccccaagtctctatggtagcgtcagcgtcggaggcggtagtgacggtggcgtttccttgaggaagagtgagggttccaacttttctgcttatctgggaggtgttgggcgcggacagtcgagatgtcagagaaaaagcagccggtagacttaggtctgttagaggaagacgacgagtttgaagagttccctgccgaagactgggctggcttagatgaagatgaagatgcacatgtctgggaggataattgggatgatgacaatgtagaggatgacttctctaatcagttacgagctgaactagagaaacatggttataagatggagacttcatagcatccagaagaagtgttgaagtaacctaaacttgacctgcttaatacattctagggcagagaacccaggatgggacactaaaaaaatgtgtttatttcattatctgcttggatttatttgtgtttttgtaacacaaaaaataaatgttttgatataaaaaaataaacccttctcccccatttaaaccatgtcggccgcctcggcccatttgattttagacttgagcaggcttatccctgcgacccgtatttagagctcacttggccaattcggcctatggtgaggtcgtttacaattcactggcccgggtttacaccgtggtgacttggaaaaccctggtgtttcccaactaatccggcttgagacattcccctttccaagttggggtaatacgaaaaggccctcaccgttcgcttttcaaagttggaaacctgatggggaatggaattttaccgttatatttagaaaattcacgta

SEQ ID NO: 357792 - DNA, 786 bp, Homo sapiens
ttccccaagtctctatggtagcgtcagcgtcggaggcggtagtgacggtggcgtttccttgaggaagagtgagggttccaacttttctgcttatctgggaggtgttgggcgcggacagtcgagatgtcagagaaaaagcagccggtagacttaggtctgttagaggaagacgacgagtttgaagagttccctgccgaagactgggctggcttagatgaagatgaagatgcacatgtctgggaggataattgggatgatgacaatgtagaggatgacttctctaatcagttacgagctgaactagagaaacatggttataagatggagacttcatagcatccagaagaagtgttgaagtaacctaaacttgacctgcttaatacattctagggcagagaacccaggatgggacactaaaaaaatgtgtttatttcattatctgcttggatttatttgtgtttttgtaacacaaaaaataaatgttttgatataaaaaaaaaaaaaaaaaaaaccccgaaactagttctctctctctctctttcaccccgggttgaggcactggcgggtatgggggggcataagcttggtccacaaccagctcaatcagcgcactctgacctgggtggaaagctcggggggaccccagggactcactaccacgcaggagcgggaagaagcagatgtacccaggggattcctccaacagcagagggctccaggaacagcacgagccccaccattttacaccaaacggtctgactgggggccaccgtgccgaacagagac

SEQ ID NO: 357793 - DNA, 664 bp, Homo sapiens
ttctctaagccagcccagtcttcggcagggaactcttcaaactcgtcgtcttcctctaacagacctaagtcaacttttctgcttatctgggaggtgttgggcgcggacagtcgagatgtcagagaaaaagcagccggtagacttaggtctgttagaggaagacgacgagtttgaagagttccctgccgaagactgggctggcttagatgaagatgaagatgcacatgtctgggaggataattgggatgatgacaatgtagaggatgacttctctaatcagttacgagctgaactagagaaacatggttataagatggagacttcatagcatccagaagaagtgttgaagtaacctaaacttgacctgcttaatacattctagggcagagaacccaggatgggacactaaaaaaatgtgtttatttcattatctgcttggatttatttgtgtttttgtaacacaaaaaataaatgttttgatataaaaaaaaaaaaaaagaaaaaaaaaaaaaaaaaaaaaaaaaaaaaaaatttctttttattattctttgtcccctctgtttgtttgtcggtattctcaaactatgagtgttttatgtttttctcgcgctggtttggttatatctgtcggcgtcccctttctcccgccggcgctaacatttct

SEQ ID NO: 357794 - DNA, 1208 bp, Homo sapiens
ctagtggtggcttacagtttggtctacttttaaatatttgtatataagttatccttacgttttgcagttttgaatttcacactggtatcttcctgccattcaacttgctttagggttgttggtgttgtgttttgaaagattgtgaagtcgaccttctaaaaatgagttcaaagaaaaatcagtaaagtaaatatcctcctgaaattgtaagtttcttggcaagtagaattttttgtattaacttctgttttaggttatctgcaaactcaagaattgagagaactagacagcataagctcagatttaaggaagataccatttttcatagatatggttttagctgtttttgaattgtgagtgttcagtagcaagcttttcaaagtttttgtaattgtggaaataatgtatgagaaatatttagacagcatctgtttctatttttagactgggctggcttagatgaagatgaagatgcacatgtctgggaggataattgggatgatgacaatgtagaggatgacttctctaatcagttacgagctgaactagagaaacatggttataagatggagacttcatagcatccagaagaagtgttgaagtaacctaaacttgacctgcttaatacattctagggcagagaacccaggatgggacactaaaaaaatgtgtttatttcattatctgcttggatttatttgtgtttttgtaacacaaaaaataaatgttttgatataatcttggtttggttcagaagtcttaatcttttgcttctaatcaattttcttgtcatgattttccaaaaccttattatatatagatagtaaaatttcatattatgaaattttcttttttttttttaatgttaactgagtgaggctcaggttaaatgatctggagtagatttcacctgattcccaattcagtacttttcttaaaccacatcaattaattgttacttctattttataaggaatttcttttacatcacattgaaccttaatctcttctgtattttgatagcttaggcaacatttgctgacatttataaggtgacctttcaaaacctgtgttttaaaaatattaatcattttaaattgctgtaatttacttagttcctgagccattaataatattattaatggttgttagcgtattattggtacttaaagtccaaagtagtttaatcacagtaagaatggtgtctt

SEQ ID NO: 357795 - DNA, 1107 bp, Homo sapiens
actcttgaggacaaggaccttctctggacacagatatgcctcagagtaactgttgcatagcattcagacactgctggttgaattgtccatttacttggcatgcaacacatggcaaagtaaagggggaaggagattttctgctgcatgtggctttaaccaagagagcagatccagctgagcttagaacaatatttttgaagtatgcaagcattgagaaaaacggtgaatttttcatgtcccccaatgactttgtcactcgatacttgaacatttttggagaaagccagcctaatccaaagactgtggaacttttaagtggagtggtggatcagaccaaagatggactgggctggcttagatgaagatgaagatgcacatgtctgggaggataattgggatgatgacaatgtagaggatgacttctctaatcagttacgagctgaactagagaaacatggttataagatggagacttcatagcatccagaagaagtgttgaagtaacctaaacttgacctgcttaatacattctagggcagagaacccaggatgggacactaaaaaaatgtgtttatttcattatctgcttggatttatttgtgtttttgtaacacaaaaaataaatgttttgatataatcttggtttggttcagaagtcttaatcttttgcttctaatcaattttcttgtcatgattttccaaaaccttattatatatagatagtaaaatttcatattatgaaattttcttttttttttttaatgttaactgagtgaggctcaggttaaatgatctggagtagatttcacctgattcccaattcagtacttttcttaaaccacatcaattaattgttacttctattttataaggaatttcttttacatcacattgaaccttaatctcttctgtattttgatagcttaggcaacatttgctgacatttataaggtgacctttcaaaacctgtgttttaaaaatattaatcattttaaattgctgtaatttacttagttcctgagccattaataatattattaatggttgttagcgtattattggtacttaaagtccaaagtagtttaatcacagtaagaatggtgtctt

SEQ ID NO: 357796 - DNA, 692 bp, Homo sapiens
acgttaaagtctttaatccatcttgaattaatttttgtaaaatgtgtaaggaagggatccagtttcagctttctacatatggctagccagttttcccagcaccatttattaaatagggaatcctttccccattgcttgtttttctcaggtttgtcaaagatcagatagttgtagatatgcggcgttatttctgagggctctgttctgttccattgatctatgtctctatggtagcgtcagcgtcggaggcggtagtgacggtggcgtttccttgaggaagagtgagggttccaacttttctgcttatctgggaggtgttgggcgcggacagtcgagatgtcagagaaaaagcagccggtagacttaggtctgttagaggaagacgacgagtttgaagagttccctgccgaagactgggctggcttagatgaagatgaagatgcacatgtctgggaggataattgggatgatgacaatgtagaggatgacttctctaatcagttacgagctgaactagagaaacatggttataagatggagacttcatagcatccagaagaagtgttgaagtaacctaaactttgaacccctttggggcccctttttttttttttaaaaaaaaaatttttttaaaaccccccaaaaaatttttttttttttctagggcagagaacccaggatgggacactaaa

SEQ ID NO: 357797 - DNA, 861 bp, Homo sapiens
gatcattatctgagagaagaatccaggcgccacggtgtaacagctgcctcagccatgattgtaagtttcctgaggcctccccagccacacagaaccgactgggctggcttagatgaagatgaagatgcacatgtctgggaggataattgggatgatgacaatgtagaggatgacttctctaatcagttacgagctgaactagagaaacatggttataagatggagacttcatagcatccagaagaagtgttgaagtaacctaaacttgacctgcttaatacattctagggcagagaacccaggatgggacactaaaaaaatgtgtttatttcattatctgcttggatttatttgtgtttttgtaacacaaaaaataaatgttttgatataatcttggtttggttcagaagtcttaatcttttgcttctaatcaattttcttgtcatgattttccaaaaccttattatatatagatagtaaaatttcatattatgaaattttcttttttttttttaatgttaactgagtgaggctcaggttaaatgatctggagtagatttcacctgattcccaattcagtacttttcttaaaccacatcaattaattgttacttctattttataaggaatttcttttacatcacattgaaccttaatctcttctgtattttgatagcttaggcaacatttgctgacatttataaggtgacctttcaaaacctgtgttttaaaaatattaatcattttaaattgctgtaatttacttagttcctgagccattaataatattattaatggttgttagcgtattattggtacttaaagtccaaagtagtttaatcacagtaagaatggtgtctt

SEQ ID NO: 357798 - DNA, 816 bp, Homo sapiens
gatcattatctgagagaagaatccaggcgccacggtgtaacagctgcctcagactgggctggcttagatgaagatgaagatgcacatgtctgggaggataattgggatgatgacaatgtagaggatgacttctctaatcagttacgagctgaactagagaaacatggttataagatggagacttcatagcatccagaagaagtgttgaagtaacctaaacttgacctgcttaatacattctagggcagagaacccaggatgggacactaaaaaaatgtgtttatttcattatctgcttggatttatttgtgtttttgtaacacaaaaaataaatgttttgatataatcttggtttggttcagaagtcttaatcttttgcttctaatcaattttcttgtcatgattttccaaaaccttattatatatagatagtaaaatttcatattatgaaattttcttttttttttttaatgttaactgagtgaggctcaggttaaatgatctggagtagatttcacctgattcccaattcagtacttttcttaaaccacatcaattaattgttacttctattttataaggaatttcttttacatcacattgaaccttaatctcttctgtattttgatagcttaggcaacatttgctgacatttataaggtgacctttcaaaacctgtgttttaaaaatattaatcattttaaattgctgtaatttacttagttcctgagccattaataatattattaatggttgttagcgtattattggtacttaaagtccaaagtagtttaatcacagtaagaatggtgtctt

SEQ ID NO: 357799 - DNA, 1202 bp, Homo sapiens
acgttaaagtctttaatccatcttgaattaatttttgtaaaatgtgtaaggaagggatccagtttcagctttctacatatggctagccagttttcccagcaccatttattaaatagggaatcctttccccattgcttgtttttctcaggtttgtcaaagatcagatagttgtagatatgcggcgttatttctgagggctctgttctgttccattgatctatgtctctatggtagcgtcagcgtcggaggcggtagtgacggtggcgtttccttgaggaagagtgagggttccaacttttctgcttatctgggaggtgttgggcgcggacagtcgagatgtcagagaaaaagcagccggtagacttaggtctgttagaggaagacgacgagtttgaagagttccctgccgaagactgggctggcttagatgaagatgaagatgcacatgtctgggaggataattgggatgatgacaatgtagaggatgacttctctaatcagttacggtgatgttctttctgttttatcttagagctgaactagagaaacatggttataagatggagacttcatagcatccagaagaagtgttgaagtaacctaaacttgacctgcttaatacattctagggcagagaacccaggatgggacactaaaaaaatgtgtttatttcattatctgcttggatttatttgtgtttttgtaacacaaaaaataaatgttttgatataatcttggtttggttcagaagtcttaatcttttgcttctaatcaattttcttgtcatgattttccaaaaccttattatatatagatagtaaaatttcatattatgaaattttcttttttttttttaatgttaactgagtgaggctcaggttaaatgatctggagtagatttcacctgattcccaattcagtacttttcttaaaccacatcaattaattgttacttctattttataaggaatttcttttacatcacattgaaccttaatctcttctgtattttgatagcttaggcaacatttgctgacatttataaggtgacctttcaaaacctgtgttttaaaaatattaatcattttaaattgctgtaatttacttagttcctgagccattaataatattattaatggttgttagcgtattattggtacttaaagtccaaagtagtttaatcacagtaagaatggtgtctt

SEQ ID NO: 357800 - DNA, 830 bp, Homo sapiens
acgttaaagtctttaatccatcttgaattaatttttgtaaaatgtgtaaggaagggatccagtttcagctttctacatatggctagccagttttcccagcaccatttattaaatagggaatcctttccccattgcttgtttttctcaggtttgtcaaagatcagatagttgtagatatgcggcgttatttctgagggctctgttctgttccattgatctatgtctctatggtagcgtcagcgtcggaggcggtagtgacggtggcgtttccttgaggaagagtgagggttccaacttttctgcttatctgggaggtgttgggcgcggacagtcgagatgtcagagaaaaagcagccggtagacttaggtctgttagaggaagacgacgagtttgaagagttccctgccgaagactgggctggcttagatgaagatgaagatgcacatgtctgggaggataattgggatgatgacaatgtagaggatgacttctctaatcagttacggatcccaaaatgggtaggctctgtttgaccttgtggaattgttgaagatgcagttctcaacagcatcactagatgttgactccaacatttgtgctgtgtttgctgtacaaggaggaaaagtgggaagaaagcatggcataaaaagggggaggagacccagcataagaagcccagctcagcgggccagaggaccctggatccatgagagtaagcatccggcctttgcaaagcaacagataaacttggagatgcccaactccagagcgacaacagagttagcctgggtctgcaggtaagcagatgacagccacaggaggaaaaaaa

SEQ ID NO: 357801 - DNA, 377 bp, Homo sapiens
  misc_feature (330)..(330): n is a, c, g, or t
tcagctcggtaccctctggatgcaagtgtcggaggcggtagtgacggtggcgtttccttgaggaagagtgagggttccaacttttctgcttatctgggaggtgttgggcgcggacagtcgagatgtcagagaaaaagcagccggtagacttaggtctgttagaggaagacgacgagtttgaagagttccctgccgaagactgggctggcttagatgaagatgaagatgcacatgtctgggaggataattgggatgatgacaatgtagaggatgacttctctaatcagttacgagctgaactagagaaacatggttataagatggacactntgcatccagaggacactttgcatccagaggacactttgcatccagag

SEQ ID NO: 357802 - DNA, 836 bp, Homo sapiens
  misc_feature (24)..(24): n is a, c, g, or t
ctagaggatccctgaacattcgtncaggtctgttagaggaagacgacgagtttgaagagttccctgccgaagactgggctggcttagatgaagatgaagatgcacatgtctgggaggataattgggatgatgacaatgtagaggatgacttctctaatcagttacgagctgaactagagaaacatggttataagatggagacttcatagcatccagaagaagtgttgaagtaacctaaacttgacctgcttaatacattctagggcagagaacccaggatgggacactaaaaaaatgtgtttatttcattatctgcttggatttatttgtgtttttgtaacacaaaaaataaatgttttgatataatcttggtttggttcagaagtcttaatcttttgcttctaatcaattttcttgtcatgattttccaaaaccttattatatatagatagtaaaatttcatattatgaaattttcttttttttttttaatgttaactgagtgaggctcaggttaaatgatctggagtagatttcacctgattcccaattcagtacttttcttaaaccacatcaattaattgttacttctattttataaggaatttcttttacatcacattgaaccttaatctcttctgtattttgatagcttaggcaacatttgctgacatttataaggtgacctttcaaaacctgtgttttaaaaatattaatcattttaaattgctgtaatttacttagttcctgagccattaataatattattaatggttgttagcgtattattggtacttaaagtccaaagtagtttaatcacagtaagaatggtgtctt

SEQ ID NO: 357803 - DNA, 945 bp, Homo sapiens
tcagctcggtaccctctggatgcaagtgtcggaggcggtagtgacggtggcgtttccttgaggaagagtgagggttccaacttttctgcttatctgggaggtgttgggcgcggacagtcgagatgtcagagaaaaagcagccggtagacttaggtctgttagaggaagacgacgagtttgaagagttccctgccgaaagggcaactgtactcctgatgatattggtctgtgaaaccccgtatggctgctatgttctccaccaaaagggaagaatgtgcagtgctttcctctgctgttaacagatcatcaacctgtatgtgttcatggccccacctaaatgtaaagagctgggatgcacaggattggagagctattattgagcactagtcatgtggatatgtgcatggagtcagtaaggagggagtggggtggtgctacagcatttcaggcaaagagagcagcctgggtgaaggtccagcctgggcaaggtaggattatggttagcatactgcagtattgttgggtagtaagagattatgatacttcctgtagctacataacaggggcttacttgaagggtgaccctatttattgtttcagtcaccagtgttcagtggaaagtcatgtctttcatataaaaaggaggtcaggcacagtggctcatgcctgtaatcccagcactttgggagggcaaggcaggtggatcacctgaggtcaggagttcgagaccagcctggccaacatggtgaaacctgtctctactaaaaatataaaaattagccaggcatggtggtgcatgcctgtaatcccagctacttgggaggctgaggcaggacaattgcttgaacccgggaggtggaggttgccgtgagccgagattgcaccactgcatcccagcctgggtgacagagcaagactctgtctcaaaaagaatgaataaaaata

SEQ ID NO: 357804 - DNA, 126 bp, Homo sapiens
gctgcatagagaaagaactctggagacatgcagagaatccctaccttgtattcagaatatccaacccaaagatttacctcactactgattagtacttccatgggaggacactccctatggctgagg

SEQ ID NO: 357805 - DNA, 589 bp, Homo sapiens
gcccaggcgggtctgcactgctgctgctgggaggaagggaaagtctgtcttctgtggcatcagcagtgcagagcccgcctggagggatgtgggggctgtgcagggtgcagcgctcaggtggatcctgggaagcagcctctggatgctgagtggagggagccactgagcacagcaaggcaccaaagcccctggagaaaccgccagggcgaggtgcgaccatcatcaggatcaaagcagacggggcgtgggtggggaaggggctctgggaccagaccccccacactactgcgtctttgtttctatcagtctttgtagaagcaggtggtggtggaaattccagcaggtgggtcccgcagaggccctgaggcctcacttttcggatcttctgtcccagatcctgctccctccctgctgagcctggggttcccctggcattggccccagccttctgaaagccggcgctgcagccagaggccgcacgctgcactgtcgcgacgcagagaggcttctgtgcaggctgggatcgggccccatgtctgtgctgtctagtttgtgttcaaaatgtcagaataaacacagaataaatgtt

SEQ ID NO: 357806 - DNA, 669 bp, Homo sapiens
cgcgtggtacccacctcaccccgttgggcctcttcctcaagttctgtacctctctggtctcttccagttttaatctttaaaaagaagaagaagcagcaatgcataagctgagtgattccccgcggaatccaaagctaacagagccaataaggcaccttcgagggcatcccagcccagctactgagccaccagcacagtggtccagaggacgaccttgtgcctagacccaccgggagtcagagccactgcgcatcccggaggcatctctctcaaccgttcgagcttggggcggtggcctcaccccttgagcctcaatttctgcgtccgcagaaggaaccaccacccgagctcacagttaacaatgtcagcgaagcgccgagccggtggctccttgccagaggcctccactcactccagacccctatagcccgtcgctgtcagctgtcaacaaaggatgcgaatgctggccgcttcctgtgggcttcgtgtcacccagaggtgagcccaggccaggatgggggactccagggacctttgccctcaccttgactccataggagaggtgaccaaagaggacttgctgctcaaatctaagggaacctgtcagtcgtgtggggtcaccggaccaaacctatgggcctgtctgcaggtaaaagacccttgtggcca

SEQ ID NO: 357807 - DNA, 4331 bp, Homo sapiens
ccagacggccccacaaccctgcgcgtcgcctcagagggggcgcgcttgactgacaggcggcggcggcgcagttgcgagcgcaggctccttgccagaggcctccactcactccagacccctatagcccgtcgctgtcagctgtcaacaaaggatgcgaatgctggccgcttcctgtgggcttcgtgtcacccagaggtgagcccaggccaggatgggggactccagggacctttgccctcaccttgactccataggagaggtgaccaaagaggacttgctgctcaaatctaagggaacctgtcagtcgtgtggggtcaccggaccaaacctatgggcctgtctgcaggttgcctgcccctatgttggctgcggagaatccttcgctgaccacagcaccattcatgcacaggcaaaaaagcacaacttgaccgtgaacctgaccacgttccgactgtggtgttacgcctgtgagaaggaggtattcctggagcagcggctggcagcccctctgctgggctcctcttccaagttctctgaacaggactccccgccaccctcccaccctctgaaagctgttcctattgctgtggctgatgaaggagagtctgagtcagaggatgatgacctgaaacctcgaggcctcacgggcatgaagaacctcgggaactcctgctacatgaacgccgccctgcaggccctgtccaattgcccgccgctgactcagttcttcttggagtgtggcggcctggtgcgcacagataagaagccagccctgtgcaagagctaccagaagctggtctctgaggtctggcataagaaacggccaagctacgtggtccccaccagtctgtctcatgggatcaagttggtcaacccaatgttccgaggctatgcccagcaggacacccaagagttccttcgctgcctgatggaccagctgcacgaggagctcaaggagccggtggtggccacggtggcgctgacggaggctcgggactcagattcgagtgacacggatgagaaacgggagggtgaccggagcccatcagaagatgagttcttgtcctgtgactcgagcagtgaccggggtgagggtgacgggcaggggcgtggcgggggcagctcgcaggccgagacggagctgctgatcccagatgaggcgggccgagtcatctctgagaaggagcggatgaaggaccgcaagttctcctggggccagcagcgtacaaactcggagcaagtggacgaggacgctgatgtggacactgccatggctgcccttgaccagcccgcggaggcccagcccccgtcaccacggtcctccagcccctgccggacgccagagccggacaatgatgctcacctacgcagctcctctcgcccctgcagccccgtccaccaccacgagggccatgccaagctgtctagcagcccccctcgtgcaagccccgtgaggatggcaccgtcgtacgtgctcaagaaagcccaggtattgagtgctggcagccggaggcggaaggagcagcgctaccgcagcgtcatctcagacatctttgacggctccattctcagcctcgtgcagtgtctcacctgtgaccgggtatccaccacagtggaaacgttccaggacttatcactgcccattcctggaaaggaggacctggccaagctccattcagccatctaccagaatgtgccggccaagccaggcgcctgtggggacagctatgccgcccagggctggctggccttcattgtggagtacatccgacggtttgtggtatcctgtacccccagctggttttgggggcctgtcgtcaccctggaagactgccttgctgccttctttgccgctgatgagttaaagggtgacaacatgtacagctgtgagcggtgtaagaagctgcggaacggagtgaagtactgcaaagtcctgcggttgcccgagatcctgtgcattcacctaaagcgctttcggcacgaggtgatgtactcattcaagatcaacagccacgtctccttccccctcgaggggctcgacctgcgccccttccttgccaaggagtgcacatcccagatcaccacctacgacctcctctcggtcatctgccaccacggcacggcaggcagtgggcactacatcgcctactgccagaacgtgatcaatgggcagtggtacgagtttgatgaccagtacgtcacagaagtccacgagacggtggtgcagaacgccgagggctacgtactcttctacaggaagagcagcgaggaggccatgcgggagcgacagcaggtggtgtccctggccgccatgcgggagcccagcctgctgcggttctacgtgtcccgcgagtggctcaacaagttcaacaccttcgcggagccaggccccatcaccaaccagaccttcctctgctcccacggaggcatcccgccccacaaataccactacatcgacgacctggtggtcatcctgccccagaacgtctgggagcacctgtacaacagattcgggggtggccccgccgtgaaccacctgtacgtgtgctccatctgccaggtggagatcgaggcactggccaagcgcaggaggatcgagatcgacaccttcatcaagttgaacaaggccttccaggccgaggagtcgccgggcgtcatctactgcatcagcatgcagtggttccgggagtgggaggcgttcgtcaaggggaaggacaacgagccccccgggcccattgacaacagcaggattgcacaggtcaaaggaagcggccatgtccagctgaagcagggagctgactacgggcagatttcggaggagacctggacctacctgaacagcctgtatggaggtggccccgagattgccatccgccagagtgtggcgcagccgctgggcccagagaacctgcacggggagcagaagatcgaagccgagacgcgggccgtgtgatctgctgggctagtctccccatgtgccccaccccgcggaaggcgtgtttgtgcccagaagagaggccgggctgctgcagaaccccgccgtgtaaagaggcagaaaagttggtttggtttgcagtaacgctgcaactagaaaatatatgcacttcaggcttgttgaaacgaccaagactctgtgacgttaatttgggtctttgtcctggcagtgcctctgccagtcactgtcatcgttgtgtcccccacaactgtcctcttgctagctcggcccagctttgtccctggagcccgatgctacccctgtcagacagaggctgcggcctgggccagagtcagggagtagctgctgcttcacggcgtctccactgtgcgattggcccggagccccgaagactcggagggagctgctcagggccggtgagcgcagccagaagccctggccagtgaggagctcacaggtcctccctggtggtcccgccgcacctctgcatctcctgggcgtcaccaggaaggctctgaagtcccgggctgctctcagcacttctcctgcagactgaagactctggactcattgctgattggaacaccaggaggaggttggatttctgccagtgggggatgtttctggaggcagctggtcccccacaccgcgtcctgctgagcctgccccctggattggctgtaatttgcctcgaagttcagcagttcatcttcatgggaaatttgctgagcccccaccagggaaccggatgatgaaacagggatacctcacagcttggccatttgaggcaaaggcagcttcccgagctgatgctaaagaagacagactttcccttcctcccagcagcagcagtgcagagcccgcctggagggatgtgggggctgtgcagggtgcagcgctcaggtggatcctgggaagcagcctctggatgctgagtggagggagccactgagcacagcaaggcaccaaagcccctggagaaaccgccagggcgaggtgcgaccatcatcaggatcaaagcagacggggcgtgggtggggaaggggctctgggaccagaccccccacactactgcgtctttgtttctatcagtctttgtagaagcaggtggtggtggaaattccagcaggtgggtcccgcagaggccctgaggcctcacttttcggatcttctgtcccagatcctgctccctccctgctgagcctggggttcccctggcattggccccagccttctgaaagccggcgctgcagccagaggccgcacgctgcactgtcgcgacgcagagaggcttctgtgcaggctgggatcgggccccatgtctgtgctgtctagtttgtgttcaaaatgtcagaataaacacagaataaatgtt

SEQ ID NO: 357808 - DNA, 4419 bp, Homo sapiens
ccagacggccccacaaccctgcgcgtcgcctcagagggggcgcgcttgactgacaggcggcggcggcgcagttgcgagcgcaggctccttgccagaggcctccactcactccagacccctatagcccgtcgctgtcagctgtcaacaaaggatgcgaatgctggccgcttcctgtgggcttcgtgtcacccagaggtgagcccaggccaggatgggggactccagggacctttgccctcaccttgactccataggagaggtgaccaaagaggacttgctgctcaaatctaagggaacctgtcagtcgtgtggggtcaccggaccaaacctatgggcctgtctgcaggttgcctgcccctatgttggctgcggagaatccttcgctgaccacagcaccattcatgcacaggcaaaaaagcacaacttgaccgtgaacctgaccacgttccgactgtggtgttacgcctgtgagaaggaggtattcctggagcagcggctggcagcccctctgctgggctcctcttccaagttctctgaacaggactccccgccaccctcccaccctctgaaagctgttcctattgctgtggctgatgaaggagagtctgagtcagaggatgatgacctgaaacctcgaggcctcacgggcatgaagaacctcgggaactcctgctacatgaacgccgccctgcaggccctgtccaattgcccgccgctgactcagttcttcttggagtgtggcggcctggtgcgcacagataagaagccagccctgtgcaagagctaccagaagctggtctctgaggtctggcataagaaacggccaagctacgtggtccccaccagtctgtctcatgggatcaagttggtcaacccaatgttccgaggctatgcccagcaggacacccaagagttccttcgctgcctgatggaccagctgcacgaggagctcaaggagccggtggtggccacggtggcgctgacggaggctcgggactcagattcgagtgacacggatgagaaacgggagggtgaccggagcccatcagaagatgagttcttgtcctgtgactcgagcagtgaccggggtgagggtgacgggcaggggcgtggcgggggcagctcgcaggccgagacggagctgctgatcccagatgaggcgggccgagtcatctctgagaaggagcggatgaaggaccgcaagttctcctggggccagcagcgtacaaactcggagcaagtggacgaggacgctgatgtggacactgccatggctgcccttgaccagcccgcggaggcccagcccccgtcaccacggtcctccagcccctgccggacgccagagccggacaatgatgctcacctacgcagctcctctcgcccctgcagccccgtccaccaccacgagggccatgccaagctgtctagcagcccccctcgtgcaagccccgtgaggatggcaccgtcgtacgtgctcaagaaagcccaggtattgagtgctggcagccggaggcggaaggagcagcgctaccgcagcgtcatctcagacatctttgacggctccattctcagcctcgtgcagtgtctcacctgtgaccgggtatccaccacagtggaaacgttccaggacttatcactgcccattcctggaaaggaggacctggccaagctccattcagccatctaccagaatgtgccggccaagccaggcgcctgtggggacagctatgccgcccagggctggctggccttcattgtggagtacatccgacggtttgtggtatcctgtacccccagctggttttgggggcctgtcgtcaccctggaagactgccttgctgccttctttgccgctgatgagttaaagggtgacaacatgtacagctgtgagcggtgtaagaagctgcggaacggagtgaagtactgcaaagtcctgcggttgcccgagatcctgtgcattcacctaaagcgctttcggcacgaggtgatgtactcattcaagatcaacagccacgtctccttccccctcgaggggctcgacctgcgccccttccttgccaaggagtgcacatcccagatcaccacctacgacctcctctcggtcatctgccaccacggcacggcaggcagtgggcactacatcgcctactgccagaacgtgatcaatgggcagtggtacgagtttgatgaccagtacgtcacagaagtccacgagacggtggtgcagaacgccgagggctacgtactcttctacaggaagagcagcgaggaggccatgcgggagcgacagcaggtggtgtccctggccgccatgcgggagcccagcctgctgcggttctacgtgtcccgcgagtggctcaacaagttcaacaccttcgcggagccaggccccatcaccaaccagaccttcctctgctcccacggaggcatcccgccccacaaataccactacatcgacgacctggtggtcatcctgccccagaacgtctgggagcacctgtacaacagattcgggggtggccccgccgtgaaccacctgtacgtgtgctccatctgccaggtggagatcgaggcactggccaagcgcaggaggatcgagatcgacaccttcatcaagttgaacaaggccttccaggccgaggagtcgccgggcgtcatctactgcatcagcatgcagtggttccgggagtgggaggcgttcgtcaaggggaaggacaacgagccccccgggcccattgacaacagcaggattgcacaggtcaaaggaagcggccatgtccagctgaagcagggagctgactacgggcagatttcggaggagacctggacctacctgaacagcctgtatggaggtggccccgagattgccatccgccagagtgtggcgcagccgctgggcccagagaacctgcacggggagcagaagatcgaagccgagacgcgggccgtgtgatctgctgggctagtctagcaggtccctgaaagcaccttcctggaggatgtgggagggccctggacatggcccggccccactgctgagtgcccgtgtccccacagccccatgtgccccaccccgcggaaggcgtgtttgtgcccagaagagaggccgggctgctgcagaaccccgccgtgtaaagaggcagaaaagttggtttggtttgcagtaacgctgcaactagaaaatatatgcacttcaggcttgttgaaacgaccaagactctgtgacgttaatttgggtctttgtcctggcagtgcctctgccagtcactgtcatcgttgtgtcccccacaactgtcctcttgctagctcggcccagctttgtccctggagcccgatgctacccctgtcagacagaggctgcggcctgggccagagtcagggagtagctgctgcttcacggcgtctccactgtgcgattggcccggagccccgaagactcggagggagctgctcagggccggtgagcgcagccagaagccctggccagtgaggagctcacaggtcctccctggtggtcccgccgcacctctgcatctcctgggcgtcaccaggaaggctctgaagtcccgggctgctctcagcacttctcctgcagactgaagactctggactcattgctgattggaacaccaggaggaggttggatttctgccagtgggggatgtttctggaggcagctggtcccccacaccgcgtcctgctgagcctgccccctggattggctgtaatttgcctcgaagttcagcagttcatcttcatgggaaatttgctgagcccccaccagggaaccggatgatgaaacagggatacctcacagcttggccatttgaggcaaaggcagcttcccgagctgatgctaaagaagacagactttcccttcctcccagcagcagcagtgcagagcccgcctggagggatgtgggggctgtgcagggtgcagcgctcaggtggatcctgggaagcagcctctggatgctgagtggagggagccactgagcacagcaaggcaccaaagcccctggagaaaccgccagggcgaggtgcgaccatcatcaggatcaaagcagacggggcgtgggtggggaaggggctctgggaccagaccccccacactactgcgtctttgtttctatcagtctttgtagaagcaggtggtggtggaaattccagcaggtgggtcccgcagaggccctgaggcctcacttttcggatcttctgtcccagatcctgctccctccctgctgagcctggggttcccctggcattggccccagccttctgaaagccggcgctgcagccagaggccgcacgctgcactgtcgcgacgcagagaggcttctgtgcaggctgggatcgggccccatgtctgtgctgtctagtttgtgttcaaaatgtcagaataaacacagaataaatgtt

SEQ ID NO: 357809 - DNA, 4508 bp, Homo sapiens
ccagacggccccacaaccctgcgcgtcgcctcagagggggcgcgcttgactgacaggcggcggcggcgcagttgcgagcgcaggctccttgccagaggcctccactcactccagacccctatagcccgtcgctgtcagctgtcaacaaaggatgcgaatgctggccgcttcctgtgggcttcgtgtcacccagaggtgagcccaggccaggatgggggactccagggacctttgccctcaccttgactccataggagaggtgaccaaagaggacttgctgctcaaatctaagggaacctgtcagtcgtgtggggtcaccggaccaaacctatgggcctgtctgcaggttgcctgcccctatgttggctgcggagaatccttcgctgaccacagcaccattcatgcacaggcaaaaaagcacaacttgaccgtgaacctgaccacgttccgactgtggtgttacgcctgtgagaaggaggtattcctggagcagcggctggcagcccctctgctgggctcctcttccaagttctctgaacaggactccccgccaccctcccaccctctgaaagctgttcctattgctgtggctgatgaaggagagtctgagtcagaggatgatgacctgaaacctcgaggcctcacgggcatgaagaacctcgggaactcctgctacatgaacgccgccctgcaggccctgtccaattgcccgccgctgactcagttcttcttggagtgtggcggcctggtgcgcacagataagaagccagccctgtgcaagagctaccagaagctggtctctgaggtctggcataagaaacggccaagctacgtggtccccaccagtctgtctcatgggatcaagttggtcaacccaatgttccgaggctatgcccagcaggacacccaagagttccttcgctgcctgatggaccagctgcacgaggagctcaaggagccggtggtggccacggtggcgctgacggaggctcgggactcagattcgagtgacacggatgagaaacgggagggtgaccggagcccatcagaagatgagttcttgtcctgtgactcgagcagtgaccggggtgagggtgacgggcaggggcgtggcgggggcagctcgcaggccgagacggagctgctgatcccagatgaggcgggccgagtcatctctgagaaggagcggatgaaggaccgcaagttctcctggggccagcagcgtacaaactcggagcaagtggacgaggacgctgatgtggacactgccatggctgcccttgaccagcccgcggaggcccagcccccgtcaccacggtcctccagcccctgccggacgccagagccggacaatgatgctcacctacgcagctcctctcgcccctgcagccccgtccaccaccacgagggccatgccaagctgtctagcagcccccctcgtgcaagccccgtgaggatggcaccgtcgtacgtgctcaagaaagcccaggtattgagtgctggcagccggaggcggaaggagcagcgctaccgcagcgtcatctcagacatctttgacggctccattctcagcctcgtgcagtgtctcacctgtgaccgggtatccaccacagtggaaacgttccaggacttatcactgcccattcctggaaaggaggacctggccaagctccattcagccatctaccagaatgtgccggccaagccaggcgcctgtggggacagctatgccgcccagggctggctggccttcattgtggagtacatccgacggtttgtggtatcctgtacccccagctggttttgggggcctgtcgtcaccctggaagactgccttgctgccttctttgccgctgatgagttaaagggtgacaacatgtacagctgtgagcggtgtaagaagctgcggaacggagtgaagtactgcaaagtcctgcggttgcccgagatcctgtgcattcacctaaagcgctttcggcacgaggtgatgtactcattcaagatcaacagccacgtctccttccccctcgaggggctcgacctgcgccccttccttgccaaggagtgcacatcccagatcaccacctacgacctcctctcggtcatctgccaccacggcacggcaggcagtgggcactacatcgcctactgccagaacgtgatcaatgggcagtggtacgagtttgatgaccagtacgtcacagaagtccacgagacggtggtgcagaacgccgagggctacgtactcttctacaggaagagcagcgaggaggccatgcgggagcgacagcaggtggtgtccctggccgccatgcgggagcccagcctgctgcggttctacgtgtcccgcgagtggctcaacaagttcaacaccttcgcggagccaggccccatcaccaaccagaccttcctctgctcccacggaggcatcccgccccacaaataccactacatcgacgacctggtggtcatcctgccccagaacgtctgggagcacctgtacaacagattcgggggtggccccgccgtgaaccacctgtacgtgtgctccatctgccaggtggagatcgaggcactggccaagcgcaggaggatcgagatcgacaccttcatcaagttgaacaaggccttccaggccgaggagtcgccgggcgtcatctactgcatcagcatgcagtggttccgggagtgggaggcgttcgtcaaggggaaggacaacgagccccccgggcccattgacaacagcaggattgcacaggtcaaaggaagcggccatgtccagctgaagcagggagctgactacgggcagatttcggaggagacctggacctacctgaacagcctgtatggaggtggccccgagattgccatccgccagagtgtggcgcagccgctgggcccagagaacctgcacggggagcagaagatcgaagccgagacgcgggccgtgtgatctgctgggctagtctgtaagtcgccccggctggtccctccatggcactctgggtcctctcctcactctccagagaccctcacatgtccttttgaacatccaaagagcaggtccctgaaagcaccttcctggaggatgtgggagggccctggacatggcccggccccactgctgagtgcccgtgtccccacagccccatgtgccccaccccgcggaaggcgtgtttgtgcccagaagagaggccgggctgctgcagaaccccgccgtgtaaagaggcagaaaagttggtttggtttgcagtaacgctgcaactagaaaatatatgcacttcaggcttgttgaaacgaccaagactctgtgacgttaatttgggtctttgtcctggcagtgcctctgccagtcactgtcatcgttgtgtcccccacaactgtcctcttgctagctcggcccagctttgtccctggagcccgatgctacccctgtcagacagaggctgcggcctgggccagagtcagggagtagctgctgcttcacggcgtctccactgtgcgattggcccggagccccgaagactcggagggagctgctcagggccggtgagcgcagccagaagccctggccagtgaggagctcacaggtcctccctggtggtcccgccgcacctctgcatctcctgggcgtcaccaggaaggctctgaagtcccgggctgctctcagcacttctcctgcagactgaagactctggactcattgctgattggaacaccaggaggaggttggatttctgccagtgggggatgtttctggaggcagctggtcccccacaccgcgtcctgctgagcctgccccctggattggctgtaatttgcctcgaagttcagcagttcatcttcatgggaaatttgctgagcccccaccagggaaccggatgatgaaacagggatacctcacagcttggccatttgaggcaaaggcagcttcccgagctgatgctaaagaagacagactttcccttcctcccagcagcagcagtgcagagcccgcctggagggatgtgggggctgtgcagggtgcagcgctcaggtggatcctgggaagcagcctctggatgctgagtggagggagccactgagcacagcaaggcaccaaagcccctggagaaaccgccagggcgaggtgcgaccatcatcaggatcaaagcagacggggcgtgggtggggaaggggctctgggaccagaccccccacactactgcgtctttgtttctatcagtctttgtagaagcaggtggtggtggaaattccagcaggtgggtcccgcagaggccctgaggcctcacttttcggatcttctgtcccagatcctgctccctccctgctgagcctggggttcccctggcattggccccagccttctgaaagccggcgctgcagccagaggccgcacgctgcactgtcgcgacgcagagaggcttctgtgcaggctgggatcgggccccatgtctgtgctgtctagtttgtgttcaaaatgtcagaataaacacagaataaatgtt

SEQ ID NO: 357810 - DNA, 3653 bp, Homo sapiens
ccagacggccccacaaccctgcgcgtcgcctcagagggggcgcgcttgactgacaggcggcggcggcgcagttgcgagcgcaggctccttgccagaggcctccactcactccagacccctatagcccgtcgctgtcagctgtcaacaaaggatgcgaatgctggccgcttcctgtgggcttcgtgtcacccagaggtgagcccaggccaggatgggggactccagggacctttgccctcaccttgactccataggagaggtgaccaaagaggacttgctgctcaaatctaagggaacctgtcagtcgtgtggggtcaccggaccaaacctatgggcctgtctgcaggttgcctgcccctatgttggctgcggagaatccttcgctgaccacagcaccattcatgcacaggcaaaaaagcacaacttgaccgtgaacctgaccacgttccgactgtggtgttacgcctgtgagaaggaggtattcctggagcagcggctggcagcccctctgctgggctcctcttccaagttctctgaacaggactccccgccaccctcccaccctctgaaagctgttcctattgctgtggctgatgaaggagagtctgagtcagaggatgatgacctgaaacctcgaggcctcacgggcatgaagaacctcgggaactcctgctacatgaacgccgccctgcaggccctgtccaattgcccgccgctgactcagttcttcttggagtgtggcggcctggtgcgcacagataagaagccagccctgtgcaagagctaccagaagctggtctctgaggtctggcataagaaacggccaagctacgtggtccccaccagtctgtctcatgggatcaagttggtcaacccaatgttccgaggctatgcccagcaggacacccaagagttccttcgctgcctgatggaccagctgcacgaggagctcaaggagccggtggtggccacggtggcgctgacggaggctcgggactcagattcgagtgacacggatgagaaacgggagggtgaccggagcccatcagaagatgagttcttgtcctgtgactcgagcagtgaccggggtgagggtgacgggcaggggcgtggcgggggcagctcgcaggccgagacggagctgctgatcccagatgaggcgggccgagtcatctctgagaaggagcggatgaaggaccgcaagttctcctggggccagcagcgtacaaactcggagcaagtggacgaggacgctgatgtggacactgccatggctgcccttgaccagcccgcggaggcccagcccccgtcaccacggtcctccagcccctgccggacgccagtccccctcgaggggctcgacctgcgccccttccttgccaaggagtgcacatcccagatcaccacctacgacctcctctcggtcatctgccaccacggcacggcaggcagtgggcactacatcgcctactgccagaacgtgatcaatgggcagtggtacgagtttgatgaccagtacgtcacagaagtccacgagacggtggtgcagaacgccgagggctacgtactcttctacaggaagagcagcgaggaggccatgcgggagcgacagcaggtggtgtccctggccgccatgcgggagcccagcctgctgcggttctacgtgtcccgcgagtggctcaacaagttcaacaccttcgcggagccaggccccatcaccaaccagaccttcctctgctcccacggaggcatcccgccccacaaataccactacatcgacgacctggtggtcatcctgccccagaacgtctgggagcacctgtacaacagattcgggggtggccccgccgtgaaccacctgtacgtgtgctccatctgccaggtggagatcgaggcactggccaagcgcaggaggatcgagatcgacaccttcatcaagttgaacaaggccttccaggccgaggagtcgccgggcgtcatctactgcatcagcatgcagtggttccgggagtgggaggcgttcgtcaaggggaaggacaacgagccccccgggcccattgacaacagcaggattgcacaggtcaaaggaagcggccatgtccagctgaagcagggagctgactacgggcagatttcggaggagacctggacctacctgaacagcctgtatggaggtggccccgagattgccatccgccagagtgtggcgcagccgctgggcccagagaacctgcacggggagcagaagatcgaagccgagacgcgggccgtgtgatctgctgggctagtctccccatgtgccccaccccgcggaaggcgtgtttgtgcccagaagagaggccgggctgctgcagaaccccgccgtgtaaagaggcagaaaagttggtttggtttgcagtaacgctgcaactagaaaatatatgcacttcaggcttgttgaaacgaccaagactctgtgacgttaatttgggtctttgtcctggcagtgcctctgccagtcactgtcatcgttgtgtcccccacaactgtcctcttgctagctcggcccagctttgtccctggagcccgatgctacccctgtcagacagaggctgcggcctgggccagagtcagggagtagctgctgcttcacggcgtctccactgtgcgattggcccggagccccgaagactcggagggagctgctcagggccggtgagcgcagccagaagccctggccagtgaggagctcacaggtcctccctggtggtcccgccgcacctctgcatctcctgggcgtcaccaggaaggctctgaagtcccgggctgctctcagcacttctcctgcagactgaagactctggactcattgctgattggaacaccaggaggaggttggatttctgccagtgggggatgtttctggaggcagctggtcccccacaccgcgtcctgctgagcctgccccctggattggctgtaatttgcctcgaagttcagcagttcatcttcatgggaaatttgctgagcccccaccagggaaccggatgatgaaacagggatacctcacagcttggccatttgaggcaaaggcagcttcccgagctgatgctaaagaagacagactttcccttcctcccagcagcagcagtgcagagcccgcctggagggatgtgggggctgtgcagggtgcagcgctcaggtggatcctgggaagcagcctctggatgctgagtggagggagccactgagcacagcaaggcaccaaagcccctggagaaaccgccagggcgaggtgcgaccatcatcaggatcaaagcagacggggcgtgggtggggaaggggctctgggaccagaccccccacactactgcgtctttgtttctatcagtctttgtagaagcaggtggtggtggaaattccagcaggtgggtcccgcagaggccctgaggcctcacttttcggatcttctgtcccagatcctgctccctccctgctgagcctggggttcccctggcattggccccagccttctgaaagccggcgctgcagccagaggccgcacgctgcactgtcgcgacgcagagaggcttctgtgcaggctgggatcgggccccatgtctgtgctgtctagtttgtgttcaaaatgtcagaataaacacagaataaatgtt

SEQ ID NO: 357811 - DNA, 2819 bp, Homo sapiens
tgaccccagggagggggtagcatgatcatggccgcaacacagatgaaggaggccaggcttgcggagagatgatgtcactcggcccaggacacggacgtgtctggctccaggcctctgccccgacccgccgtgcccggctgcttctctgggccttcagggtccttctgcggctcaggcctgacagacctcagccagagtcccttcagctcctgttcttgcccaggccctggcagcacccctgcactccttttctgtctgtaggtttgtggtatcctgtacccccagctggttttgggggcctgtcgtcaccctggaagactgccttgctgccttctttgccgctgatgagttaaagggtgacaacatgtacagctgtgagcggtgtaagaagctgcggaacggagtgaagtactgcaaagtcctgcggttgcccgagatcctgtgcattcacctaaagcgctttcggcacgaggtgatgtactcattcaagatcaacagccacgtctccttccccctcgaggggctcgacctgcgccccttccttgccaaggagtgcacatcccagatcaccacctacgacctcctctcggtcatctgccaccacggcacggcaggcagtgggcactacatcgcctactgccagaacgtgatcaatgggcagtggtacgagtttgatgaccagtacgtcacagaagtccacgagacggtggtgcagaacgccgagggctacgtactcttctacaggaagagcagcgaggaggccatgcgggagcgacagcaggtggtgtccctggccgccatgcgggagcccagcctgctgcggttctacgtgtcccgcgagtggctcaacaagttcaacaccttcgcggagccaggccccatcaccaaccagaccttcctctgctcccacggaggcatcccgccccacaaataccactacatcgacgacctggtggtcatcctgccccagaacgtctgggagcacctgtacaacagattcgggggtggccccgccgtgaaccacctgtacgtgtgctccatctgccaggtggagatcgaggcactggccaagcgcaggaggatcgagatcgacaccttcatcaagttgaacaaggccttccaggccgaggagtcgccgggcgtcatctactgcatcagcatgcagtggttccgggagtgggaggcgttcgtcaaggggaaggacaacgagccccccgggcccattgacaacagcaggattgcacaggtcaaaggaagcggccatgtccagctgaagcagggagctgactacgggcagatttcggaggagacctggacctacctgaacagcctgtatggaggtggccccgagattgccatccgccagagtgtggcgcagccgctgggcccagagaacctgcacggggagcagaagatcgaagccgagacgcgggccgtgtgatctgctgggctagtctccccatgtgccccaccccgcggaaggcgtgtttgtgcccagaagagaggccgggctgctgcagaaccccgccgtgtaaagaggcagaaaagttggtttggtttgcagtaacgctgcaactagaaaatatatgcacttcaggcttgttgaaacgaccaagactctgtgacgttaatttgggtctttgtcctggcagtgcctctgccagtcactgtcatcgttgtgtcccccacaactgtcctcttgctagctcggcccagctttgtccctggagcccgatgctacccctgtcagacagaggctgcggcctgggccagagtcagggagtagctgctgcttcacggcgtctccactgtgcgattggcccggagccccgaagactcggagggagctgctcagggccggtgagcgcagccagaagccctggccagtgaggagctcacaggtcctccctggtggtcccgccgcacctctgcatctcctgggcgtcaccaggaaggctctgaagtcccgggctgctctcagcacttctcctgcagactgaagactctggactcattgctgattggaacaccaggaggaggttggatttctgccagtgggggatgtttctggaggcagctggtcccccacaccgcgtcctgctgagcctgccccctggattggctgtaatttgcctcgaagttcagcagttcatcttcatgggaaatttgctgagcccccaccagggaaccggatgatgaaacagggatacctcacagcttggccatttgaggcaaaggcagcttcccgagctgatgctaaagaagacagactttcccttcctcccagcagcagcagtgcagagcccgcctggagggatgtgggggctgtgcagggtgcagcgctcaggtggatcctgggaagcagcctctggatgctgagtggagggagccactgagcacagcaaggcaccaaagcccctggagaaaccgccagggcgaggtgcgaccatcatcaggatcaaagcagacggggcgtgggtggggaaggggctctgggaccagaccccccacactactgcgtctttgtttctatcagtctttgtagaagcaggtggtggtggaaattccagcaggtgggtcccgcagaggccctgaggcctcacttttcggatcttctgtcccagatcctgctccctccctgctgagcctggggttcccctggcattggccccagccttctgaaagccggcgctgcagccagaggccgcacgctgcactgtcgcgacgcagagaggcttctgtgcaggctgggatcgggccccatgtctgtgctgtctagtttgtgttcaaaatgtcagaataaacacagaataaatgtt

SEQ ID NO: 357812 - DNA, 3974 bp, Homo sapiens
ccagacggccccacaaccctgcgcgtcgcctcagagggggcgcgcttgactgacaggcggcggcggcgcagttgcgagcgcaggctccttgccagaggcctccactcactccagacccctatagcccgtcgctgtcagctgtcaacaaaggatgcgaatgctggccgcttcctgtgggcttcgtgtcacccagaggtgagcccaggccaggatgggggactccagggacctttgccctcaccttgactccataggagaggtgaccaaagaggacttgctgctcaaatctaagggaacctgtcagtcgtgtggggtcaccggaccaaacctatgggcctgtctgcaggttgcctgcccctatgttggctgcggagaatccttcgctgaccacagcaccattcatgcacaggcaaaaaagcacaacttgaccgtgaacctgaccacgttccgactgtggtgttacgcctgtgagaaggaggtattcctggagcagcggctggcagcccctctgctgggctcctcttccaagttctctgaacaggactccccgccaccctcccaccctctgaaagctgttcctattgctgtggctgatgaaggagagtctgagtcagaggatgatgacctgaaacctcgaggcctcacgggcatgaagaacctcgggaactcctgctacatgaacgccgccctgcaggccctgtccaattgcccgccgctgactcagttcttcttggagtgtggcggcctggtgcgcacagataagaagccagccctgtgcaagagctaccagaagctggtctctgaggtctggcataagaaacggccaagctacgtggtccccaccagtctgtctcatgggatcaagttggtcaacccaatgttccgaggctatgcccagcaggacacccaagagttccttcgctgcctgatggaccagctgcacgaggagctcaaggagccggtggtggccacggtggcgctgacggaggctcgggactcagattcgagtgacacggatgagaaacgggagggtgaccggagcccatcagaagatgagttcttgtcctgtgactcgagcagtgaccggggtgagggtgacgggcaggggcgtggcgggggcagctcgcaggccgagacggagctgctgatcccagatgaggcgggccgagtcatctctgagaaggagcggatgaaggaccgcaagttctcctggggccagcagcgtacaaactcggagcaagtggacgaggacgctgatgtggacactgccatggctgcccttgaccagcccgcggaggcccagcccccgtcaccacggtcctccagcccctgccggacgccagagccggacaatgatgctcacctacgcagctcctctcgcccctgcagccccgtccaccaccacgagggccatgccaagctgtctagcagcccccctcgtgcaagccccgtgaggatggcaccgtcgtacgtgctcaagaaagcccaggtattgagtgctggcagccggaggcggaaggagcagcgctaccgcagcgtcatctcagacatctttgacggctccattctcagcctcgtgcagtgtctcacctgtgaccgggtatccaccacagtggaaacgttccaggacttatcactgcccattcctggaaaggaggacctggccaagctccattcagccatctaccagaatgtgccggccaagccaggcgcctgtggggacagctatgccgcccagggctggctggccttcattgtggagtacatccgacggtttgtggtatcctgtacccccagctggttttgggggcctgtcgtcaccctggaagactgccttgctgccttctttgccgctgatgagttaaagggtgacaacatgtacagctgtgagcggtgtaagaagctgcggaacggagtgaagtactgcaaagtcctgcggttgcccgagatcctgtgcattcacctaaagcgctttcggcacgaggtgatgtactcattcaagatcaacagccacgtctccttccccctcgaggggctcgacctgcgccccttccttgccaaggagtgcacatcccagatcaccacctacgacctcctctcggtcatctgccaccacggcacggcaggcagtgggcactacatcgcctactgccagaacgtgatcaatgggcagtggtacgagtttgatgaccagtacgtcacagaagtccacgagacggtggtgcagaacgccgagggctacgtactcttctacaggaagagcagcgaggaggccatgcgggagcgacagcaggtggtgtccctggccgccatgcgggagcccagcctgctgcggttctacgtgtcccgcgagtggctcaacaagttcaacaccttcgcggagccaggccccatcaccaaccagaccttcctctgctcccacggaggcatcccgccccacaaataccactacatcgacgacctggtggtcatcctgccccagaacgtctgggagcacctgtacaacagattcgggggtggccccgccgtgaaccacctgtacgtgtgctccatctgccaggtggagatcgaggcactggccaagcgcaggaggatcgagatcgacaccttcatcaagttgaacaaggccttccaggccgaggagtcgccgggcgtcatctactgcatcagcatgcagtggttccgggagtgggaggcgttcgtcaaggggaaggacaacgagccccccgggcccattgacaacagcaggattgcacaggtcaaaggaagcggccatgtccagctgaagcagggagctgactacgggcagatttcggaggagacctggacctacctgaacagcctgtatggaggtggccccgagattgccatccgccagagtgtggcgcagccgctgggcccagagaacctgcacggggagcagaagatcgaagccgagacgcgggccgtgtgatctgctgggctagtctccccatgtgccccaccccgcggaaggcgtgtttgtgcccagaagagaggccgggctgctgcagaaccccgccgtgtaaagaggcagaaaagttggtttggtttgcagtaacgctgcaactagaaaatatatgcacttcaggcttgttgaaacgaccaagactctgtgacgttaatttgggtctttgtcctggcagtgcctctgccagtcactgtcatcgttgtgtcccccacaactgtcctcttgctagctcggcccagctttgtccctggagcccgatgctacccctgtcagacagaggctgcggcctgggccagagtcagggagtagctgctgcttcacggcgtctccactgtgcgattggcccggagccccgaagactcggagggagctgctcagggccggtgagcgcagccagaagccctggccagtgaggagctcacaggtcctccctggtggtcccgccgcacctctgcatctcctgggcgtcaccaggaaggctctgaagtcccgggctgctctcagcacttctcctgcagactgaagactctggactcattgctgattggaacaccaggaggaggttggatttctgccagtgggggatgtttctggaggcagctggtcccccacaccgcgtcctgctgagcctgccccctggattggctgtaatttgcctcgaagttcagcagttcatcttcatgggaaatttgctgagcccccaccagggaaccggatgatgaaacagggatacctcacagcttggccatttgaggcaaaggcagcttcccgagctgatgctaaagaagacagactttcccttcctcccagcagcagcagtgcagagcccgcctggagggatgtgggggctgtgcagggtgcagcgctcaggtggatcctgggaagcagcctctggatgctgagtggagggagccactgagcacagcaaggcaccaaagcccctggagaaaccgccagggcgaggaaaaaggggttccgatccaga

SEQ ID NO: 357813 - DNA, 2850 bp, Homo sapiens
ccagacggccccacaaccctgcgcgtcgcctcagagggggcgcgcttgactgacaggcggcggcggcgcagttgcgagcgcaggctccttgccagaggcctccactcactccagacccctatagcccgtcgctgtcagctgtcaacaaaggatgcgaatgctggccgcttcctgtgggcttcgtgtcacccagaggtgagcccaggccaggatgggggactccagggacctttgccctcaccttgactccataggagaggtgaccaaagaggacttgctgctcaaatctaagggaacctgtcagtcgtgtggggtcaccggaccaaacctatgggcctgtctgcaggttgcctgcccctatgttggctgcggagaatccttcgctgaccacagcaccattcatgcacaggcaaaaaagcacaacttgaccgtgaacctgaccacgttccgactgtggtgttacgcctgtgagaaggaggtattcctggagcagcggctggcagcccctctgctgggctcctcttccaagttctctgaacaggactccccgccaccctcccaccctctgaaagctgttcctattgctgtggctgatgaaggagagtctgagtcagaggatgatgacctgaaacctcgaggcctcacgggcatgaagaacctcgggaactcctgctacatgaacgccgccctgcaggccctgtccaattgcccgccgctgactcagttcttcttggagtgtggcggcctggtgcgcacagataagaagccagccctgtgcaagagctaccagaagctggtctctgaggtctggcataagaaacggccaagctacgtggtccccaccagtctgtctcatgggatcaagttggtcaacccaatgttccgaggctatgcccagcaggacacccaagagttccttcgctgcctgatggaccagctgcacgaggagctcaaggagccggtggtggccacggtggcgctgacggaggctcgggactcagattcgagtgacacggatgagaaacgggagggtgaccggagcccatcagaagatgagttcttgtcctgtgactcgagcagtgaccggggtgagggtgacgggcaggggcgtggcgggggcagctcgcaggccgagacggagctgctgatcccagatgaggcgggccgagtcatctctgagaaggagcggatgaaggaccgcaagttctcctggggccagcagcgtacaaactcggagcaagtggacgaggacgctgatgtggacactgccatggctgcccttgaccagcccgcggaggcccagcccccgtcaccacggtcctccagcccctgccggacgccagagccggacaatgatgctcacctacgcagctcctctcgcccctgcagccccgtccaccaccacgagggccatgccaagctgtctagcagcccccctcgtgcaagccccgtgaggatggcaccgtcgtacgtgctcaagaaagcccaggtattgagtgctggcagccggaggcggaaggagcagcgctaccgcagcgtcatctcagacatctttgacggctccattctcagcctcgtgcagtgtctcacctgtgaccgggtatccaccacagtggaaacgttccaggacttatcactgcccattcctggaaaggaggacctggccaagctccattcagccatctaccagaatgtgccggccaagccaggcgcctgtggggacagctatgccgcccagggctggctggccttcattgtggagtacatccgacggtttgtggtatcctgtacccccagctggttttgggggcctgtcgtcaccctggaagactgccttgctgccttctttgccgctgatgagttaaagggtgacaacatgtacagctgtgagcggtgtaagaagctgcggaacggagtgaagtactgcaaagtcctgcggttgcccgagatcctgtgcattcacctaaagcgctttcggcacgaggtgatgtactcattcaagatcaacagccacgtctccttccccctcgaggggctcgacctgcgccccttccttgccaaggagtgcacatcccagatcaccacctacgacctcctctcggtcatctgccaccacggcacggcaggcagtgggcactacatcgcctactgccagaacgtgatcaatgggcagtggtacgagtttgatgaccagtacgtcacagaagtccacgagacggtggtgcagaacgccgagggctacgtactcttctacaggaagagcagcgaggaggccatgcgggagcgacagcaggtggtgtccctggccgccatgcgggagcccagcctgctgcggttctacgtgtcccgcgagtggctcaacaagttcaacaccttcgcggagccaggccccatcaccaaccagaccttcctctgctcccacggaggcatcccgccccacaaataccactacatcgacgacctggtggtcatcctgccccagaacgtctgggagcacctgtacaacagattcgggggtggccccgccgtgaaccacctgtacgtgtgctccatctgccaggtggagatcgaggcactggccaagcgcaggaggatcgagatcgacaccttcatcaagttgaacaaggccttccaggccgaggagtcgccgggcgtcatctactgcatcagcatgcagtggttccgggagtgggaggcgttcgtcaaggggaaggacaacgagccccccgggcccattgacaacagcaggattgcacaggtcaaaggaagcggccatgtccagctgaagcagggagctgactacgagcagcataaggtattccgcgagcagcaggagaattccaaagcggt

SEQ ID NO: 357814 - DNA, 365 bp, Homo sapiens
ccaccatgcccagccaggttttatttcttaagcagaaatcattatagtcacttttttttgctccctcattttgcatccttgctaacctctgaccctttgttttactgccctaggtgacaacatgtacagctgtgagcggtgtaagaagtaagtgagccttcccccgccttctccctaactgccgtttctgtgccctacatattccccttgggttcctgcagagagccccctataatcctgccttcccagaagggagccgggtggagggctgcttccctggcccctggccctgatgccggacactgatgctggctcgtgcttcctccccaggctgcggaacggagtgaagtactgcaaagtcctgc

SEQ ID NO: 357815 - DNA, 4429 bp, Homo sapiens
ccagacggccccacaaccctgcgcgtcgcctcagagggggcgcgcttgactgacaggcggcggcggcgcagttgcgagcgcaggtgagttccgggccgccaccggctgcttctgtgggccgggcctctgagcattggcgacccccgcccggctccgggctgacagggcctggcttcgccaggctccttgccagaggcctccactcactccagacccctatagcccgtcgctgtcagctgtcaacaaaggatgcgaatgctggccgcttcctgtgggcttcgtgtcacccagaggtgagcccaggccaggatgggggactccagggacctttgccctcaccttgactccataggagaggtgaccaaagaggacttgctgctcaaatctaagggaacctgtcagtcgtgtggggtcaccggaccaaacctatgggcctgtctgcaggttgcctgcccctatgttggctgcggagaatccttcgctgaccacagcaccattcatgcacaggcaaaaaagcacaacttgaccgtgaacctgaccacgttccgactgtggtgttacgcctgtgagaaggaggtattcctggagcagcggctggcagcccctctgctgggctcctcttccaagttctctgaacaggactccccgccaccctcccaccctctgaaagctgttcctattgctgtggctgatgaaggagagtctgagtcagaggatgatgacctgaaacctcgaggcctcacgggcatgaagaacctcgggaactcctgctacatgaacgccgccctgcaggccctgtccaattgcccgccgctgactcagttcttcttggagtgtggcggcctggtgcgcacagataagaagccagccctgtgcaagagctaccagaagctggtctctgaggtctggcataagaaacggccaagctacgtggtccccaccagtctgtctcatgggatcaagttggtcaacccaatgttccgaggctatgcccagcaggacacccaagagttccttcgctgcctgatggaccagctgcacgaggagctcaaggagccggtggtggccacggtggcgctgacggaggctcgggactcagattcgagtgacacggatgagaaacgggagggtgaccggagcccatcagaagatgagttcttgtcctgtgactcgagcagtgaccggggtgagggtgacgggcaggggcgtggcgggggcagctcgcaggccgagacggagctgctgatcccagatgaggcgggccgagtcatctctgagaaggagcggatgaaggaccgcaagttctcctggggccagcagcgtacaaactcggagcaagtggacgaggacgctgatgtggacactgccatggctgcccttgaccagcccgcggaggcccagcccccgtcaccacggtcctccagcccctgccggacgccagagccggacaatgatgctcacctacgcagctcctctcgcccctgcagccccgtccaccaccacgagggccatgccaagctgtctagcagcccccctcgtgcaagccccgtgaggatggcaccgtcgtacgtgctcaagaaagcccaggtattgagtgctggcagccggaggcggaaggagcagcgctaccgcagcgtcatctcagacatctttgacggctccattctcagcctcgtgcagtgtctcacctgtgaccgggtatccaccacagtggaaacgttccaggacttatcactgcccattcctggaaaggaggacctggccaagctccattcagccatctaccagaatgtgccggccaagccaggcgcctgtggggacagctatgccgcccagggctggctggccttcattgtggagtacatccgacggtttgtggtatcctgtacccccagctggttttgggggcctgtcgtcaccctggaagactgccttgctgccttctttgccgctgatgagttaaagggtgacaacatgtacagctgtgagcggtgtaagaagctgcggaacggagtgaagtactgcaaagtcctgcggttgcccgagatcctgtgcattcacctaaagcgctttcggcacgaggtgatgtactcattcaagatcaacagccacgtctccttccccctcgaggggctcgacctgcgccccttccttgccaaggagtgcacatcccagatcaccacctacgacctcctctcggtcatctgccaccacggcacggcaggcagtgggcactacatcgcctactgccagaacgtgatcaatgggcagtggtacgagtttgatgaccagtacgtcacagaagtccacgagacggtggtgcagaacgccgagggctacgtactcttctacaggaagagcagcgaggaggccatgcgggagcgacagcaggtggtgtccctggccgccatgcgggagcccagcctgctgcggttctacgtgtcccgcgagtggctcaacaagttcaacaccttcgcggagccaggccccatcaccaaccagaccttcctctgctcccacggaggcatcccgccccacaaataccactacatcgacgacctggtggtcatcctgccccagaacgtctgggagcacctgtacaacagattcgggggtggccccgccgtgaaccacctgtacgtgtgctccatctgccaggtggagatcgaggcactggccaagcgcaggaggatcgagatcgacaccttcatcaagttgaacaaggccttccaggccgaggagtcgccgggcgtcatctactgcatcagcatgcagtggttccgggagtgggaggcgttcgtcaaggggaaggacaacgagccccccgggcccattgacaacagcaggattgcacaggtcaaaggaagcggccatgtccagctgaagcagggagctgactacgggcagatttcggaggagacctggacctacctgaacagcctgtatggaggtggccccgagattgccatccgccagagtgtggcgcagccgctgggcccagagaacctgcacggggagcagaagatcgaagccgagacgcgggccgtgtgatctgctgggctagtctccccatgtgccccaccccgcggaaggcgtgtttgtgcccagaagagaggccgggctgctgcagaaccccgccgtgtaaagaggcagaaaagttggtttggtttgcagtaacgctgcaactagaaaatatatgcacttcaggcttgttgaaacgaccaagactctgtgacgttaatttgggtctttgtcctggcagtgcctctgccagtcactgtcatcgttgtgtcccccacaactgtcctcttgctagctcggcccagctttgtccctggagcccgatgctacccctgtcagacagaggctgcggcctgggccagagtcagggagtagctgctgcttcacggcgtctccactgtgcgattggcccggagccccgaagactcggagggagctgctcagggccggtgagcgcagccagaagccctggccagtgaggagctcacaggtcctccctggtggtcccgccgcacctctgcatctcctgggcgtcaccaggaaggctctgaagtcccgggctgctctcagcacttctcctgcagactgaagactctggactcattgctgattggaacaccaggaggaggttggatttctgccagtgggggatgtttctggaggcagctggtcccccacaccgcgtcctgctgagcctgccccctggattggctgtaatttgcctcgaagttcagcagttcatcttcatgggaaatttgctgagcccccaccagggaaccggatgatgaaacagggatacctcacagcttggccatttgaggcaaaggcagcttcccgagctgatgctaaagaagacagactttcccttcctcccagcagcagcagtgcagagcccgcctggagggatgtgggggctgtgcagggtgcagcgctcaggtggatcctgggaagcagcctctggatgctgagtggagggagccactgagcacagcaaggcaccaaagcccctggagaaaccgccagggcgaggtgcgaccatcatcaggatcaaagcagacggggcgtgggtggggaaggggctctgggaccagaccccccacactactgcgtctttgtttctatcagtctttgtagaagcaggtggtggtggaaattccagcaggtgggtcccgcagaggccctgaggcctcacttttcggatcttctgtcccagatcctgctccctccctgctgagcctggggttcccctggcattggccccagccttctgaaagccggcgctgcagccagaggccgcacgctgcactgtcgcgacgcagagaggcttctgtgcaggctgggatcgggccccatgtctgtgctgtctagtttgtgttcaaaatgtcagaataaacacagaataaatgtt

SEQ ID NO: 357816 - DNA, 5037 bp, Homo sapiens
ccagacggccccacaaccctgcgcgtcgcctcagagggggcgcgcttgactgacaggcggcggcggcgcagttgcgagcgcaggctccttgccagaggcctccactcactccagacccctatagcccgtcgctgtcagctgtcaacaaaggatgcgaatgctggccgcttcctgtgggcttcgtgtcacccagaggtgagcccaggccaggatgggggactccagggacctttgccctcaccttgactccataggagaggtgaccaaagaggacttgctgctcaaatctaagggaacctgtcagtcgtgtggggtcaccggaccaaacctatgggcctgtctgcaggttgcctgcccctatgttggctgcggagaatccttcgctgaccacagcaccattcatgcacaggcaaaaaagcacaacttgaccgtgaacctgaccacgttccgactgtggtgttacgcctgtgagaaggaggtattcctggagcagcggctggcagcccctctgctgggctcctcttccaagttctctgaacaggactccccgccaccctcccaccctctgaaagctgttcctattgctgtggctgatgaaggagagtctgagtcagaggatgatgacctgaaacctcgaggcctcacgggcatgaagaacctcgggaactcctgctacatgaacgccgccctgcaggccctgtccaattgcccgccgctgactcagttcttcttggagtgtggcggcctggtgcgcacagataagaagccagccctgtgcaagagctaccagaagctggtctctgaggtctggcataagaaacggccaagctacgtggtccccaccagtctgtctcatgggatcaagttggtcaacccaatgttccgaggctatgcccagcaggacacccaagagttccttcgctgcctgatggaccagctgcacgaggagctcaaggagccggtggtggccacggtggcgctgacggaggctcgggactcagattcgagtgacacggatgagaaacgggagggtgaccggagcccatcagaagatgagttcttgtcctgtgactcgagcagtgaccggggtgagggtgacgggcaggggcgtggcgggggcagctcgcaggccgagacggagctgctgatcccagatgaggcgggccgagtcatctctgagaaggagcggatgaaggaccgcaagttctcctggggccagcagcgtacaaactcggagcaagtggacgaggacgctgatgtggacactgccatggctgcccttgaccagcccgcggaggcccagcccccgtcaccacggtcctccagcccctgccggacgccagagccggacaatgatgctcacctacgcagctcctctcgcccctgcagccccgtccaccaccacgagggccatgccaagctgtctagcagcccccctcgtgcaagccccgtgaggatggcaccgtcgtacgtgctcaagaaagcccaggtattgagtgctggcagccggaggcggaaggagcagcgctaccgcagcgtcatctcagacatctttgacggctccattctcagcctcgtgcagtgtctcacctgtgaccgggtatccaccacagtggaaacgttccaggacttatcactgcccattcctggaaaggaggacctggccaagctccattcagccatctaccagaatgtgccggccaagccaggcgcctgtggggacagctatgccgcccagggctggctggccttcattgtggagtacatccgacggtttgtggtatcctgtacccccagctggttttgggggcctgtcgtcaccctggaagactgccttgctgccttctttgccgctgatgagttaaagggtgacaacatgtacagctgtgagcggtgtaagaagctgcggaacggagtgaagtactgcaaagtcctgcggttgcccgagatcctgtgcattcacctaaagcgctttcggcacgaggtgatgtactcattcaagatcaacagccacgtctccttccccctcgaggggctcgacctgcgccccttccttgccaaggagtgcacatcccagatcaccacctacgacctcctctcggtcatctgccaccacggcacggcaggcagtgggcactacatcgcctactgccagaacgtgatcaatgggcagtggtacgagtttgatgaccagtacgtcacagaagtccacgagacggtggtgcagaacgccgagggctacgtactcttctacaggaagagcagcgaggaggccatgcgggagcgacagcaggtggtgtccctggccgccatgcgggagcccagcctgctgcggttctacgtgtcccgcgagtggctcaacaagttcaacaccttcgcggagccaggccccatcaccaaccagaccttcctctgctcccacggaggcatcccgccccacaaataccactacatcgacgacctggtggtcatcctgccccagaacgtctgggagcacctgtacaacagattcgggggtggccccgccgtgaaccacctgtacgtgtgctccatctgccaggtggagatcgaggcactggccaagcgcaggaggatcgagatcgacaccttcatcaagttgaacaaggccttccaggccgaggagtcgccgggcgtcatctactgcatcagcatgcagtggttccgggagtgggaggcgttcgtcaaggggaaggacaacgagccccccgggcccattgacaacagcaggattgcacaggtcaaaggaagcggccatgtccagctgaagcagggagctgactacgggcagatttcggaggagacctggacctacctgaacagcctgtatggaggtggccccgagattgccatccgccagagtgtggcgcagccgctgggcccagagaacctgcacggggagcagaagatcgaagccgagacgcgggccgtgtgatctgctgggctagtctccccatgtgccccaccccgcggaaggcgtgtttgtgcccagaagagaggccgggctgctgcagaaccccgccgtgtaaagaggcagaaaagttggtttggtttgcagtaacgctgcaactagaaaatatatgcacttcaggcttgttgaaacgaccaagactctgtgacgttaatttgggtctttgtcctggcagtgcctctgccagtcactgtcatcgttgtgtcccccacaactgtcctcttgctagctcggcccagctttgtccctggagcccgatgctacccctgtcagacagaggctgcggcctgggccagagtcagggagtagctgctgcttcacggcgtctccactgtgcgattggcccggagccccgaagactcggagggagctgctcagggccggtgagcgcagccagaagccctggccagtgaggagctcacaggtcctccctggtggtcccgccgcacctctgcatctcctgggcgtcaccaggaaggctctgaagtcccgggctgctctcagcacttctcctgcagactgaagactctggactcattgctgattggaacaccaggaggaggttggatttctgccagtgggggatgtttctggaggcagctggtcccccacaccgcgtcctgctgagcctgccccctggattggctgtaatttgcctcgaagttcagcagttcatcttcatgggaaatttgctgagcccccaccagggaaccggatgatgaaacagggatacctcacagcttggccatttgaggcaaaggcagcttcccgagctgatgctaaagaagacagactttcccttcctcccagcagcagcagtgcagagcccgcctggagggatgtgggggctgtgcagggtgcagcgctcaggtggatcctgggaagcagcctctggatgctgagtggagggagccactgagcacagcaaggcaccaaagcccctggagaaaccgccagggcgaggtgcgaccatcatcaggatcaaagcagacggggcgtgggtggggaaggggctctgggaccagaccccccacactactgcgtctttgtttctatcagtctttgtagaagcaggtggtggtggaaattccagcaggtgggtcccgcagaggccctgaggcctcacttttcggatcttctgtcccagatcctgctccctccctgctgagcctggggttcccctggcattggccccagccttctgaaagccggcgctgcagccagaggccgcacgctgcactgtcgcgacgcagagaggcttctgtgcaggctgggatcgggccccatgtctgtgctgtctagtttgtgttcaaaatgtcagaataaacacagaataaatgttaaaaaaaaaaaaaaaaaaaaaaaaaaaaaaaaaaaaaaaaaaaaaaaaaaaaaaaaaaaaagggggggcgcgcgcgcccccagaaattttcccccggggggcgcccacacacattatgccgccgccaccaccgcgtttttgtgtgtatcaacaaaggggggtgccccactaaatatagtggaggggctgttttttatataaaacgtagggcagcgagggcggcccgcgcggtttatatacacaaagcggcggtagaggaagcgggaaacacacagcgcagtgtaaacatgggagggaacaatctctttgtgagaagaagagagacggccctccatatcaatatgttggggggggggggcgagagagaacaccaatagtggtgtgtcgcgaaaaaaacatctcctactcttagcgcgagagatatatatttcagggagactctcttactggaggcgggacatactaattcacagataactttctaacaggagggtactctatacgtggggggtgtgtgccacacaaacgcgacgggcgcgtcatgtatgtgtgcgccgagtgccggtggcgtgggtgagaggacacaatttgtgtgggtgcgctccatagcgcgtgagggtcttgttatgcttgtgattgatcagagagaaatctttttttttatatcacacgcggggggggacacttgccggtgtcgttctaaacc

SEQ ID NO: 357817 - DNA, 2073 bp, Homo sapiens
aggatagggtggagaggttagtggagtgcaattatttgtaatctcgtttgtcagaatgatcagtagagtgtgtacatatctacgtgtcccgcgagtggctcaacaagttcaacaccttcgcggagccaggccccatcaccaaccagaccttcctctgctcccacggaggcatcccgccccacaaataccactacatcgacgacctggtggtcatcctgccccagaacgtctgggagcacctgtacaacagattcgggggtggccccgccgtgaaccacctgtacgtgtgctccatctgccaggtggagatcgaggcactggccaagcgcaggaggatcgagatcgacaccttcatcaagttgaacaaggccttccaggccgaggagtcgccgggcgtcatctactgcatcagcatgcagtggttccgggagtgggaggcgttcgtcaaggggaaggacaacgagccccccgggcccattgacaacagcaggattgcacaggtcaaaggaagcggccatgtccagctgaagcagggagctgactacgggcagatttcggaggagacctggacctacctgaacagcctgtatggaggtggccccgagattgccatccgccagagtgtggcgcagccgctgggcccagagaacctgcacggggagcagaagatcgaagccgagacgcgggccgtgtgatctgctgggctagtctccccatgtgccccaccccgcggaaggcgtgtttgtgcccagaagagaggccgggctgctgcagaaccccgccgtgtaaagaggcagaaaagttggtttggtttgcagtaacgctgcaactagaaaatatatgcacttcaggcttgttgaaacgaccaagactctgtgacgttaatttgggtctttgtcctggcagtgcctctgccagtcactgtcatcgttgtgtcccccacaactgtcctcttgctagctcggcccagctttgtccctggagcccgatgctacccctgtcagacagaggctgcggcctgggccagagtcagggagtagctgctgcttcacggcgtctccactgtgcgattggcccggagccccgaagactcggagggagctgctcagggccggtgagcgcagccagaagccctggccagtgaggagctcacaggtcctccctggtggtcccgccgcacctctgcatctcctgggcgtcaccaggaaggctctgaagtcccgggctgctctcagcacttctcctgcagactgaagactctggactcattgctgattggaacaccaggaggaggttggatttctgccagtgggggatgtttctggaggcagctggtcccccacaccgcgtcctgctgagcctgccccctggattggctgtaatttgcctcgaagttcagcagttcatcttcatgggaaatttgctgagcccccaccagggaaccggatgatgaaacagggatacctcacagcttggccatttgaggcaaaggcagcttcccgagctgatgctaaagaagacagactttcccttcctcccagcagcagcagtgcagagcccgcctggagggatgtgggggctgtgcagggtgcagcgctcaggtggatcctgggaagcagcctctggatgctgagtggagggagccactgagcacagcaaggcaccaaagcccctggagaaaccgccagggcgaggtgcgaccatcatcaggatcaaagcagacggggcgtgggtggggaaggggctctgggaccagaccccccacactactgcgtctttgtttctatcagtctttgtagaagcaggtggtggtggaaattccagcaggtgggtcccgcagaggccctgaggcctcacttttcggatcttctgtcccagatcctgctccctccctgctgagcctggggttcccctggcattggccccagccttctgaaagccggcgctgcagccagaggccgcacgctgcactgtcgcgacgcagagaggcttctgtgcaggctgggatcgggccccatgtctgtgctgtctagtttgtgttcaaaatgtcagaataaacacagaataaatgtt

SEQ ID NO: 357818 - DNA, 1811 bp, Homo sapiens
catctcgtgtgtcctggaaattccctctgctgggtcctcagactgccacagaggagcattgggtggctcaggcgcctcatccattagagacttcacgctgacccccaggcctggggcggccccacttgggatggctctgctgctgtggagggtggagggcatggcaggggctgaacccgagcccgctgtgtctgttgcagagccccccgggcccattgacaacagcaggattgcacaggtcaaaggaagcggccatgtccagctgaagcagggagctgactacgggcagatttcggaggagacctggacctacctgaacagcctgtatggaggtggccccgagattgccatccgccagagtgtggcgcagccgctgggcccagagaacctgcacggggagcagaagatcgaagccgagacgcgggccgtgtgatctgctgggctagtctccccatgtgccccaccccgcggaaggcgtgtttgtgcccagaagagaggccgggctgctgcagaaccccgccgtgtaaagaggcagaaaagttggtttggtttgcagtaacgctgcaactagaaaatatatgcacttcaggcttgttgaaacgaccaagactctgtgacgttaatttgggtctttgtcctggcagtgcctctgccagtcactgtcatcgttgtgtcccccacaactgtcctcttgctagctcggcccagctttgtccctggagcccgatgctacccctgtcagacagaggctgcggcctgggccagagtcagggagtagctgctgcttcacggcgtctccactgtgcgattggcccggagccccgaagactcggagggagctgctcagggccggtgagcgcagccagaagccctggccagtgaggagctcacaggtcctccctggtggtcccgccgcacctctgcatctcctgggcgtcaccaggaaggctctgaagtcccgggctgctctcagcacttctcctgcagactgaagactctggactcattgctgattggaacaccaggaggaggttggatttctgccagtgggggatgtttctggaggcagctggtcccccacaccgcgtcctgctgagcctgccccctggattggctgtaatttgcctcgaagttcagcagttcatcttcatgggaaatttgctgagcccccaccagggaaccggatgatgaaacagggatacctcacagcttggccatttgaggcaaaggcagcttcccgagctgatgctaaagaagacagactttcccttcctcccagcagcagcagtgcagagcccgcctggagggatgtgggggctgtgcagggtgcagcgctcaggtggatcctgggaagcagcctctggatgctgagtggagggagccactgagcacagcaaggcaccaaagcccctggagaaaccgccagggcgaggtgcgaccatcatcaggatcaaagcagacggggcgtgggtggggaaggggctctgggaccagaccccccacactactgcgtctttgtttctatcagtctttgtagaagcaggtggtggtggaaattccagcaggtgggtcccgcagaggccctgaggcctcacttttcggatcttctgtcccagatcctgctccctccctgctgagcctggggttcccctggcattggccccagccttctgaaagccggcgctgcagccagaggccgcacgctgcactgtcgcgacgcagagaggcttctgtgcaggctgggatcgggccccatgtctgtgctgtctagtttgtgttcaaaatgtcagaataaacacagaataaatgtt

SEQ ID NO: 357819 - DNA, 2118 bp, Homo sapiens
ccagacggccccacaaccctgcgcgtcgcctcagagggggcgcgcttgactgacaggcggcggcggcgcagttgcgagcgcaggctccttgccagaggcctccactcactccagacccctatagcccgtcgctgtcagctgtcaacaaaggatgcgaatgctggccgcttcctgtgggcttcgtgtcacccagaggtgagcccaggccaggatgggggactccagggacctttgccctcaccttgactccataggagaggtgaccaaagaggacttgctgctcaaatctaagggaacctgtcagtcgtgtggggtcaccggaccaaacctatgggcctgtctgcaggttgcctgcccctatgttggctgcggagaatccttcgctgaccacagcaccattcatgcacaggcaaaaaagcacaacttgaccgtgaacctgaccacgttccgactgtggtgttacgcctgtgagaaggaggtattcctggagcagcggctggcagcccctctgctgggctcctcttccaagttctctgaacaggactccccgccaccctcccaccctctgaaagctgttcctattgctgtggctgatgaaggagagtctgagtcagaggatgatgacctgaaacctcgaggcctcacgggcatgaagaacctcgggaactcctgctacatgaacgccgccctgcaggccctgtccaattgcccgccgctgactcagttcttcttggagtgtggcggcctggtgcgcacagataagaagccagccctgtgcaagagctaccagaagctggtctctgaggtctggcataagaaacggccaagctacgtggtccccaccagtctgtctcatgggatcaagttggtcaacccaatgttccgaggctatgcccagcaggacacccaagagttccttcgctgcctgatggaccagctgcacgaggagctcaaggagccggtggtggccacggtggcgctgacggaggctcgggactcagattcgagtgacacggatgagaaacgggagggtgaccggagcccatcagaagatgagttcttgtcctgtgactcgagcagtgaccggggtgagggtgacgggcaggggcgtggcgggggcagctcgcaggccgagacggagctgctgatcccagatgaggcgggccgagtcatctctgagaaggagcggatgaaggaccgcaagttctcctggggccagcagcgtacaaactcggagcaagtggacgaggacgctgatgtggacactgccatggctgcccttgaccagcccgcggaggcccagcccccgtcaccacggtcctccagcccctgccggacgccagagccggacaatgatgctcacctacgcagctcctctcgcccctgcagccccgtccaccaccacgagggccatgccaagctgtctagcagcccccctcgtgcaagccccgtgaggatggcaccgtcgtacgtgctcaagaaagcccaggtattgagtgctggcagccggaggcggaaggagcagcgctaccgcagcgtcatctcagacatctttgacggctccattctcagcctcgtgcagtgtctcacctgtgaccgggtatccaccacagtggaaacgttccaggacttatcactgcccattcctggaaaggaggacctggccaagctccattcagccatctaccagaatgtgccggccaagccaggcgcctgtggggacagctatgccgcccagggctggctggccttcattgtggagtacatccgacggtgcgcccaccttgccactactgggcgacatgggctgggcctgtcctggttttcctgggcgggagacagtacacagtgaagtccatgcatttggggaaccagggaggtcctgggaggagctgggggccgaagcctgcagaggagttggcttaatatgcaggggatttcttggctactttgaagtggccaggattggatagtcccttggagctggagggcgatggacagcagggaggtgaccacatggcaggttgaagggagggcagcagcaggacacaggcctggttggcgggaagggcagcagctttcccagggctgcctctcctgcctgaggccagagacccg

SEQ ID NO: 357820 - DNA, 4400 bp, Homo sapiens
atataaaatagtattccaaataagtacattttatagcaaaattatgcatttttcctaagactttcatcaccaatatcgccttataccctgcttttgttgggtctcaccatggagcggaaagtgcttgcgctccaggcccgaaagaaaaggaccaaggccaagaaggacaaagcccaaaggaaatctgaaactcagcaccgaggctctgctccccactctgagagtgatctaccagagcaggaagaggagattctgggatctgatgatgatgagcaagaagatcctaatgattattgtaaaggaggttatcatcttgtgaaaattggagatctattcaatgggagataccatgtgatccgaaagttaggctggggacacttttcaacagtatggttatcatgggatattcaggggaagaaatttgtggcaatgaaagtagttaaaagtgctgaacattacactgaaacagcactagatgaaatccggttgctgaagtcagttcgcaattcagaccctaatgatccaaatagagaaatggttgttcaactactagatgactttaaaatatcaggagttaatggaacacatatctgcatggtatttgaagttttggggcatcatctgctcaagtggatcatcaaatccaattatcaggggcttccactgccttgtgtcaaaaaaattattcagcaagtgttacagggtcttgattatttacataccaagtgccgtatcatccacactgacattaaaccagagaacatcttattgtcagtgaatgagcagtacattcggaggctggctgcagaagcaacagaatggcagcgatctggagctcctccgccttccggatctgcagtcagtactgctccccagcctaaaccagctgacaaaatgtcaaagaataagaagaagaaattgaagaagaagcagaagcgccaggcagaattactagagaagcgaatgcaggaaattgaggaaatggagaaagagtcgggccctgggcaaaaaagaccaaacaagcaagaagaatcagagagtcctgttgaaagacccttgaaagagaacccacctaataaaatgacccaagaaaaacttgaagagtcaagtaccattggccaggatcaaacgcttatggaacgtgatacagagggtggtgcagcagaaattaattgcaatggagtgattgaagtcattaattatactcagaacagtaataatgaaacattgagacataaagaggatctacataatgctaatgactgtgatgtccaaaatttgaatcaggaatctagtttcctaagctcccaaaatggagacagcagcacatctcaagaaacagactcttgtacacctataacatctgaggtgtcagacaccatggtgtgccagtcttcctcaactgtaggtcagtcattcagtgaacaacacattagccaacttcaagaaagcattcgggcagagataccctgtgaagatgaacaagagcaagaacataacggaccactggacaacaaaggaaaatccacggctggaaattttcttgttaatccccttgagccaaaaaatgcagaaaagctcaaggtgaagattgctgaccttggaaatgcttgttgggtgcacaaacatttcactgaagatattcaaacaaggcaatatcgttccttggaagttctaatcggatctggctataatacccctgctgacatttggagcacggcatgcatggcctttgaactggccacaggtgactatttgtttgaacctcattcaggggaagagtacactcgagatgaagatcacattgcattgatcatagaacttctggggaaggtgcctcgcaagctcattgtggcaggaaaatattccaaggaatttttcaccaaaaaaggtgacctgaaacatatcacgaagctgaaaccttggggcctttttgaggttctagtggagaagtatgagtggtcgcaggaagaggcagctggcttcacagatttcttactgcccatgttggagctgatccctgagaagagagccactgccgccgagtgtctccggcacccttggcttaactcctaagcccctgcccagcaccacagcagagatcacacactgaccctccgcccttccccttcaagcattttcctcttcccttttcagggtgaagctcttccttcaagagtttctagatcttgttttttttttaatccaacatgttcatttgggtttgcttacttgaccctgtggagatccccacagccattgggcatcctaggtgaatttggccttggttgggctctgccaaagactaatggactaaaatgtgaaacagcctcttgccctgtacctttccttcccattaggacatcctttaaattataagcatcctttttgaaaagagctatgaaggtgtatgagcccatccttttattcattgactctaagagtcaaattttctagtgcatatcctattgccagcataaggatgaggagggggaaagggtcttaattctatgtacagcagagacattaaacttgctgtgtccgggctgcatcatcttcctggactgtttctgttgttctctgtgttcacattttttcctgcaacttttaagctactgtcttttttaaatagctatatgaacaccaaatttgggtaccattttatcactgttcaaagcactgtcaaattcctttcatcctttaatagttaagatctttgaatcttcagtctgatttttaatgtaagcaaaaacagaaccattgaatagtaatttcttgagaacctcaggtgttctataaacagtcctttcctgtatgtcttctattaccctaagaccagagttattttggttggttgttttgttttattttttgtttttgtatccatggctggcactttactcattgcacttgagtttattgccccataactaaaggatcaggatgatggtagaacggagatctgggtttcagagctttcccatttaagaaaaatagatcttgagattctgattcttttccaaacagtcccctgctttcatgtacagctttttctttaccttacccaaaattctggccttgaagcagttttcctctatggctttgcctttctgattttctcagaggctcgagtctttaatataaccccaaatgaaagaaccaaggggaggggtgggatggcacttttttttgttggtcttgttttgttttgttttttggttggttggttattttttaagattagccattctctgctgctatttccctacataatgtcaatttttaaccataattttgacatgattgagatgtacttgaggcttttttgttttaattgagaaaagactttgcaatttttttttaggatgagcctctcctagacttgacctagaatattacatattcctccagtaatactgaagagcaaaagagaggcaggattggggtcacagccgcttcttcagcatggaccaagtgggccttggggattgcagcgttctcgaagtggctgtaggactcgaatttacagaaagccacagaggtgcaacttgaggctctgctagcaagccaccagtgaggctattgggtaaccacctttctatacaggagattggaatctactttgtcatttatccaccacagtgacaaaggaaaagtggtgccgttatgcaatccatttaactcataaacatattactctgagtaactggccagccattcatcggatccttcattgggtactcctgaaatcagacatgttcctgtagaaagaattttaagttaggctttctatgcacctatcaagaatcaagagaatagattgtatcaaacaacggcagggaaatccttcagcaattctaatccactttgggttttcagctgtttttacatctaaagcaatagactagaactgaattatcttctacatagtaaaatcacaattgtggaattacaggaattctggtgatattaaggtgaaataacaaaacacaaaaggccctattttaacagttgatgtgacagtaagttttaatagaacctgtaacttcattttggaaatgcttctccaccaaataagggctttttcccctatttaaggagccagatggattgaaagatgtggaaataggcagctgtagatcttgatcttccaggtaccccatgtacctttattgagcttaattataatactgtcaaattgccacgatctcactaaaggatttctatttgctgtcagttaaaaataaagccctaaatacatttttattctttctactgagggcattgtctgttttctttgtaaatgccgtacaataaacaaattatttaataacctacatgtttccaaaaatctctgttcatttgttgtccaaattgctctgccctgagtaaaaggagga

SEQ ID NO: 357821 - DNA, 4939 bp, Homo sapiens
  misc_feature (324)..(324): n is a, c, g, or t
agcgcgcggcatcgtggggcgggggtggggcgggactgagggcggagtgtgagcgggctcggttttgggccgcggcgggagcgggagtcgccgccactcgagtgcgcaggcgcctggcgattaccggtctcaccatggagcggaaaggtgagcggtggagcggcctccgccacgaggggcaatggtcgccggggcgaggcccgggtcagcgccgggagcttcgcttaactgccgcggttcggttcccggacgtgcggcgcccctccactgaggtggcgccgccccacaccccctgcctctgggctgcgggtccgcgcccctcantccgggcgtcctctggcgccggccgtagccgccccttgttccccgccaggccggctcgcgccttggggccactccagggcccggcccttggcgggcgacgcagacccccacccgcccgccccctgacccggcctgagacccctccggcgcatcccgcccgggcgctgctctgcgccccgtgggccgccagccccacgccggccgcctcgccgagcccgcagccgcccccgaggcaggccccgcagccgggcctggcgcccctgctgggtctccaccctcaccttggtcgcctcctttcctccacattcgcccttcatccatccctctctcctgcagtgcttgcgctccaggcccgaaagaaaaggaccaaggccaagaaggacaaagcccaaaggaaatctgaaactcagcaccgaggctctgctccccactctgagagtgatctaccagagcaggaagaggagattctgggatctgatgatgatgagcaagaagatcctaatgattattgtaaaggaggttatcatcttgtgaaaattggagatctattcaatgggagataccatgtgatccgaaagttaggctggggacacttttcaacagtatggttatcatgggatattcaggggaagaaatttgtggcaatgaaagtagttaaaagtgctgaacattacactgaaacagcactagatgaaatccggttgctgaagtcagttcgcaattcagaccctaatgatccaaatagagaaatggttgttcaactactagatgactttaaaatatcaggagttaatggaacacatatctgcatggtatttgaagttttggggcatcatctgctcaagtggatcatcaaatccaattatcaggggcttccactgccttgtgtcaaaaaaattattcagcaagtgttacagggtcttgattatttacataccaagtgccgtatcatccacactgacattaaaccagagaacatcttattgtcagtgaatgagcagtacattcggaggctggctgcagaagcaacagaatggcagcgatctggagctcctccgccttccggatctgcagtcagtactgctccccagcctaaaccagctgacaaaatgtcaaagaataagaagaagaaattgaagaagaagcagaagcgccaggcagaattactagagaagcgaatgcaggaaattgaggaaatggagaaagagtcgggccctgggcaaaaaagaccaaacaagcaagaagaatcagagagtcctgttgaaagacccttgaaagagaacccacctaataaaatgacccaagaaaaacttgaagagtcaagtaccattggccaggatcaaacgcttatggaacgtgatacagagggtggtgcagcagaaattaattgcaatggagtgattgaagtcattaattatactcagaacagtaataatgaaacattgagacataaagaggatctacataatgctaatgactgtgatgtccaaaatttgaatcaggaatctagtttcctaagctcccaaaatggagacagcagcacatctcaagaaacagactcttgtacacctataacatctgaggtgtcagacaccatggtgtgccagtcttcctcaactgtaggtcagtcattcagtgaacaacacattagccaacttcaagaaagcattcgggcagagataccctgtgaagatgaacaagagcaagaacataacggaccactggacaacaaaggaaaatccacggctggaaattttcttgttaatccccttgagccaaaaaatgcagaaaagctcaaggtgaagattgctgaccttggaaatgcttgttgggtgcacaaacatttcactgaagatattcaaacaaggcaatatcgttccttggaagttctaatcggatctggctataatacccctgctgacatttggagcacggcatgcatggcctttgaactggccacaggtgactatttgtttgaacctcattcaggggaagagtacactcgagatgaagatcacattgcattgatcatagaacttctggggaaggtgcctcgcaagctcattgtggcaggaaaatattccaaggaatttttcaccaaaaaaggtgacctgaaacatatcacgaagctgaaaccttggggcctttttgaggttctagtggagaagtatgagtggtcgcaggaagaggcagctggcttcacagatttcttactgcccatgttggagctgatccctgagaagagagccactgccgccgagtgtctccggcacccttggcttaactcctaagcccctgcccagcaccacagcagagatcacacactgaccctccgcccttccccttcaagcattttcctcttcccttttcagggtgaagctcttccttcaagagtttctagatcttgttttttttttaatccaacatgttcatttgggtttgcttacttgaccctgtggagatccccacagccattgggcatcctaggtgaatttggccttggttgggctctgccaaagactaatggactaaaatgtgaaacagcctcttgccctgtacctttccttcccattaggacatcctttaaattataagcatcctttttgaaaagagctatgaaggtgtatgagcccatccttttattcattgactctaagagtcaaattttctagtgcatatcctattgccagcataaggatgaggagggggaaagggtcttaattctatgtacagcagagacattaaacttgctgtgtccgggctgcatcatcttcctggactgtttctgttgttctctgtgttcacattttttcctgcaacttttaagctactgtcttttttaaatagctatatgaacaccaaatttgggtaccattttatcactgttcaaagcactgtcaaattcctttcatcctttaatagttaagatctttgaatcttcagtctgatttttaatgtaagcaaaaacagaaccattgaatagtaatttcttgagaacctcaggtgttctataaacagtcctttcctgtatgtcttctattaccctaagaccagagttattttggttggttgttttgttttattttttgtttttgtatccatggctggcactttactcattgcacttgagtttattgccccataactaaaggatcaggatgatggtagaacggagatctgggtttcagagctttcccatttaagaaaaatagatcttgagattctgattcttttccaaacagtcccctgctttcatgtacagctttttctttaccttacccaaaattctggccttgaagcagttttcctctatggctttgcctttctgattttctcagaggctcgagtctttaatataaccccaaatgaaagaaccaaggggaggggtgggatggcacttttttttgttggtcttgttttgttttgttttttggttggttggttattttttaagattagccattctctgctgctatttccctacataatgtcaatttttaaccataattttgacatgattgagatgtacttgaggcttttttgttttaattgagaaaagactttgcaatttttttttaggatgagcctctcctagacttgacctagaatattacatattcctccagtaatactgaagagcaaaagagaggcaggattggggtcacagccgcttcttcagcatggaccaagtgggccttggggattgcagcgttctcgaagtggctgtaggactcgaatttacagaaagccacagaggtgcaacttgaggctctgctagcaagccaccagtgaggctattgggtaaccacctttctatacaggagattggaatctactttgtcatttatccaccacagtgacaaaggaaaagtggtgccgttatgcaatccatttaactcataaacatattactctgagtaactggccagccattcatcggatccttcattgggtactcctgaaatcagacatgttcctgtagaaagaattttaagttaggctttctatgcacctatcaagaatcaagagaatagattgtatcaaacaacggcagggaaatccttcagcaattctaatccactttgggttttcagctgtttttacatctaaagcaatagactagaactgaattatcttctacatagtaaaatcacaattgtggaattacaggaattctggtgatattaaggtgaaataacaaaacacaaaaggccctattttaacagttgatgtgacagtaagttttaatagaacctgtaacttcattttggaaatgcttctccaccaaataagggctttttcccctatttaaggagccagatggattgaaagatgtggaaataggcagctgtagatcttgatcttccaggtaccccatgtacctttattgagcttaattataatactgtcaaattgccacgatctcactaaaggatttctatttgctgtcagttaaaaataaagccctaaatacatttttattctttctactgagggcattgtctgttttctttgtaaatgccgtacaataaacaaattatttaataacctacatgtttccaaaaatctctgttcatttgttgtccaaattgctctgccctgagtaaaaggagga

SEQ ID NO: 357822 - DNA, 4454 bp, Homo sapiens
agcgcgcggcatcgtggggcgggggtggggcgggactgagggcggagtgtgagcgggctcggttttgggccgcggcgggagcgggagtcgccgccactcgagtgcgcaggcgcctggcgattaccggtctcaccatggagcggaaagtgcttgcgctccaggcccgaaagaaaaggaccaaggccaagaaggacaaagcccaaaggaagaatgggcatttttgtatcatttcttagatctgaaactcagcaccgaggctctgctccccactctgagagtgatctaccagagcaggaagaggagattctgggatctgatgatgatgagcaagaagatcctaatgattattgtaaaggaggttatcatcttgtgaaaattggagatctattcaatgggagataccatgtgatccgaaagttaggctggggacacttttcaacagtatggttatcatgggatattcaggggaagaaatttgtggcaatgaaagtagttaaaagtgctgaacattacactgaaacagcactagatgaaatccggttgctgaagtcagttcgcaattcagaccctaatgatccaaatagagaaatggttgttcaactactagatgactttaaaatatcaggagttaatggaacacatatctgcatggtatttgaagttttggggcatcatctgctcaagtggatcatcaaatccaattatcaggggcttccactgccttgtgtcaaaaaaattattcagcaagtgttacagggtcttgattatttacataccaagtgccgtatcatccacactgacattaaaccagagaacatcttattgtcagtgaatgagcagtacattcggaggctggctgcagaagcaacagaatggcagcgatctggagctcctccgccttccggatctgcagtcagtactgctccccagcctaaaccagctgacaaaatgtcaaagaataagaagaagaaattgaagaagaagcagaagcgccaggcagaattactagagaagcgaatgcaggaaattgaggaaatggagaaagagtcgggccctgggcaaaaaagaccaaacaagcaagaagaatcagagagtcctgttgaaagacccttgaaagagaacccacctaataaaatgacccaagaaaaacttgaagagtcaagtaccattggccaggatcaaacgcttatggaacgtgatacagagggtggtgcagcagaaattaattgcaatggagtgattgaagtcattaattatactcagaacagtaataatgaaacattgagacataaagaggatctacataatgctaatgactgtgatgtccaaaatttgaatcaggaatctagtttcctaagctcccaaaatggagacagcagcacatctcaagaaacagactcttgtacacctataacatctgaggtgtcagacaccatggtgtgccagtcttcctcaactgtaggtcagtcattcagtgaacaacacattagccaacttcaagaaagcattcgggcagagataccctgtgaagatgaacaagagcaagaacataacggaccactggacaacaaaggaaaatccacggctggaaattttcttgttaatccccttgagccaaaaaatgcagaaaagctcaaggtgaagattgctgaccttggaaatgcttgttgggtgcacaaacatttcactgaagatattcaaacaaggcaatatcgttccttggaagttctaatcggatctggctataatacccctgctgacatttggagcacggcatgcatggcctttgaactggccacaggtgactatttgtttgaacctcattcaggggaagagtacactcgagatgaagatcacattgcattgatcatagaacttctggggaaggtgcctcgcaagctcattgtggcaggaaaatattccaaggaatttttcaccaaaaaaggtgacctgaaacatatcacgaagctgaaaccttggggcctttttgaggttctagtggagaagtatgagtggtcgcaggaagaggcagctggcttcacagatttcttactgcccatgttggagctgatccctgagaagagagccactgccgccgagtgtctccggcacccttggcttaactcctaagcccctgcccagcaccacagcagagatcacacactgaccctccgcccttccccttcaagcattttcctcttcccttttcagggtgaagctcttccttcaagagtttctagatcttgttttttttttaatccaacatgttcatttgggtttgcttacttgaccctgtggagatccccacagccattgggcatcctaggtgaatttggccttggttgggctctgccaaagactaatggactaaaatgtgaaacagcctcttgccctgtacctttccttcccattaggacatcctttaaattataagcatcctttttgaaaagagctatgaaggtgtatgagcccatccttttattcattgactctaagagtcaaattttctagtgcatatcctattgccagcataaggatgaggagggggaaagggtcttaattctatgtacagcagagacattaaacttgctgtgtccgggctgcatcatcttcctggactgtttctgttgttctctgtgttcacattttttcctgcaacttttaagctactgtcttttttaaatagctatatgaacaccaaatttgggtaccattttatcactgttcaaagcactgtcaaattcctttcatcctttaatagttaagatctttgaatcttcagtctgatttttaatgtaagcaaaaacagaaccattgaatagtaatttcttgagaacctcaggtgttctataaacagtcctttcctgtatgtcttctattaccctaagaccagagttattttggttggttgttttgttttattttttgtttttgtatccatggctggcactttactcattgcacttgagtttattgccccataactaaaggatcaggatgatggtagaacggagatctgggtttcagagctttcccatttaagaaaaatagatcttgagattctgattcttttccaaacagtcccctgctttcatgtacagctttttctttaccttacccaaaattctggccttgaagcagttttcctctatggctttgcctttctgattttctcagaggctcgagtctttaatataaccccaaatgaaagaaccaaggggaggggtgggatggcacttttttttgttggtcttgttttgttttgttttttggttggttggttattttttaagattagccattctctgctgctatttccctacataatgtcaatttttaaccataattttgacatgattgagatgtacttgaggcttttttgttttaattgagaaaagactttgcaatttttttttaggatgagcctctcctagacttgacctagaatattacatattcctccagtaatactgaagagcaaaagagaggcaggattggggtcacagccgcttcttcagcatggaccaagtgggccttggggattgcagcgttctcgaagtggctgtaggactcgaatttacagaaagccacagaggtgcaacttgaggctctgctagcaagccaccagtgaggctattgggtaaccacctttctatacaggagattggaatctactttgtcatttatccaccacagtgacaaaggaaaagtggtgccgttatgcaatccatttaactcataaacatattactctgagtaactggccagccattcatcggatccttcattgggtactcctgaaatcagacatgttcctgtagaaagaattttaagttaggctttctatgcacctatcaagaatcaagagaatagattgtatcaaacaacggcagggaaatccttcagcaattctaatccactttgggttttcagctgtttttacatctaaagcaatagactagaactgaattatcttctacatagtaaaatcacaattgtggaattacaggaattctggtgatattaaggtgaaataacaaaacacaaaaggccctattttaacagttgatgtgacagtaagttttaatagaacctgtaacttcattttggaaatgcttctccaccaaataagggctttttcccctatttaaggagccagatggattgaaagatgtggaaataggcagctgtagatcttgatcttccaggtaccccatgtacctttattgagcttaattataatactgtcaaattgccacgatctcactaaaggatttctatttgctgtcagttaaaaataaagccctaaatacatttttattctttctactgagggcattgtctgttttctttgtaaatgccgtacaataaacaaattatttaataacctacatgtttccaaaaatctctgttcatttgttgtccaaattgctctgccctgagtaaaaggagga

SEQ ID NO: 357823 - DNA, 3433 bp, Homo sapiens
tttagatgtttagtcatgtttttatgtcactcagtataagttctagaaaatgttttaatcttgtgagaaatgtttctgttctttcactcacacacatatgcatatatctttttttgttcgtttgttccttagaagagtcaagtaccattggccaggatcaaacgcttatggaacgtgatacagagggtggtgcagcagaaattaattgcaatggagtgattgaagtcattaattatactcagaacagtaataatgaaacattgagacataaagaggatctacataatgctaatgactgtgatgtccaaaatttgaatcaggaatctagtttcctaagctcccaaaatggagacagcagcacatctcaagaaacagactcttgtacacctataacatctgaggtgtcagacaccatggtgtgccagtcttcctcaactgtaggtcagtcattcagtgaacaacacattagccaacttcaagaaagcattcgggcagagataccctgtgaagatgaacaagagcaagaacataacggaccactggacaacaaaggaaaatccacggctggaaattttcttgttaatccccttgagccaaaaaatgcagaaaagctcaaggtgaagattgctgaccttggaaatgcttgttgggtgcacaaacatttcactgaagatattcaaacaaggcaatatcgttccttggaagttctaatcggatctggctataatacccctgctgacatttggagcacggcatgcatggcctttgaactggccacaggtgactatttgtttgaacctcattcaggggaagagtacactcgagatgaagatcacattgcattgatcatagaacttctggggaaggtgcctcgcaagctcattgtggcaggaaaatattccaaggaatttttcaccaaaaaaggtgacctgaaacatatcacgaagctgaaaccttggggcctttttgaggttctagtggagaagtatgagtggtcgcaggaagaggcagctggcttcacagatttcttactgcccatgttggagctgatccctgagaagagagccactgccgccgagtgtctccggcacccttggcttaactcctaagcccctgcccagcaccacagcagagatcacacactgaccctccgcccttccccttcaagcattttcctcttcccttttcagggtgaagctcttccttcaagagtttctagatcttgttttttttttaatccaacatgttcatttgggtttgcttacttgaccctgtggagatccccacagccattgggcatcctaggtgaatttggccttggttgggctctgccaaagactaatggactaaaatgtgaaacagcctcttgccctgtacctttccttcccattaggacatcctttaaattataagcatcctttttgaaaagagctatgaaggtgtatgagcccatccttttattcattgactctaagagtcaaattttctagtgcatatcctattgccagcataaggatgaggagggggaaagggtcttaattctatgtacagcagagacattaaacttgctgtgtccgggctgcatcatcttcctggactgtttctgttgttctctgtgttcacattttttcctgcaacttttaagctactgtcttttttaaatagctatatgaacaccaaatttgggtaccattttatcactgttcaaagcactgtcaaattcctttcatcctttaatagttaagatctttgaatcttcagtctgatttttaatgtaagcaaaaacagaaccattgaatagtaatttcttgagaacctcaggtgttctataaacagtcctttcctgtatgtcttctattaccctaagaccagagttattttggttggttgttttgttttattttttgtttttgtatccatggctggcactttactcattgcacttgagtttattgccccataactaaaggatcaggatgatggtagaacggagatctgggtttcagagctttcccatttaagaaaaatagatcttgagattctgattcttttccaaacagtcccctgctttcatgtacagctttttctttaccttacccaaaattctggccttgaagcagttttcctctatggctttgcctttctgattttctcagaggctcgagtctttaatataaccccaaatgaaagaaccaaggggaggggtgggatggcacttttttttgttggtcttgttttgttttgttttttggttggttggttattttttaagattagccattctctgctgctatttccctacataatgtcaatttttaaccataattttgacatgattgagatgtacttgaggcttttttgttttaattgagaaaagactttgcaatttttttttaggatgagcctctcctagacttgacctagaatattacatattcctccagtaatactgaagagcaaaagagaggcaggattggggtcacagccgcttcttcagcatggaccaagtgggccttggggattgcagcgttctcgaagtggctgtaggactcgaatttacagaaagccacagaggtgcaacttgaggctctgctagcaagccaccagtgaggctattgggtaaccacctttctatacaggagattggaatctactttgtcatttatccaccacagtgacaaaggaaaagtggtgccgttatgcaatccatttaactcataaacatattactctgagtaactggccagccattcatcggatccttcattgggtactcctgaaatcagacatgttcctgtagaaagaattttaagttaggctttctatgcacctatcaagaatcaagagaatagattgtatcaaacaacggcagggaaatccttcagcaattctaatccactttgggttttcagctgtttttacatctaaagcaatagactagaactgaattatcttctacatagtaaaatcacaattgtggaattacaggaattctggtgatattaaggtgaaataacaaaacacaaaaggccctattttaacagttgatgtgacagtaagttttaatagaacctgtaacttcattttggaaatgcttctccaccaaataagggctttttcccctatttaaggagccagatggattgaaagatgtggaaataggcagctgtagatcttgatcttccaggtaccccatgtacctttattgagcttaattataatactgtcaaattgccacgatctcactaaaggatttctatttgctgtcagttaaaaataaagccctaaatacatttttattctttctactgagggcattgtctgttttctttgtaaatgccgtacaataaacaaattatttaataacctacatgtttccaaaaatctctgttcatttgttgtccaaattgctctgccctgagtaaaaggagga

SEQ ID NO: 357824 - DNA, 3382 bp, Homo sapiens
tttagatgtttagtcatgtttttatgtcactcagtataagttctagaaaatgttttaatcttgtgagaaatgtttctgttctttcactcacacacatatgcatatatctttttttgttcgtttgttccttagaagagtcaagtaccattggccaggatcaaacgcttatggaacgtgatacagagggtggtgcagcagaaattaattgcaatggagtgattgaagtcattaattatactcagaacagtaataatgaaacattgagacataaagaggatctacataatgctaatgactgtgatgtccaaaatttgaatcaggaatctagtttcctaagctcccaaaatggagacagcagcacatctcaagaaacagactcttgtacacctataacatctgaggtgtcagacaccatggtgtgccagtcttcctcaactgtaggtcagtcattcagtgaacaacacattagccaacttcaagaaagcattcgggcagagataccctgtgaagatgaacaagagcaagaacataacggaccactggacaacaaaggaaaatccacggctggaaattttcttgttaatccccttgagccaaaaaatcacaaacatttcactgaagatattcaaacaaggcaatatcgttccttggaagttctaatcggatctggctataatacccctgctgacatttggagcacggcatgcatggcctttgaactggccacaggtgactatttgtttgaacctcattcaggggaagagtacactcgagatgaagatcacattgcattgatcatagaacttctggggaaggtgcctcgcaagctcattgtggcaggaaaatattccaaggaatttttcaccaaaaaaggtgacctgaaacatatcacgaagctgaaaccttggggcctttttgaggttctagtggagaagtatgagtggtcgcaggaagaggcagctggcttcacagatttcttactgcccatgttggagctgatccctgagaagagagccactgccgccgagtgtctccggcacccttggcttaactcctaagcccctgcccagcaccacagcagagatcacacactgaccctccgcccttccccttcaagcattttcctcttcccttttcagggtgaagctcttccttcaagagtttctagatcttgttttttttttaatccaacatgttcatttgggtttgcttacttgaccctgtggagatccccacagccattgggcatcctaggtgaatttggccttggttgggctctgccaaagactaatggactaaaatgtgaaacagcctcttgccctgtacctttccttcccattaggacatcctttaaattataagcatcctttttgaaaagagctatgaaggtgtatgagcccatccttttattcattgactctaagagtcaaattttctagtgcatatcctattgccagcataaggatgaggagggggaaagggtcttaattctatgtacagcagagacattaaacttgctgtgtccgggctgcatcatcttcctggactgtttctgttgttctctgtgttcacattttttcctgcaacttttaagctactgtcttttttaaatagctatatgaacaccaaatttgggtaccattttatcactgttcaaagcactgtcaaattcctttcatcctttaatagttaagatctttgaatcttcagtctgatttttaatgtaagcaaaaacagaaccattgaatagtaatttcttgagaacctcaggtgttctataaacagtcctttcctgtatgtcttctattaccctaagaccagagttattttggttggttgttttgttttattttttgtttttgtatccatggctggcactttactcattgcacttgagtttattgccccataactaaaggatcaggatgatggtagaacggagatctgggtttcagagctttcccatttaagaaaaatagatcttgagattctgattcttttccaaacagtcccctgctttcatgtacagctttttctttaccttacccaaaattctggccttgaagcagttttcctctatggctttgcctttctgattttctcagaggctcgagtctttaatataaccccaaatgaaagaaccaaggggaggggtgggatggcacttttttttgttggtcttgttttgttttgttttttggttggttggttattttttaagattagccattctctgctgctatttccctacataatgtcaatttttaaccataattttgacatgattgagatgtacttgaggcttttttgttttaattgagaaaagactttgcaatttttttttaggatgagcctctcctagacttgacctagaatattacatattcctccagtaatactgaagagcaaaagagaggcaggattggggtcacagccgcttcttcagcatggaccaagtgggccttggggattgcagcgttctcgaagtggctgtaggactcgaatttacagaaagccacagaggtgcaacttgaggctctgctagcaagccaccagtgaggctattgggtaaccacctttctatacaggagattggaatctactttgtcatttatccaccacagtgacaaaggaaaagtggtgccgttatgcaatccatttaactcataaacatattactctgagtaactggccagccattcatcggatccttcattgggtactcctgaaatcagacatgttcctgtagaaagaattttaagttaggctttctatgcacctatcaagaatcaagagaatagattgtatcaaacaacggcagggaaatccttcagcaattctaatccactttgggttttcagctgtttttacatctaaagcaatagactagaactgaattatcttctacatagtaaaatcacaattgtggaattacaggaattctggtgatattaaggtgaaataacaaaacacaaaaggccctattttaacagttgatgtgacagtaagttttaatagaacctgtaacttcattttggaaatgcttctccaccaaataagggctttttcccctatttaaggagccagatggattgaaagatgtggaaataggcagctgtagatcttgatcttccaggtaccccatgtacctttattgagcttaattataatactgtcaaattgccacgatctcactaaaggatttctatttgctgtcagttaaaaataaagccctaaatacatttttattctttctactgagggcattgtctgttttctttgtaaatgccgtacaataaacaaattatttaataacctacatgtttccaaaaatctctgttcatttgttgtccaaattgctctgccctgagtaaaaggagga

SEQ ID NO: 357825 - DNA, 4372 bp, Homo sapiens
agcgcgcggcatcgtggggcgggggtggggcgggactgagggcggagtgtgagcgggctcggttttgggccgcggcgggagcgggagtcgccgccactcgagtgcgcaggcgcctggcgattaccggtctcaccatggagcggaaagtgcttgcgctccaggcccgaaagaaaaggaccaaggccaagaaggacaaagcccaaaggaaatctgaaactcagcaccgaggctctgctccccactctgagagtgatctaccagagcaggaagaggagattctgggatctgatgatgatgagcaagaagatcctaatgattattgtaaaggaggttatcatcttgtgaaaattggagatctattcaatgggagataccatgtgatccgaaagttaggctggggacacttttcaacagtatggttatcatgggatattcaggggaagaaatttgtggcaatgaaagtagttaaaagtgctgaacattacactgaaacagcactagatgaaatccggttgctgaagtcagttcgcaattcagaccctaatgatccaaatagagaaatggttgttcaactactagatgactttaaaatatcaggagttaatggaacacatatctgcatggtatttgaagttttggggcatcatctgctcaagtggatcatcaaatccaattatcaggggcttccactgccttgtgtcaaaaaaattattcagcaagtgttacagggtcttgattatttacataccaagtgccgtatcatccacactgacattaaaccagagaacatcttattgtcagtgaatgagcagtacattcggaggctggctgcagaagcaacagaatggcagcgatctggagctcctccgccttccggatctgcagtcagtactgctccccagcctaaaccagctgacaaaatgtcaaagaataagaagaagaaattgaagaagaagcagaagcgccaggcagaattactagagaagcgaatgcaggaaattgaggaaatggagaaagagtcgggccctgggcaaaaaagaccaaacaagcaagaagaatcagagagtcctgttgaaagacccttgaaagagaacccacctaataaaatgacccaagaaaaacttgaagagtcaagtaccattggccaggatcaaacgcttatggaacgtgatacagagggtggtgcagcagaaattaattgcaatggagtgattgaagtcattaattatactcagaacagtaataatgaaacattgagacataaagaggatctacataatgctaatgactgtgatgtccaaaatttgaatcaggaatctagtttcctaagctcccaaaatggagacagcagcacatctcaagaaacagactcttgtacacctataacatctgaggtgtcagacaccatggtgtgccagtcttcctcaactgtaggtcagtcattcagtgaacaacacattagccaacttcaagaaagcattcgggcagagataccctgtgaagatgaacaagagcaagaacataacggaccactggacaacaaaggaaaatccacggctggaaattttcttgttaatccccttgagccaaaaaatgcagaaaagctcaaggtgaagattgctgaccttggaaatgcttgttgggtgcacaaacatttcactgaagatattcaaacaaggcaatatcgttccttggaagttctaatcggatctggctataatacccctgctgacatttggagcacggcatgcatggcctttgaactggccacaggtgactatttgtttgaacctcattcaggggaagagtacactcgagatgaagatcacattgcattgatcatagaacttctggggaaggtgcctcgcaagctcattgtggcaggaaaatattccaaggaatttttcaccaaaaaaggtgacctgaaacatatcacgaagctgaaaccttggggcctttttgaggttctagtggagaagtatgagtggtcgcaggaagaggcagctggcttcacagatttcttactgcccatgttggagctgatccctgagaagagagccactgccgccgagtgtctccggcacccttggcttaactcctaagcccctgcccagcaccacagcagagatcacacactgaccctccgcccttccccttcaagcattttcctcttcccttttcagggtgaagctcttccttcaagagtttctagatcttgttttttttttaatccaacatgttcatttgggtttgcttacttgaccctgtggagatccccacagccattgggcatcctaggtgaatttggccttggttgggctctgccaaagactaatggactaaaatgtgaaacagcctcttgccctgtacctttccttcccattaggacatcctttaaattataagcatcctttttgaaaagagctatgaaggtgtatgagcccatccttttattcattgactctaagagtcaaattttctagtgcatatcctattgccagcataaggatgaggagggggaaagggtcttaattctatgtacagcagagacattaaacttgctgtgtccgggctgcatcatcttcctggactgtttctgttgttctctgtgttcacattttttcctgcaacttttaagctactgtcttttttaaatagctatatgaacaccaaatttgggtaccattttatcactgttcaaagcactgtcaaattcctttcatcctttaatagttaagatctttgaatcttcagtctgatttttaatgtaagcaaaaacagaaccattgaatagtaatttcttgagaacctcaggtgttctataaacagtcctttcctgtatgtcttctattaccctaagaccagagttattttggttggttgttttgttttattttttgtttttgtatccatggctggcactttactcattgcacttgagtttattgccccataactaaaggatcaggatgatggtagaacggagatctgggtttcagagctttcccatttaagaaaaatagatcttgagattctgattcttttccaaacagtcccctgctttcatgtacagctttttctttaccttacccaaaattctggccttgaagcagttttcctctatggctttgcctttctgattttctcagaggctcgagtctttaatataaccccaaatgaaagaaccaaggggaggggtgggatggcacttttttttgttggtcttgttttgttttgttttttggttggttggttattttttaagattagccattctctgctgctatttccctacataatgtcaatttttaaccataattttgacatgattgagatgtacttgaggcttttttgttttaattgagaaaagactttgcaatttttttttaggatgagcctctcctagacttgacctagaatattacatattcctccagtaatactgaagagcaaaagagaggcaggattggggtcacagccgcttcttcagcatggaccaagtgggccttggggattgcagcgttctcgaagtggctgtaggactcgaatttacagaaagccacagaggtgcaacttgaggctctgctagcaagccaccagtgaggctattgggtaaccacctttctatacaggagattggaatctactttgtcatttatccaccacagtgacaaaggaaaagtggtgccgttatgcaatccatttaactcataaacatattactctgagtaactggccagccattcatcggatccttcattgggtactcctgaaatcagacatgttcctgtagaaagaattttaagttaggctttctatgcacctatcaagaatcaagagaatagattgtatcaaacaacggcagggaaatccttcagcaattctaatccactttgggttttcagctgtttttacatctaaagcaatagactagaactgaattatcttctacatagtaaaatcacaattgtggaattacaggaattctggtgatattaaggtgaaataacaaaacacattcattttggaaatgcttctccaccaaataagggctttttcccctatttaaggagccagatggattgaaagatgtggaaataggcagctgtagatcttgatcttccaggtaccccatgtacctttattgagcttaattataatactgtcaaattgccacgatctcactaaaggatttctatttgctgtcagttaaaaataaagccctaaatacatttttattctttctactgagggcattgtctgttttctttgtaaatgccgtacaataaacaaattatttaataacctacatgtttccaaaaatctctgttcatttgttgtccaaattgctctgccctgagtaaaaggagga

SEQ ID NO: 357826 - DNA, 2389 bp, Homo sapiens
ggagttaagccaagggtgccggagacactcggcggcagtggctctcttctcagggatcagctccaacatgggcagtaagaaatctgtgaagccagctgcctcttcctgcgaccactcatacttctccactagaacctcaaaaaggccccaaggtttcagcttcgtgatatgtttcaggtcaccttttttttaatccaacatgttcatttgggtttgcttacttgaccctgtggagatccccacagccattgggcatcctaggtgaatttggccttggttgggctctgccaaagactaatggactaaaatgtgaaacagcctcttgccctgtacctttccttcccattaggacatcctttaaattataagcatcctttttgaaaagagctatgaaggtgtatgagcccatccttttattcattgactctaagagtcaaattttctagtgcatatcctattgccagcataaggatgaggagggggaaagggtcttaattctatgtacagcagagacattaaacttgctgtgtccgggctgcatcatcttcctggactgtttctgttgttctctgtgttcacattttttcctgcaacttttaagctactgtcttttttaaatagctatatgaacaccaaatttgggtaccattttatcactgttcaaagcactgtcaaattcctttcatcctttaatagttaagatctttgaatcttcagtctgatttttaatgtaagcaaaaacagaaccattgaatagtaatttcttgagaacctcaggtgttctataaacagtcctttcctgtatgtcttctattaccctaagaccagagttattttggttggttgttttgttttattttttgtttttgtatccatggctggcactttactcattgcacttgagtttattgccccataactaaaggatcaggatgatggtagaacggagatctgggtttcagagctttcccatttaagaaaaatagatcttgagattctgattcttttccaaacagtcccctgctttcatgtacagctttttctttaccttacccaaaattctggccttgaagcagttttcctctatggctttgcctttctgattttctcagaggctcgagtctttaatataaccccaaatgaaagaaccaaggggaggggtgggatggcacttttttttgttggtcttgttttgttttgttttttggttggttggttattttttaagattagccattctctgctgctatttccctacataatgtcaatttttaaccataattttgacatgattgagatgtacttgaggcttttttgttttaattgagaaaagactttgcaatttttttttaggatgagcctctcctagacttgacctagaatattacatattcctccagtaatactgaagagcaaaagagaggcaggattggggtcacagccgcttcttcagcatggaccaagtgggccttggggattgcagcgttctcgaagtggctgtaggactcgaatttacagaaagccacagaggtgcaacttgaggctctgctagcaagccaccagtgaggctattgggtaaccacctttctatacaggagattggaatctactttgtcatttatccaccacagtgacaaaggaaaagtggtgccgttatgcaatccatttaactcataaacatattactctgagtaactggccagccattcatcggatccttcattgggtactcctgaaatcagacatgttcctgtagaaagaattttaagttaggctttctatgcacctatcaagaatcaagagaatagattgtatcaaacaacggcagggaaatccttcagcaattctaatccactttgggttttcagctgtttttacatctaaagcaatagactagaactgaattatcttctacatagtaaaatcacaattgtggaattacaggaattctggtgatattaaggtgaaataacaaaacacaaaaggccctattttaacagttgatgtgacagtaagttttaatagaacctgtaacttcattttggaaatgcttctccaccaaataagggctttttcccctatttaaggagccagatggattgaaagatgtggaaataggcagctgtagatcttgatcttccaggtaccccatgtacctttattgagcttaattataatactgtcaaattgccacgatctcactaaaggatttctatttgctgtcagttaaaaataaagccctaaatacatttttattctttctactgagggcattgtctgttttctttgtaaatgccgtacaataaacaaattatttaataacctacatgtttccaaaaatctctgttcatttgttgtccaaattgctctgccctgagtaaaaggagga

SEQ ID NO: 357827 - DNA, 1090 bp, Homo sapiens
acgcgtccggtaagtaatactgaaggaatatgtaatattctaggtcaagtctaggatgagcctctcctagacttgacctagaatattacatattcctccagtaatactgaagagcaaaagagaggcaggattggggtcacagccgcttcttcagcatggaccaagtgggccttggggattgcagcgttctcgaagtggctgtaggactcgaatttacagaaagccacagaggtgcaacttgaggctctgctagcaagccaccagtgaggctattgggtaaccacctttctatacaggagattggaatctactttgtcatttatccaccacagtgacaaaggaaaagtggtgccgttatgcaatccatttaactcataaacatattactctgagtaactggccagccattcatcggatccttcattgggtactcctgaaatcagacatgttcctgtagaaagaattttaagttaggctttctatgcacctatcaagaatcaagagaatagattgtatcaaacaacggcagggaaatccttcagcaattctaatccactttgggttttcagctgtttttacatctaaagcaatagactagaactgaattatcttctacatagtaaaatcacaattgtggaattacaggaattctggtgatattaaggtgaaataacaaaacacaaaaggccctattttaacagttgatgtgacagtaagttttaatagaacctgtaacttcattttggaaatgcttctccaccaaataagggctttttcccctatttaaggagccagatggattgaaagatgtggaaataggcagctgtagatcttgatcttccaggtaccccatgtacctttattgagcttaattataatactgtcaaattgccacgatctcactaaaggatttctatttgctgtcagttaaaaataaagccctaaatacatttttattctttctactgagggcattgtctgttttctttgtaaatgccgtacaataaacaaattatttaataacctacatgtttccaaaaatctctgttcatttgttgtccaaattgctctgccctgagtaaaaggagga

SEQ ID NO: 357828 - DNA, 2109 bp, Homo sapiens
agcgcgcggcatcgtggggcgggggtggggcgggactgagggcggagtgtgagcgggctcggttttgggccgcggcgggagcgggagtcgccgccactcgagtgcgcaggcgcctggcgattaccggtctcaccatggagcggaaagtgcttgcgctccaggcccgaaagaaaaggaccaaggccaagaaggacaaagcccaaaggaaatctgaaactcagcaccgaggctctgctccccactctgagagtgatctaccagagcaggaagaggagattctgggatctgatgatgatgagcaagaagatcctaatgattattgtaaaggaggttatcatcttgtgaaaattggagatctattcaatgggagataccatgtgatccgaaagttaggctggggacacttttcaacagtatggttatcatgggatattcaggggaagaaatttgtggcaatgaaagtagttaaaagtgctgaacattacactgaaacagcactagatgaaatccggttgctgaagtcagttcgcaattcagaccctaatgatccaaatagagaaatggttgttcaactactagatgactttaaaatatcaggagttaatggaacacatatctgcatggtatttgaagttttggggcatcatctgctcaagtggatcatcaaatccaattatcaggggcttccactgccttgtgtcaaaaaaattattcagcaagtgttacagggtcttgattatttacataccaagtgccgtatcatccacactgacattaaaccagagaacatcttattgtcagtgaatgagcagtacattcggaggctggctgcagaagcaacagaatggcagcgatctggagctcctccgccttccggatctgcagtcagtactgctccccagcctaaaccagctgacaaaatgtcaaagaataagaagaagaaattgaagaagaagcagaagcgccaggcagaattactagagaagcgaatgcaggaaattgaggaaatggagaaagagtcgggccctgggcaaaaaagaccaaacaagcaagaagaatcagagagtcctgttgaaagacccttgaaagagaacccacctaataaaatgacccaagaaaaacttgaagagtcaagtaccattggccaggatcaaacgcttatggaacgtgatacagagggtggtgcagcagaaattaattgcaatggagtgattgaagtcattaattatactcagaacagtaataatgaaacattgagacataaagaggatctacataatgctaatgactgtgatgtccaaaatttgaatcaggaatctagtttcctaagctcccaaaatggagacagcagcacatctcaagaaacagactcttgtacacctataacatctgaggtgtcagacaccatggtgtgccagtcttcctcaactgtaggtcagtcattcagtgaacaacacattagccaacttcaagaaagcattcgggcagagataccctgtgaagatgaacaagagcaagaacataacggaccactggacaacaaagtcttattgatgatgcctgttgtctgtaggaaaatccacggctggaaattttcttgttaatccccttgagccaaaaaatgcagaaaagctcaaggtgaagattgctgaccttggaaatgcttgttgggtgcacaaacatttcactgaagatattcaaacaaggcaatatcgttccttggaagttctaatcggatctggctataatacccctgctgacatttggagcacggcatgcatggtaatgttttttccccttggctttcacttgttaagtggtacatatcttgccctgtttgctaatttcagtaaaccagcaaattaactagcagaaaagaacgtaacacagatgatttaccataggtattctaaattctatgtctagagaggtccgaattcaaaaacctgtctggcatttcatttggttactgctaagttcctgttaggtgaaggaaccaaaagtttcttactacagattgttagtggggggaaataatgaaaacaactactaagaggtgttgttggttttgattaggagattacaagtatctttgcatttttagcactc

SEQ ID NO: 357829 - DNA, 358 bp, Homo sapiens
aaaacaaattaccttaaatttttggagccgtatgaagaatagaggcacttctttctgaggcatatgtcagaaaagaaatgctttgtgaatgaaggattagattctgattgcaaaatttgattcctcatagactacatgggttagtttgtgggtttccacaagagtaccttgtcatttgtctgtgttgatcagtggctttttctgtactgtcttcactgcaggtgacctgaaacatatcacgaagctgaaaccttggggcctttttgaggttctagtggagaagtatgagtggtcgcaggaagaggcagctggcttcacagatttcttactgcccatgttggagctgatccctgagaag

SEQ ID NO: 357830 - DNA, 279 bp, Homo sapiens
aagtttggcaatttctattcattattttctttaaaaatggtaataatatagcttctacttaagtcatttaaaaacaatagttttctctgcaatgtagactacataagaaagacttttcattctggtagagtgttttatctgagccttagtttatattgcctgatgaatgccagaattcttacttggttttcttttcttttcagtcagtactgctccccagcctaaaccagtaagtataaggtgtttttatatttaattttgatctatggactatgggca

SEQ ID NO: 357831 - DNA, 459 bp, Homo sapiens
aatgatctataagttttcccaagggaacaagagttacttcatattgagccaaatagcaatcagctttccaaaggccttcttttcttttgtgctttcatatactgtcctcttttttttttaggcctttgaactggccacaggtgactatttgtttgaacctcattcaggggaagagtacactcgagatgaaggtgagtccccttaaccatggatgtgtgtgcgtggtatttacactttccacattaagctaacatcatttgttagtaccgaagagccttagtcttgttagtgtgcaaaacatgtaaatcccagaaaagttagaaatataaaagacattttatattaggtttttagatattttctgaaagatactaaagagctctgtcagagtcaaaaggccacagttcacctaaaacttctgtgtgctggacaattttttcttcaacatctagttatctt

SEQ ID NO: 357832 - DNA, 4426 bp, Homo sapiens
agcgcgcggcatcgtggggcgggggtggggcgggactgagggcggagtgtgagcgggctcggttttgggccgcggcgggagcgggagtcgccgccactcgagtgcgcaggcgcctggcgattaccggtctcaccatggagcggaaagtgcttgcgctccaggcccgaaagaaaaggaccaaggccaagaaggacaaagcccaaaggaaatctgaaactcagcaccgaggctctgctccccactctgagagtgatctaccagagcaggaagaggagattctgggatctgatgatgatgagcaagaagatcctaatgattattgtaaaggaggttatcatcttgtgaaaattggagatctattcaatgggagataccatgtgatccgaaagttaggctggggacacttttcaacagtatggttatcatgggatattcaggggaagaaatttgtggcaatgaaagtagttaaaagtgctgaacattacactgaaacagcactagatgaaatccggttgctgaagtcagttcgcaattcagaccctaatgatccaaatagagaaatggttgttcaactactagatgactttaaaatatcaggagttaatggaacacatatctgcatggtatttgaagttttggggcatcatctgctcaagtggatcatcaaatccaattatcaggggcttccactgccttgtgtcaaaaaaattattcagcaagtgttacagggtcttgattatttacataccaagtgccgtatcatccacactgacattaaaccagagaacatcttattgtcagtgaatgagcagtacattcggaggctggctgcagaagcaacagaatggcagcgatctggagctcctccgccttccggatctgcagtcagtactgctccccagcctaaaccagctgacaaaatgtcaaagaataagaagaagaaattgaagaagaagcagaagcgccaggcagaattactagagaagcgaatgcaggaaattgaggaaatggagaaagagtcgggccctgggcaaaaaagaccaaacaagcaagaagaatcagagagtcctgttgaaagacccttgaaagagaacccacctaataaaatgacccaagaaaaacttgaagagtcaagtaccattggccaggatcaaacgcttatggaacgtgatacagagggtggtgcagcagaaattaattgcaatggagtgattgaagtcattaattatactcagaacagtaataatgaaacattgagacataaagaggatctacataatgctaatgactgtgatgtccaaaatttgaatcaggaatctagtttcctaagctcccaaaatggagacagcagcacatctcaagaaacagactcttgtacacctataacatctgaggtgtcagacaccatggtgtgccagtcttcctcaactgtaggtcagtcattcagtgaacaacacattagccaacttcaagaaagcattcgggcagagataccctgtgaagatgaacaagagcaagaacataacggaccactggacaacaaaggaaaatccacggctggaaattttcttgttaatccccttgagccaaaaaatgcagaaaagctcaaggtgaagattgctgaccttggaaatgcttgttgggtgcacaaacatttcactgaagatattcaaacaaggcaatatcgttccttggaagttctaatcggatctggctataatacccctgctgacatttggagcacggcatgcatggcctttgaactggccacaggtgactatttgtttgaacctcattcaggggaagagtacactcgagatgaagatcacattgcattgatcatagaacttctggggaaggtgcctcgcaagctcattgtggcaggaaaatattccaaggaatttttcaccaaaaaaggtgacctgaaacatatcacgaagctgaaaccttggggcctttttgaggttctagtggagaagtatgagtggtcgcaggaagaggcagctggcttcacagatttcttactgcccatgttggagctgatccctgagaagagagccactgccgccgagtgtctccggcacccttggcttaactcctaagcccctgcccagcaccacagcagagatcacacactgaccctccgcccttccccttcaagcattttcctcttcccttttcagggtgaagctcttccttcaagagtttctagatcttgttttttttttaatccaacatgttcatttgggtttgcttacttgaccctgtggagatccccacagccattgggcatcctaggtgaatttggccttggttgggctctgccaaagactaatggactaaaatgtgaaacagcctcttgccctgtacctttccttcccattaggacatcctttaaattataagcatcctttttgaaaagagctatgaaggtgtatgagcccatccttttattcattgactctaagagtcaaattttctagtgcatatcctattgccagcataaggatgaggagggggaaagggtcttaattctatgtacagcagagacattaaacttgctgtgtccgggctgcatcatcttcctggactgtttctgttgttctctgtgttcacattttttcctgcaacttttaagctactgtcttttttaaatagctatatgaacaccaaatttgggtaccattttatcactgttcaaagcactgtcaaattcctttcatcctttaatagttaagatctttgaatcttcagtctgatttttaatgtaagcaaaaacagaaccattgaatagtaatttcttgagaacctcaggtgttctataaacagtcctttcctgtatgtcttctattaccctaagaccagagttattttggttggttgttttgttttattttttgtttttgtatccatggctggcactttactcattgcacttgagtttattgccccataactaaaggatcaggatgatggtagaacggagatctgggtttcagagctttcccatttaagaaaaatagatcttgagattctgattcttttccaaacagtcccctgctttcatgtacagctttttctttaccttacccaaaattctggccttgaagcagttttcctctatggctttgcctttctgattttctcagaggctcgagtctttaatataaccccaaatgaaagaaccaaggggaggggtgggatggcacttttttttgttggtcttgttttgttttgttttttggttggttggttattttttaagattagccattctctgctgctatttccctacataatgtcaatttttaaccataattttgacatgattgagatgtacttgaggcttttttgttttaattgagaaaagactttgcaatttttttttaggatgagcctctcctagacttgacctagaatattacatattcctccagtaatactgaagagcaaaagagaggcaggattggggtcacagccgcttcttcagcatggaccaagtgggccttggggattgcagcgttctcgaagtggctgtaggactcgaatttacagaaagccacagaggtgcaacttgaggctctgctagcaagccaccagtgaggctattgggtaaccacctttctatacaggagattggaatctactttgtcatttatccaccacagtgacaaaggaaaagtggtgccgttatgcaatccatttaactcataaacatattactctgagtaactggccagccattcatcggatccttcattgggtactcctgaaatcagacatgttcctgtagaaagaattttaagttaggctttctatgcacctatcaagaatcaagagaatagattgtatcaaacaacggcagggaaatccttcagcaattctaatccactttgggttttcagctgtttttacatctaaagcaatagactagaactgaattatcttctacatagtaaaatcacaattgtggaattacaggaattctggtgatattaaggtgaaataacaaaacacaaaaggccctattttaacagttgatgtgacagtaagttttaatagaacctgtaacttcattttggaaatgcttctccaccaaataagggctttttcccctatttaaggagccagatggattgaaagatgtggaaataggcagctgtagatcttgatcttccaggtaccccatgtacctttattgagcttaattataatactgtcaaattgccacgatctcactaaaggatttctatttgctgtcagttaaaaataaagccctaaatacatttttattctttctactgagggcattgtctgttttctttgtaaatgccgtacaataaacaaattatttaataacctacatgtttccaaaaatctctgttcatttgttgtccaaattgctctgccctgagtaaaaggagga

SEQ ID NO: 357833 - DNA, 4372 bp, Homo sapiens
agcgcgcggcatcgtggggcgggggtggggcgggactgagggcggagtgtgagcgggctcggttttgggccgcggcgggagcgggagtcgccgccactcgagtgcgcaggcgcctggcgattaccggtctcaccatggagcggaaagtgcttgcgctccaggcccgaaagaaaaggaccaaggccaagaaggacaaagcccaaaggaaatctgaaactcagcaccgaggctctgctccccactctgagagtgatctaccagagcaggaagaggagattctgggatctgatgatgatgagcaagaagatcctaatgattattgtaaaggaggttatcatcttgtgaaaattggagatctattcaatgggagataccatgtgatccgaaagttaggctggggacacttttcaacagtatggttatcatgggatattcaggggaagaaatttgtggcaatgaaagtagttaaaagtgctgaacattacactgaaacagcactagatgaaatccggttgctgaagtcagttcgcaattcagaccctaatgatccaaatagagaaatggttgttcaactactagatgactttaaaatatcaggagttaatggaacacatatctgcatggtatttgaagttttggggcatcatctgctcaagtggatcatcaaatccaattatcaggggcttccactgccttgtgtcaaaaaaattattcagcaagtgttacagggtcttgattatttacataccaagtgccgtatcatccacactgacattaaaccagagaacatcttattgtcagtgaatgagcagtacattcggaggctggctgcagaagcaacagaatggcagcgatctggagctcctccgccttccggatctgcagtcagtactgctccccagcctaaaccagctgacaaaatgtcaaagaataagaagaagaaattgaagaagaagcagaagcgccaggcagaattactagagaagcgaatgcaggaaattgaggaaatggagaaagagtcgggccctgggcaaaaaagaccaaacaagcaagaagaatcagagagtcctgttgaaagacccttgaaagagaacccacctaataaaatgacccaagaaaaacttgaagagtcaagtaccattggccaggatcaaacgcttatggaacgtgatacagagggtggtgcagcagaaattaattgcaatggagtgattgaagtcattaattatactcagaacagtaataatgaaacattgagacataaagaggatctacataatgctaatgactgtgatgtcccatctcaagaaacagactcttgtacacctataacatctgaggtgtcagacaccatggtgtgccagtcttcctcaactgtaggtcagtcattcagtgaacaacacattagccaacttcaagaaagcattcgggcagagataccctgtgaagatgaacaagagcaagaacataacggaccactggacaacaaaggaaaatccacggctggaaattttcttgttaatccccttgagccaaaaaatgcagaaaagctcaaggtgaagattgctgaccttggaaatgcttgttgggtgcacaaacatttcactgaagatattcaaacaaggcaatatcgttccttggaagttctaatcggatctggctataatacccctgctgacatttggagcacggcatgcatggcctttgaactggccacaggtgactatttgtttgaacctcattcaggggaagagtacactcgagatgaagatcacattgcattgatcatagaacttctggggaaggtgcctcgcaagctcattgtggcaggaaaatattccaaggaatttttcaccaaaaaaggtgacctgaaacatatcacgaagctgaaaccttggggcctttttgaggttctagtggagaagtatgagtggtcgcaggaagaggcagctggcttcacagatttcttactgcccatgttggagctgatccctgagaagagagccactgccgccgagtgtctccggcacccttggcttaactcctaagcccctgcccagcaccacagcagagatcacacactgaccctccgcccttccccttcaagcattttcctcttcccttttcagggtgaagctcttccttcaagagtttctagatcttgttttttttttaatccaacatgttcatttgggtttgcttacttgaccctgtggagatccccacagccattgggcatcctaggtgaatttggccttggttgggctctgccaaagactaatggactaaaatgtgaaacagcctcttgccctgtacctttccttcccattaggacatcctttaaattataagcatcctttttgaaaagagctatgaaggtgtatgagcccatccttttattcattgactctaagagtcaaattttctagtgcatatcctattgccagcataaggatgaggagggggaaagggtcttaattctatgtacagcagagacattaaacttgctgtgtccgggctgcatcatcttcctggactgtttctgttgttctctgtgttcacattttttcctgcaacttttaagctactgtcttttttaaatagctatatgaacaccaaatttgggtaccattttatcactgttcaaagcactgtcaaattcctttcatcctttaatagttaagatctttgaatcttcagtctgatttttaatgtaagcaaaaacagaaccattgaatagtaatttcttgagaacctcaggtgttctataaacagtcctttcctgtatgtcttctattaccctaagaccagagttattttggttggttgttttgttttattttttgtttttgtatccatggctggcactttactcattgcacttgagtttattgccccataactaaaggatcaggatgatggtagaacggagatctgggtttcagagctttcccatttaagaaaaatagatcttgagattctgattcttttccaaacagtcccctgctttcatgtacagctttttctttaccttacccaaaattctggccttgaagcagttttcctctatggctttgcctttctgattttctcagaggctcgagtctttaatataaccccaaatgaaagaaccaaggggaggggtgggatggcacttttttttgttggtcttgttttgttttgttttttggttggttggttattttttaagattagccattctctgctgctatttccctacataatgtcaatttttaaccataattttgacatgattgagatgtacttgaggcttttttgttttaattgagaaaagactttgcaatttttttttaggatgagcctctcctagacttgacctagaatattacatattcctccagtaatactgaagagcaaaagagaggcaggattggggtcacagccgcttcttcagcatggaccaagtgggccttggggattgcagcgttctcgaagtggctgtaggactcgaatttacagaaagccacagaggtgcaacttgaggctctgctagcaagccaccagtgaggctattgggtaaccacctttctatacaggagattggaatctactttgtcatttatccaccacagtgacaaaggaaaagtggtgccgttatgcaatccatttaactcataaacatattactctgagtaactggccagccattcatcggatccttcattgggtactcctgaaatcagacatgttcctgtagaaagaattttaagttaggctttctatgcacctatcaagaatcaagagaatagattgtatcaaacaacggcagggaaatccttcagcaattctaatccactttgggttttcagctgtttttacatctaaagcaatagactagaactgaattatcttctacatagtaaaatcacaattgtggaattacaggaattctggtgatattaaggtgaaataacaaaacacaaaaggccctattttaacagttgatgtgacagtaagttttaatagaacctgtaacttcattttggaaatgcttctccaccaaataagggctttttcccctatttaaggagccagatggattgaaagatgtggaaataggcagctgtagatcttgatcttccaggtaccccatgtacctttattgagcttaattataatactgtcaaattgccacgatctcactaaaggatttctatttgctgtcagttaaaaataaagccctaaatacatttttattctttctactgagggcattgtctgttttctttgtaaatgccgtacaataaacaaattatttaataacctacatgtttccaaaaatctctgttcatttgttgtccaaattgctctgccctgagtaaaaggagga

SEQ ID NO: 357834 - DNA, 4376 bp, Homo sapiens
  misc_feature (4364)..(4365): n is a, c, g, or t
agcgcgcggcatcgtggggcgggggtggggcgggactgagggcggagtgtgagcgggctcggttttgggccgcggcgggagcgggagtcgccgccactcgagtgcgcaggcgcctggcgattaccggtctcaccatggagcggaaagtgcttgcgctccaggcccgaaagaaaaggaccaaggccaagaaggacaaagcccaaaggaaatctgaaactcagcaccgaggctctgctccccactctgagagtgatctaccagagcaggaagaggagattctgggatctgatgatgatgagcaagaagatcctaatgattattgtaaaggaggttatcatcttgtgaaaattggagatctattcaatgggagataccatgtgatccgaaagttaggctggggacacttttcaacagtatggttatcatgggatattcaggggaagaaatttgtggcaatgaaagtagttaaaagtgctgaacattacactgaaacagcactagatgaaatccggttgctgaagtcagttcgcaattcagaccctaatgatccaaatagagaaatggttgttcaactactagatgactttaaaatatcaggagttaatggaacacatatctgcatggtatttgaagttttggggcatcatctgctcaagtggatcatcaaatccaattatcaggggcttccactgccttgtgtcaaaaaaattattcagcaagtgttacagggtcttgattatttacataccaagtgccgtatcatccacactgacattaaaccagagaacatcttattgtcagtgaatgagcagtacattcggaggctggctgcagaagcaacagaatggcagcgatctggagctcctccgccttccggatctgcagtcagtactgctccccagcctaaaccagctgacaaaatgtcaaagaataagaagaagaaattgaagaagaagcagaagcgccaggcagaattactagagaagcgaatgcaggaaattgaggaaatggagaaagagtcgggccctgggcaaaaaagaccaaacaagcaagaagaatcagagagtcctgttgaaagacccttgaaagagaacccacctaataaaatgacccaagaaaaacttgaagagtcaagtaccattggccaggatcaaacgcttatggaacgtgatacagagggtggtgcagcagaaattaattgcaatggagtgattgaagtcattaattatactcagaacagtaataatgaaacattgagacataaagaggatctacataatgctaatgactgtgatgtccaaaatttgaatcaggaatctagtttcctaagctcccaaaatggagacagcagcacatctcaagaaacagactcttgtacacctataacatctgaggtgtcagacaccatggtgtgccagtcttcctcaactgtaggtcagtcattcagtgaacaacacattagccaacttcaagaaagcattcgggcagagataccctgtgaagatgaacaagagcaagaacataacggaccactggacaacaaaggaaaatccacggctggaaattttcttgttaatccccttgagccaaaaaatgcagaaaagctcaaggtgaagattgctgaccttggaaatgcttgttgggtgcacaaacatttcactgaagatattcaaacaaggcaatatcgttccttggaagttctaatcggatctggctataatacccctgctgacatttggagcacggcatgcatggcctttgaactggccacaggtgactatttgtttgaacctcattcaggggaagagtacactcgagatgaagatcacattgcattgatcatagaacttctggggaaggtgcctcgcaagctcattgtggcaggaaaatattccaaggaatttttcaccaaaaaaggtgacctgaaacatatcacgaagctgaaaccttggggcctttttgaggttctagtggagaagtatgagtggtcgcaggaagaggcagctggcttcacagatttcttactgcccatgttggagctgatccctgagaagagagccactgccgccgagtgtctccggcacccttggcttaactcctaagcccctgcccagcaccacagcagagatcacacactgaccctccgcccttccccttcaagcattttcctcttcccttttcagggtgaagctcttccttcaagagtttctagatcttgttttttttttaatccaacatgttcatttgggtttgcttacttgaccctgtggagatccccacagccattgggcatcctaggtgaatttggccttggttgggctctgccaaagactaatggactaaaatgtgaaacagcctcttgccctgtacctttccttcccattaggacatcctttaaattataagcatcctttttgaaaagagctatgaaggtgtatgagcccatccttttattcattgactctaagagtcaaattttctagtgcatatcctattgccagcataaggatgaggagggggaaagggtcttaattctatgtacagcagagacattaaacttgctgtgtccgggctgcatcatcttcctggactgtttctgttgttctctgtgttcacattttttcctgcaacttttaagctactgtcttttttaaatagctatatgaacaccaaatttgggtaccattttatcactgttcaaagcactgtcaaattcctttcatcctttaatagttaagatctttgaatcttcagtctgatttttaatgtaagcaaaaacagaaccattgaatagtaatttcttgagaacctcaggtgttctataaacagtcctttcctgtatgtcttctattaccctaagaccagagttattttggttggttgttttgttttattttttgtttttgtatccatggctggcactttactcattgcacttgagtttattgccccataactaaaggatcaggatgatggtagaacggagatctgggtttcagagctttcccatttaagaaaaatagatcttgagattctgattcttttccaaacagtcccctgctttcatgtacagctttttctttaccttacccaaaattctggccttgaagcagttttcctctatggctttgcctttctgattttctcagaggctcgagtctttaatataaccccaaatgaaagaaccaaggggaggggtgggatggcacttttttttgttggtcttgttttgttttgttttttggttggttggttattttttaagattagccattctctgctgctatttccctacataatgtcaatttttaaccataattttgacatgattgagatgtacttgaggcttttttgttttaattgagaaaagactttgcaatttttttttaggatgagcctctcctagacttgacctagaatattacatattcctccagtaatactgaagagcaaaagagaggcaggattggggtcacagccgcttcttcagcatggaccaagtgggccttggggattgcagcgttctcgaagtggctgtaggactcgaatttacagaaagccacagaggtgcaacttgaggctctgctagcaagccaccagtgaggctattgggtaaccacctttctatacaggagattggaatctactttgtcatttatccaccacagtgacaaaggaaaagtggtgccgttatgcaatccatttaactcataaacatattactctgagtaactggccagccattcatcggatccttcattgggtactcctgaaatcagacatgttcctgtagaaagaattttaagttaggctttctatgcacctatcaagaatcaagagaatagattgtatcaaacaacggcagggaaatccttcagcaattctaatccactttgggttttcagctgtttttacatctaaagcaatagactagaactgaattatcttctacatagtaaaatcacaattgtggaattacaggaattctggtgatattaaggtgaaataacaaaacacaaaaggccctattttaacagttgatgtgacagtaagttttaatagaacctgtaacttcattttggaaatgcttctccaccaaataagggctttttcccctatttaaggagccagatggattgaaagatgtggaaataggcagctgtagatcttgatcttccaggtaccccatgtacctttattgagcttaattataatactgtcaaattgccacgatctcactaaaggatttctatttgctgtcagttaaaaataaagccctaaatacatttttattctttctactgagggcattgtctgttttctttgtaaatgccgttgttctctcgacgaggggatcctactanntgtcggcctgc

SEQ ID NO: 357835 - DNA, 2991 bp, Homo sapiens
ctctctctctctctctctctctctctctctctctctctctctctctctctctcctcgtgccgaattcggcacgagcattagccaacttcaagaaagcattcgggcagagataccctgtgaagatgaacaagagcaagaacataacggaccactggacaacaaaggaaaatccacggctggaaattttcttgttaatccccttgagccaaaaaatgcagaaaagctcaaggtgaagattgctgaccttggaaatgcttgttgggtgcacaaacatttcactgaagatattcaaacaaggcaatatcgttccttggaagttctaatcggatctggctataatacccctgctgacatttggagcacggcatgcatggcctttgaactggccacaggtgactatttgtttgaacctcattcaggggaagagtacactcgagatgaagatcacattgcattgatcatagaacttctggggaaggtgcctcgcaagctcattgtggcaggaaaatattccaaggaatttttcaccaaaaaagtggagaagtatgagtggtcgcaggaagaggcagctggcttcacagatttcttactgcccatgttggagctgatccctgagaagagagccactgccgccgagtgtctccggcacccttggcttaactcctaagcccctgcccagcaccacagcagagatcacacactgaccctccgcccttccccttcaagcattttcctcttcccttttcagggtgaagctcttccttcaagagtttctagatcttgttttttttttaatccaacatgttcatttgggtttgcttacttgaccctgtggagatccccacagccattgggcatcctaggtgaatttggccttggttgggctctgccaaagactaatggactaaaatgtgaaacagcctcttgccctgtacctttccttcccattaggacatcctttaaattataagcatcctttttgaaaagagctatgaaggtgtatgagcccatccttttattcattgactctaagagtcaaattttctagtgcatatcctattgccagcataaggatgaggagggggaaagggtcttaattctatgtacagcagagacattaaacttgctgtgtccgggctgcatcatcttcctggactgtttctgttgttctctgtgttcacattttttcctgcaacttttaagctactgtcttttttaaatagctatatgaacaccaaatttgggtaccattttatcactgttcaaagcactgtcaaattcctttcatcctttaatagttaagatctttgaatcttcagtctgatttttaatgtaagcaaaaacagaaccattgaatagtaatttcttgagaacctcaggtgttctataaacagtcctttcctgtatgtcttctattaccctaagaccagagttattttggttggttgttttgttttattttttgtttttgtatccatggctggcactttactcattgcacttgagtttattgccccataactaaaggatcaggatgatggtagaacggagatctgggtttcagagctttcccatttaagaaaaatagatcttgagattctgattcttttccaaacagtcccctgctttcatgtacagctttttctttaccttacccaaaattctggccttgaagcagttttcctctatggctttgcctttctgattttctcagaggctcgagtctttaatataaccccaaatgaaagaaccaaggggaggggtgggatggcacttttttttgttggtcttgttttgttttgttttttggttggttggttattttttaagattagccattctctgctgctatttccctacataatgtcaatttttaaccataattttgacatgattgagatgtacttgaggcttttttgttttaattgagaaaagactttgcaatttttttttaggatgagcctctcctagacttgacctagaatattacatattcctccagtaatactgaagagcaaaagagaggcaggattggggtcacagccgcttcttcagcatggaccaagtgggccttggggattgcagcgttctcgaagtggctgtaggactcgaatttacagaaagccacagaggtgcaacttgaggctctgctagcaagccaccagtgaggctattgggtaaccacctttctatacaggagattggaatctactttgtcatttatccaccacagtgacaaaggaaaagtggtgccgttatgcaatccatttaactcataaacatattactctgagtaactggccagccattcatcggatccttcattgggtactcctgaaatcagacatgttcctgtagaaagaattttaagttaggctttctatgcacctatcaagaatcaagagaatagattgtatcaaacaacggcagggaaatccttcagcaattctaatccactttgggttttcagctgtttttacatctaaagcaatagactagaactgaattatcttctacatagtaaaatcacaattgtggaattacaggaattctggtgatattaaggtgaaataacaaaacacaaaaggccctattttaacagttgatgtgacagtaagttttaatagaacctgtaacttcattttggaaatgcttctccaccaaataagggctttttcccctatttaaggagccagatggattgaaagatgtggaaataggcagctgtagatcttgatcttccaggtaccccatgtacctttattgagcttaattataatactgtcaaattgccacgatctcactaaaggatttctatttgctgtcagttaaaaataaagccctaaatacatttttattctttctactgagggcattgtctgttttctttgtaaatgccgtacaataaacaaattatttaataacctacatgtttccaaaaatctctgttcatttgttgtccaaattgctctgccctgagtaaaaggagga

SEQ ID NO: 357836 - DNA, 2222 bp, Homo sapiens
agcgcgcggcatcgtggggcgggggtggggcgggactgagggcggagtgtgagcgggctcggttttgggccgcggcgggagcgggagtcgccgccactcgagtgcgcaggcgcctggcgattaccggtctcaccatggagcggaaagtgcttgcgctccaggcccgaaagaaaaggaccaaggccaagaaggacaaagcccaaaggaaatctgaaactcagcaccgaggctctgctccccactctgagagtgatctaccagagcaggaagaggagattctgggatctgatgatgatgagcaagaagatcctaatgattattgtaaaggaggttatcatcttgtgaaaattggagatctattcaatgggagataccatgtgatccgaaagttaggctggggacacttttcaacagtatggttatcatgggatattcaggggaagaaatttgtggcaatgaaagtagttaaaagtgctgaacattacactgaaacagcactagatgaaatccggttgctgaagtcagttcgcaattcagaccctaatgatccaaatagagaaatggttgttcaactactagatgactttaaaatatcaggagttaatggaacacatatctgcatggtatttgaagttttggggcatcatctgctcaagtggatcatcaaatccaattatcaggggcttccactgccttgtgtcaaaaaaattattcagcaagtgttacagggtcttgattatttacataccaagtgccgtatcatccacactgacattaaaccagagaacatcttattgtcagtgaatgagcagtacattcggaggctggctgcagaagcaacagaatggcagcgatctggagctcctccgccttccggatctgcagtcagtactgctccccagcctaaaccagctgacaaaatgtcaaagaataagaagaagaaattgaagaagaagcagaagcgccaggcagaattactagagaagcgaatgcaggaaattgaggaaatggagaaagagtcgggccctgggcaaaaaagaccaaacaagcaagaagaatcagagagtcctgttgaaagacccttgaaagagaacccacctaataaaatgacccaagaaaaacttgaagagtcaagtaccattggccaggatcaaacgcttatggaacgtgatacagagggtggtgcagcagaaattaattgcaatggagtgattgaagtcattaattatactcagaacagtaataatgaaacattgagacataaagaggatctacataatgctaatgactgtgatgtccaaaatttgaatcaggaatctagtttcctaagctcccaaaatggagacagcagcacatctcaagaaacagactcttgtacacctataacatctgaggtgtcagacaccatggtgtgccagtcttcctcaactgtaggtcagtcattcagtgaacaacacattagccaacttcaagaaagcattcgggcagagataccctgtgaagatgaacaagagcaagaacataacggaccactggacaacaaaggaaaatccacggctggaaattttcttgttaatccccttgagccaaaaaatgcagaaaagctcaaggtgaagattgctgaccttggaaatgcttgttgggtgcacaaacatttcactgaagatattcaaacaaggcaatatcgttccttggaagttctaatcggatctggctataatacccctgctgacatttggagcacggcatgcatggcctttgaactggccacaggtgactatttgtttgaacctcattcaggggaagagtacactcgagatgaagatcacattgcattgatcatagaacttctggggaaggtgcctcgcaagctcattgtggcaggaaaatattccaaggaatttttcaccaaaaaaggactgaaacatatcacgaagctgaaaccttgcggacataaaagagcgacaaagagggagaaagtaagagaggacgcaaggcagaaggcaggagggctcaacagaatcataaagcccatggtggaagatgatccagaagaagaagaaccacgcgcacgagggaatacggaacctggagtgaactcataaagccgagaagagcacagcgaaatcaaaagcgaaccgcgacgacctaagcatactcacccagtaggagagaaacctaagaacaaacgagaaagacaagaaagggggacgaccgaaaca

SEQ ID NO: 357837 - DNA, 2978 bp, Homo sapiens
ttggcgctctacctcgccgcccctgagccttcccgtccgcctcgccacgcgcccggacggcctggggttgctgcccgtcagtctcgaaaggtgtttttggggaaaaaaatcacaatctggacgtgagaaaggacatgaggagactaaagacctgggattttgtcaatcagaatgaaaccaatgttgaaagacttttcaaatctattgttggtggtactctgtgactatgttcttggagaagctgaatatcttctcttgagagagccaggccatgtagcactaagcaacgacacagtgtatgtggatttccagtattttgatggtgctaatgggacactgaggaatgtatctgtcctgctgttggaggccaacaccaatcagactgtaactaccaagtacctcctgaccaaccagtcccagggaacactaaagtttgagtgcttctatttcaaggaggctggtgactactggttcacaatgactccagaagcaacagacaacagcactccattcccctggtgggagaaaagtgcctttctgaaggtggaatggcctgtctttcacgttgacttgaataggagtgccaaggcagcagaaggcaccttccaagtgggcctatttaccagtcaaccactgtgcccgtttcctgtggacaagcccaacattgtagtggatgtcatcttcaccaacagtcttcctgaggcaagaagaaattcaagacagccgctggaaataagaaccagcaaaaggacagaacttgctcaaggtcagtgggttgagtttggctgtgcacccttggggccagaagcctatgtcaccgtggtgctgaagctgcttgggcgagactcagtcattacctccacaggacccattgacctggcccagaaatttggatacaaactggtgatggtgccagaactcacatgtgagtccggggtagaggtgacagtgctgcctccaccatgcaccttcgtccaaggagtggtcactgtcttcaaggaggcccccagataccctgggaagaggaccattcacttggctgaaaacagcctgcccctgggagagaggaggacaatttttaactgtactttgtttgacatggggaagaataagtactgctttgactttggcatttcaagcagaagccatttttctgcaaaggaggagtgcatgctaattcagagaaatacagaaacttggggactgtggcagccatggagccagtgtagtgccacatgtggggatggtgtcagagagcgtcgccgagtgtgtctcacttccttcccctccagtcctgtctgccctggaatgtccttggaggcctccctgtgttccctggaggagtgtgctgctttccagccatccagcccatctcctcttcagccccagggtccagtgaagtccaacaacatcgtgactgtcactggtatatccttgtgcttgttcatcatcattgccactgtgctcatcacgctgtggaggaggttcggccggccagccaagtgcagcacacctgctcgacacaactccatccactcccccagcttccggaagaactcggacgaggagaatatctgcgagctgagcgagcagcgcgggagcttctcggatgggggagacgggcccacggggagtccaggggacacaggcatccctctgacctacaggcggagcgggccggtacctcccgaggatgatgcctctggcagcgagagcttccagtccaacgcccagaagataatcccacctctgttcagctaccgccttgcccagcagcagttaaaggagatgaaaaagaaaggtctgacggaaactaccaaagtgtatcacgtgtctcagagtcccctgacagacactgccattgatgcggcccccagcgctcccttagatttggaaagcccggaagaagctgcagcaaacaagttccggatcaaatccccatttccggagcagcccgcggtcagtgccggggaaaggcctccctccaggctggatctaaatgtgactcaggccagttgtgccataagccccagccagactctgatccgcaagtcacaggcaaggcacgtgggcagcagagggggcccgtccgaaaggagccatgccaggaacgcccatttcaggaggacagcgagtttccatgaagccaggcaggcccggccgttccgagagaggagcatgtccactctgactccacggcaggcccctgcctacagctctaggacgcggacctgcgagcaggcagaggacagatttaggcctcagagtcgaggtgcccacctgtttcctgaaaaactggagcatttccaagaggcaagtggaacccgtggtccattaaaccctctccctaaatcctacactttggggcagcccttgaggaaaccagaccttggggatcaccaggcaggattagtggccggaattgagagaacagagccccacagagctcgtcggggaccgtcccccagtcacaagagtgtctcaaggaagcagtcttctcccatatcccccaaagataactaccagagggtcagttctctgagcccttctcagtgtagaaaagacaagtgtcaaagcttccccactcaccctgagtttgccttctatgacaatacgtcgtttggcctcactgaggctgagcagaggatgctggacctcccaggatattttgggtcaaatgaagaggatgaaaccacaagtacacttagcgtggagaagctggtgatctagactgagaatcagcctgagctttacacagctggggtctgctactcgcgttttgtagacttttgtgtaactatttgtaccgtaggacagaatgtgaggaggaagtaacacacagaggaggatgtgtgtgtatgcatgtgtttgaattcacaaggaagaaattatttatcttgagctttttcctttgttattcaatttctattgatttattagtaataacaatgataataaaatgtaaatgagcaaatggg

SEQ ID NO: 357838 - DNA, 3101 bp, Homo sapiens
agatttagtgaatgcgtgcaagatgctggaagcactgaaattacctctcaggctccgtgtgtttgacagtggcgtcatggtaattgagcttcagtctcacaaggaagaggaaatggtggcctcggccctggagacagtttcagaaaagggatccctaacatcagaagagtttgctaagcttgtgggaatgtctgtcctcctagccaaagaaaggtgtttttggggaaaaaaatcacaatctggacgtgagaaaggacatgaggagactaaagacctgggattttgtcaatcagaatgaaaccaatgttgaaagacttttcaaatctattgttggtggtactctgtgactatgttcttggagaagctgaatatcttctcttgagagagccaggccatgtagcactaagcaacgacacagtgtatgtggatttccagtattttgatggtgctaatgggacactgaggaatgtatctgtcctgctgttggaggccaacaccaatcagactgtaactaccaagtacctcctgaccaaccagtcccagggaacactaaagtttgagtgcttctatttcaaggaggctggtgactactggttcacaatgactccagaagcaacagacaacagcactccattcccctggtgggagaaaagtgcctttctgaaggtggaatggcctgtctttcacgttgacttgaataggagtgccaaggcagcagaaggcaccttccaagtgggcctatttaccagtcaaccactgtgcccgtttcctgtggacaagcccaacattgtagtggatgtcatcttcaccaacagtcttcctgaggcaagaagaaattcaagacagccgctggaaataagaaccagcaaaaggacagaacttgctcaaggtcagtgggttgagtttggctgtgcacccttggggccagaagcctatgtcaccgtggtgctgaagctgcttgggcgagactcagtcattacctccacaggacccattgacctggcccagaaatttggatacaaactggtgatggtgccagaactcacatgtgagtccggggtagaggtgacagtgctgcctccaccatgcaccttcgtccaaggagtggtcactgtcttcaaggaggcccccagataccctgggaagaggaccattcacttggctgaaaacagcctgcccctgggagagaggaggacaatttttaactgtactttgtttgacatggggaagaataagtactgctttgactttggcatttcaagcagaagccatttttctgcaaaggaggagtgcatgctaattcagagaaatacagaaacttggggactgtggcagccatggagccagtgtagtgccacatgtggggatggtgtcagagagcgtcgccgagtgtgtctcacttccttcccctccagtcctgtctgccctggaatgtccttggaggcctccctgtgttccctggaggagtgtgctgctttccagccatccagcccatctcctcttcagccccagggtccagtgaagtccaacaacatcgtgactgtcactggtatatccttgtgcttgttcatcatcattgccactgtgctcatcacgctgtggaggaggttcggccggccagccaagtgcagcacacctgctcgacacaactccatccactcccccagcttccggaagaactcggacgaggagaatatctgcgagctgagcgagcagcgcgggagcttctcggatgggggagacgggcccacggggagtccaggggacacaggcatccctctgacctacaggcggagcgggccggtacctcccgaggatgatgcctctggcagcgagagcttccagtccaacgcccagaagataatcccacctctgttcagctaccgccttgcccagcagcagttaaaggagatgaaaaagaaaggtctgacggaaactaccaaagtgtatcacgtgtctcagagtcccctgacagacactgccattgatgcggcccccagcgctcccttagatttggaaagcccggaagaagctgcagcaaacaagttccggatcaaatccccatttccggagcagcccgcggtcagtgccggggaaaggcctccctccaggctggatctaaatgtgactcaggccagttgtgccataagccccagccagactctgatccgcaagtcacaggcaaggcacgtgggcagcagagggggcccgtccgaaaggagccatgccaggaacgcccatttcaggaggacagcgagtttccatgaagccaggcaggcccggccgttccgagagaggagcatgtccactctgactccacggcaggcccctgcctacagctctaggacgcggacctgcgagcaggcagaggacagatttaggcctcagagtcgaggtgcccacctgtttcctgaaaaactggagcatttccaagaggcaagtggaacccgtggtccattaaaccctctccctaaatcctacactttggggcagcccttgaggaaaccagaccttggggatcaccaggcaggattagtggccggaattgagagaacagagccccacagagctcgtcggggaccgtcccccagtcacaagagtgtctcaaggaagcagtcttctcccatatcccccaaagataactaccagagggtcagttctctgagcccttctcagtgtagaaaagacaagtgtcaaagcttccccactcaccctgagtttgccttctatgacaatacgtcgtttggcctcactgaggctgagcagaggatgctggacctcccaggatattttgggtcaaatgaagaggatgaaaccacaagtacacttagcgtggagaagctggtgatctagactgagaatcagcctgagctttacacagctggggtctgctactcgcgttttgtagacttttgtgtaactatttgtaccgtaggacagaatgtgaggaggaagtaacacacagaggaggatgtgtgtgtatgcatgtgtttgaattcacaaggaagaaattatttatcttgagctttttcctttgttattcaatttctattgatttattagtaataacaatgataataaaatgtaaatgagcaaatggg

SEQ ID NO: 357839 - DNA, 2984 bp, Homo sapiens
  misc_feature (2922)..(2922): n is a, c, g, or t
  misc_feature (2926)..(2926): n is a, c, g, or t
  misc_feature (2929)..(2929): n is a, c, g, or t
  misc_feature (2970)..(2973): n is a, c, g, or t
ttggcgctctacctcgccgcccctgagccttcccgtccgcctcgccacgcgcccggacggcctggggttgctgcccgtcagtctcgaaaggtgtttttggggaaaaaaatcacaatctggacgtgagaaaggacatgaggagactaaagacctgggattttgtcaatcagaatgaaaccaatgttgaaagacttttcaaatctattgttggtggtactctgtgactatgttcttggagaagctgaatatcttctcttgagagagccaggccatgtagcactaagcaacgacacagtgtatgtggatttccagtattttgatggtgctaatgggacactgaggaatgtatctgtcctgctgttggaggccaacaccaatcagactgtaactaccaagtacctcctgaccaaccagtcccagggaacactaaagtttgagtgcttctatttcaaggaggctggtgactactggttcacaatgactccagaagcaacagacaacagcactccattcccctggtgggagaaaagtgcctttctgaaggtggaatggcctgtctttcacgttgacttgaataggagtgccaaggcagcagaaggcaccttccaagtgggcctatttaccagtcaaccactgtgcccgtttcctgtggacaagcccaacattgtagtggatgtcatcttcaccaacagtcttcctgaggcaagaagaaattcaagacagccgctggaaataagaaccagcaaaaggacagaacttgctcaaggtcagtgggttgagtttggctgtgcacccttggggccagaagcctatgtcaccgtggtgctgaagctgcttgggcgagactcagtcattacctccacaggacccattgacctggcccagaaatttggatacaaactggtgatggtgccagaactcacatgtgagtccggggtagaggtgacagtgctgcctccaccatgcaccttcgtccaaggagtggtcactgtcttcaaggaggcccccagataccctgggaagaggaccattcacttggctgaaaacagcctgcccctgggagagaggaggacaatttttaactgtactttgtttgacatggggaagaataagtactgctttgactttggcatttcaagcagaagccatttttctgcaaaggaggagtgcatgctaattcagagaaatacagaaacttggggactgtggcagccatggagccagtgtagtgccacatgtggggatggtgtcagagagcgtcgccgagtgtgtctcacttccttcccctccagtcctgtctgccctggaatgtccttggaggcctccctgtgttccctggaggagtgtgctgctttccagccatccagcccatctcctcttcagccccagggtccagtgaagtccaacaacatcgtgactgtcactggtatatccttgtgcttgttcatcatcattgccactgtgctcatcacgctgtggaggaggttcggccggccagccaagtgcagcacacctgctcgacacaactccatccactcccccagcttccggaagaactcggacgaggagaatatctgcgagctgagcgagcagcgcgggagcttctcggatgggggagacgggcccacggggagtccaggggacacaggcatccctctgacctacaggcggagcgggccggtacctcccgaggatgatgcctctggcagcgagagcttccagtccaacgcccagaagataatcccacctctgttcagctaccgccttgcccagcagcagttaaaggagatgaaaaagaaaggtctgacggaaactaccaaagtgtatcacgtgtctcagagtcccctgacagacactgccattgatgcggcccccagcgctcccttagatttggaaagcccggaagaagctgcagcaaacaagttccggatcaaatccccatttccggagcagcccgcggtcagtgccggggaaaggcctccctccaggctggatctaaatgtgactcaggccagttgtgccataagccccagccagactctgatccgcaagtcacaggcaaggcacgtgggcagcagagggggcccgtccgaaaggagccatgccaggaacgcccatttcaggaggacagcgagtttccatgaagccaggcaggcccggccgttccgagagaggagcatgtccactctgactccacggcaggcccctgcctacagctctaggacgcggacctgcgagcaggcagaggacagatttaggcctcagagtcgaggtgcccacctgtttcctgaaaaactggagcatttccaagaggcaagtggaacccgtggtccattaaaccctctccctaaatcctacactttggggcagcccttgaggaaaccagaccttggggatcaccaggcaggattagtggccggaattgagagaacagagccccacagagctcgtcggggaccgtcccccagtcacaagagtgtctcaaggaagcagtcttctcccatatcccccaaagataactaccagagggtcagttctctgagcccttctcagtgtagaaaagacaagtgtcaaagcttccccactcaccctgagtttgccttctatgacaatacgtcgtttggcctcactgaggctgagcagaggatgctggacctcccaggatattttgggtcaaatgaagaggatgaaaccacaagtacacttagcgtggagaagctggtgatctagactgagaatcagcctgagctttacacagctggggtctgctactcgcgttttgtagacttttgtgtaactatttgtaccgtaggacagaatgtgaggaggaagtaacacacagaggaggatgtgtgtgtatgcatgtgtttgaattcacaaggaagaaattatttatctgacttactccttggtatcattttnttanttnagtttaacttcctggggaacatatgtataaattgatagaannnntctttctctcc

SEQ ID NO: 357840 - DNA, 1717 bp, Homo sapiens
ttggcgctctacctcgccgcccctgagccttcccgtccgcctcgccacgcgcccggacggcctggggttgctgcccgtcagtctcgaaagctttccagccatccagcccatctcctcttcagccccagggtccagtgaagtccaacaacatcgtgactgtcactggtatatccttgtgcttgttcatcatcattgccactgtgctcatcacgctgtggaggaggttcggccggccagccaagtgcagcacacctgctcgacacaactccatccactcccccagcttccggaagaactcggacgaggagaatatctgcgagctgagcgagcagcgcgggagcttctcggatgggggagacgggcccacggggagtccaggggacacaggcatccctctgacctacaggcggagcgggccggtacctcccgaggatgatgcctctggcagcgagagcttccagtccaacgcccagaagataatcccacctctgttcagctaccgccttgcccagcagcagttaaaggagatgaaaaagaaaggtctgacggaaactaccaaagtgtatcacgtgtctcagagtcccctgacagacactgccattgatgcggcccccagcgctcccttagatttggaaagcccggaagaagctgcagcaaacaagttccggatcaaatccccatttccggagcagcccgcggtcagtgccggggaaaggcctccctccaggctggatctaaatgtgactcaggccagttgtgccataagccccagccagactctgatccgcaagtcacaggcaaggcacgtgggcagcagagggggcccgtccgaaaggagccatgccaggaacgcccatttcaggaggacagcgagtttccatgaagccaggcaggcccggccgttccgagagaggagcatgtccactctgactccacggcaggcccctgcctacagctctaggacgcggacctgcgagcaggcagaggacagatttaggcctcagagtcgaggtgcccacctgtttcctgaaaaactggagcatttccaagaggcaagtggaacccgtggtccattaaaccctctccctaaatcctacactttggggcagcccttgaggaaaccagaccttggggatcaccaggcaggattagtggccggaattgagagaacagagccccacagagctcgtcggggaccgtcccccagtcacaagagtgtctcaaggaagcagtcttctcccatatcccccaaagataactaccagagggtcagttctctgagcccttctcagtgtagaaaagacaagtgtcaaagcttccccactcaccctgagtttgccttctatgacaatacgtcgtttggcctcactgaggctgagcagaggatgctggacctcccaggatattttgggtcaaatgaagaggatgaaaccacaagtacacttagcgtggagaagctggtgatctagactgagaatcagcctgagctttacacagctggggtctgctactcgcgttttgtagacttttgtgtaactatttgtaccgtaggacagaatgtgaggaggaagtaacacacagaggaggatgtgtgtgtatgcatgtgtttgaattcacaaggaagaaattatttatcttgagctttttcctttgttattcaatttctattgatttattagtaataacaatgataataaaatgtaaatgagcaaatggg

SEQ ID NO: 357841 - DNA, 820 bp, Homo sapiens
gccccgcggggctgtgggagccgaacgccgcggggtcagggcgtgcagtctgggacgcgggatgcttggcgctctacctcgccgcccctgagccttcccgtccgcctcgccacgcgcccggacggcctggggttgctgcccgtcagtctcgaaaggtaagaagcgccctccgcatcctggtgttcgcgcccgtgccgcgagactcttggaggctcctctggggtcgggaaatgcctccggactctgccacctcaccgcagcctgaaggcgcaggtggacggtggcggcccctccccacacccgcctcggccccaggggacgcttttaaggggtattggtctccacacttcggagtcccgaatttaagtgaacctggctctgccttggctcagatgttgccgagtgactgagactggccacagaaccttgaaaaatcgcgtcttgagctactgtttctttccaaaaagaaatcctttctgatatacaaaaagtatgaaatacaaggattaaattaaattaaagacggtcctcattaaggagggctttaagctgacgacgcgaggggtagacttccaggcgtgaactgggcttgcgggcatttgggaagctgagtagatggggcgagccagggcgtcccaggaacgctgcacccaacctgtgggaccagggcagagcaaactcgaatgaacagataaatgaagcctgtttacacgagctgctttagaactagagatttcctcccaataaatactattggtatatatacacacaagcatgtgcatgttggtcagaagggacaaaataactgcttcgttttcca

SEQ ID NO: 357842 - DNA, 1110 bp, Homo sapiens
  misc_feature (689)..(689): n is a, c, g, or t
cgcagcgccttttacggcgccgtaaagcagctcggccgagcagactgctgcggttcctgggtggcggcggcatggaggcgcgcttcacgcgcgggaagtcggcgctgctggagcgcgcgctggcgcggccgcgcaccgaggtgagcctgagcgccttcgcactgctgttctccgagctggtacagcactgccagagccgcgtcttctccgtggccgagctgcagtcgcgcctggccgcgctgggccgccaggtgggcgcgcgcgtgctggatgcgctggtggcgcgcgaaaagggtgcccggcgtgagaccaaggtgctaggcgcgttgctcttcgtcaagggcgccgtgtggaaggcgctcttcggcaaggaggcggacaagctggagcaggccaacgatgacgcgcgcaccttctacatcatcgagcgcgagccgctcatcaacacctacatctccgtgcccaaggagaacagcacgctcaactgcgccagcttcacggcgggcatcgtggaggcggtgctcacacacagcggcttccctgccaaggtcacggcgcactggcacaagggcaccacgctcatgatcaagttcgaggaggcagtcatcgctcgagaccgggccctggagggccgctgaccctgccggagataaaggatacagagagcccctcaaaaaaaaaacaaacanaaaacacaacaaaaacaccctacaaaaaaccccccggggcacacaaaaaggggggcagaaaaaagaactaacacagcacacgtggaacaacagtatttcggacggccctttttttggaacacccggggaaataccgggggctcccaaaaggagggggaaaaaaatcgcaggaaccccggttcttatatcactaatacgagcacaactacacagtttcatttacaggcaggtcagaagacaagcaatcgaaaacatcgatacggcaacgcaagcttatcagtaactcacttcacatatcatcctctacatcagacccatagttaatcacacctaataacgttctactagtcagtcgtcataactaaaaacacatcaatcatcaactgtccactaaatagctatcgacgcacttcactgtcat

SEQ ID NO: 357843 - DNA, 487 bp, Homo sapiens
cgcagcgccttttacggcgccgtaaagcagctcggccgagcagactgctgcggttcctgggtggcggcggcatggaggcgcgcttcacgcgcgggaagtcggcgctgctggagcgcgcgctggcgcggccgcgcaccgaggtgagcctgagcgccttcgcactgctgttctccgagctggtacagcactgccagagccgcgtcttctccgtggccgagctgcagtcgcgcctggccgcgctgggccgccaggtgggcgcgcgcgtgctggatgcgctggtggcgcgcgaaaagggtgcccggcgtgagaccaaggtgctaggcgcgttgctctgtgctcacacacagcggcttccctgccaaggtcacggcgcactggcacaagggcaccacgctcatgatcaagttcgaggaggcagtcatcgctcgagaccgggccctggagggccgctgaccctgccggagataaaggatacagagagcccctc

SEQ ID NO: 357844 - DNA, 1167 bp, Homo sapiens
ccaccctccaccccctttactctggctttccgcagggggccggcaggaaagttcccgagggtcgtctgtgctggagcgcagggcggggcaggagcgactgcccatatcccctcgtggtgcctcatctttgtcacctccctgccctagatctgacgcccctccccccatacactagttttctagttactcctgtaggtggcggagcgggcaggaaggcgctttcgcaattgaaccgtctgcatgcccgagggttgggtggtttcggcctcctcttctgttccccctcgtgtctctcctcccaccttgtccccactcccgctagcccgctgcctgccgagggtataagactcccccctcccttgatttatctggttacgtgtaatcgaggcgtgttttacgcgcatctctttgcaagtgggaagtcggcactggagcacacaacagtggcatgggtcgagggtgtcccagggcccctcgcggttctccctcctttcctcccggcctgctccccttcccattgcccctgacacctgcacttcctggtctccccgcagggtggcggcggcatggaggcgcgcttcacgcgcgggaagtcggcgctgctggagcgcgcgctggcgcggccgcgcaccgaggtgagcctgagcgccttcgcactgctgttctccgagctggtacagcactgccagagccgcgtcttctccgtggccgagctgcagtcgcgcctggccgcgctgggccgccaggtgggcgcgcgcgtgctggatgcgctggtggcgcgcgaaaagggtgcccggcgtgagaccaaggtgctaggcgcgttgctcttcgtcaagggcgccgtgtggaaggcgctcttcggcaaggaggcggacaagctggagcaggccaacgatgacgcgcgcaccttctacatcatcgagcgcgagccgctcatcaacacctacatctccgtgcccaaggagaacagcacgctcaactgcgccagcttcacggcgggcatcgtggaggcggtgctcacacacagcggcttccctgccaaggtcacggcgcactggcacaagggcaccacgctcatgatcaagttcgaggaggcagtcatcgctcgagaccgggccctggagggccgctgaccctgccggagataaaggatacagagagcccctc

SEQ ID NO: 357845 - DNA, 820 bp, Homo sapiens
cgcagcgccttttacggcgccgtaaagcagctcggccgagcagactgctgcggttcctggtgagaccctacccacccccctgcccgcgccgggcctcgtccgctccccggccccttccccgcgggcgtgtgggtcccgggctggggtctcggcgtccgcgatcccgagcccgctcgcttcggcccccctcaggaggctgcgaggaggggtggcggcggcatggaggcgcgcttcacgcgcgggaagtcggcgctgctggagcgcgcgctggcgcggccgcgcaccgaggtgagcctgagcgccttcgcactgctgttctccgagctggtacagcactgccagagccgcgtcttctccgtggccgagctgcagtcgcgcctggccgcgctgggccgccaggtgggcgcgcgcgtgctggatgcgctggtggcgcgcgaaaagggtgcccggcgtgagaccaaggtgctaggcgcgttgctcttcgtcaagggcgccgtgtggaaggcgctcttcggcaaggaggcggacaagctggagcaggccaacgatgacgcgcgcaccttctacatcatcgagcgcgagccgctcatcaacacctacatctccgtgcccaaggagaacagcacgctcaactgcgccagcttcacggcgggcatcgtggaggcggtgctcacacacagcggcttccctgccaaggtcacggcgcactggcacaagggcaccacgctcatgatcaagttcgaggaggcagtcatcgctcgagaccgggccctggagggccgctgaccctgccggagataaaggatacagagagcccctc

SEQ ID NO: 357846 - DNA, 974 bp, Homo sapiens
ccaccctccaccccctttactctggctttccgcagggggccggcaggaaagttcccgagggtcgtctgtgctggagcgcagggcggggcaggagcgactgcccatatcccctcgtggtgcctcatctttgtcacctccctgccctagatctgacgcccctccccccatacactagttttctagttactcctgtaggtggcggagcgggcaggaaggcgctttcgcaattgaaccgtctgcatgcccgagggttgggtggtttcggcctcctcttctgttccccctcgtgtctctcctcccaccttgtccccactcccgctagcccgctgcctgccgagggtataagactcccccctcccttgatttatctggttacgtgtaatcgaggcgtgttttacgcgcatctctttgcaagtgggaagtcggcactggagcacacaacagtggcatgggtcgagggtgtcccagggcccctcgcggttctccctcctttcctcccggcctgctccccttcccattgcccctgacacctgcacttcctggtctccccgcagggtggcggcggcatggaggcgcgcttcacgcgcgggaagtcggcgctgctggagcgcgcgctggcgcggccgcgcaccgagtcgtcaagggcgccgtgtggaaggcgctcttcggcaaggaggcggacaagctggagcaggccaacgatgacgcgcgcaccttctacatcatcgagcgcgagccgctcatcaacacctacatctccgtgcccaaggagaacagcacgctcaactgcgccagcttcacggcgggcatcgtggaggcggtgctcacacacagcggcttccctgccaaggtcacggcgcactggcacaagggcaccacgctcatgatcaagttcgaggaggcagtcatcgctcgagaccgggccctggagggccgctgaccctgccggagataaaggatacagagagcccctc

SEQ ID NO: 357847 - DNA, 672 bp, Homo sapiens
cgcagcgccttttacggcgccgtaaagcagctcggccgagcagactgctgcggttcctgggtggcggcggcatggaggcgcgcttcacgcgcgggaagtcggcgctgctggagcgcgcgctggcgcggccgcgcaccgaggtgagcctgagcgccttcgcactgctgttctccgagctggtacagcactgccagagccgcgtcttctccgtggccgagctgcagtcgcgcctggccgcgctgggccgccaggtgggcgcgcgcgtgctggatgcgctggtggcgcgcgaaaagggtgcccggcgtgagaccaaggtgctaggcgcgttgctcttcgtcaagggcgccgtgtggaaggcgctcttcggcaaggaggcggacaagctggagcaggccaacgatgacgcgcgcaccttctacatcatcgagcgcgagccgctcatcaacacctacatctccgtgcccaaggagaacagcacgctcaactgcgccagcttcacggcgggcatcgtggaggcggtgctcacacacagcggcttccctgccaaggtcacggcgcactggcacaagggcaccacgctcatgatcaagttcgaggaggcagtcatcgctcgagaccgggccctggagggccgctgaccctgccggagataaaggatacagagagcccctc

SEQ ID NO: 357848 - DNA, 843 bp, Homo sapiens
cgcagcgccttttacggcgccgtaaagcagctcggccgagcagactgctgcggttcctggtgagaccctacccacccccctgcccgcgccgggcctcgtccgctccccggccccttccccgcgggcgtgtgggtcccgggctggggtctcggcgtccgcgatcccgagcccgctcgcttcggcccccctcaggaggctgcgaggagggtgggtttctccccagtgtagagggtggcggcggcatggaggcgcgcttcacgcgcgggaagtcggcgctgctggagcgcgcgctggcgcggccgcgcaccgaggtgagcctgagcgccttcgcactgctgttctccgagctggtacagcactgccagagccgcgtcttctccgtggccgagctgcagtcgcgcctggccgcgctgggccgccaggtgggcgcgcgcgtgctggatgcgctggtggcgcgcgaaaagggtgcccggcgtgagaccaaggtgctaggcgcgttgctcttcgtcaagggcgccgtgtggaaggcgctcttcggcaaggaggcggacaagctggagcaggccaacgatgacgcgcgcaccttctacatcatcgagcgcgagccgctcatcaacacctacatctccgtgcccaaggagaacagcacgctcaactgcgccagcttcacggcgggcatcgtggaggcggtgctcacacacagcggcttccctgccaaggtcacggcgcactggcacaagggcaccacgctcatgatcaagttcgaggaggcagtcatcgctcgagaccgggccctggagggccgctgaccctgccggagataaaggatacagagagcccctc

SEQ ID NO: 357849 - DNA, 493 bp, Homo sapiens
gcggccgcgccagcgcgcgctccatttgcgccgacttcccgcgcgtgaagcgcgcctccatgccgccgccaggtgggcgcgcgcgtgctggatgcgctggtggcgcgcgaaaagggtgcccggcgtgagaccaaggtgctaggcgcgttgctcttcgtcaagggcgccgtgtggaaggcgctcttcggcaaggaggcggacaagctggagcaggccaacgatgacgcgcgcaccttctacatcatcgagcgcgagccgctcatcaacacctacatctccgtgcccaaggagaacagcacgctcaactgcgccagcttcacggcgggcatcgtggaggcggtgctcacacacagcggcttccctgccaaggtcacggcgcactggcacaagggcaccacgctcatgatcaagttcgaggaggcagtcatcgctcgagaccgggccctggagggccgctgaccctgccggagataaaggatacagagagcccctc

SEQ ID NO: 357850 - DNA, 1052 bp, Homo sapiens
ccaccctccaccccctttactctggctttccgcagggggccggcaggaaagttcccgagggtcgtctgtgctggagcgcagggcggggcaggagcgactgcccatatcccctcgtggtgcctcatctttgtcacctccctgccctagatctgacgcccctccccccatacactagttttctagttactcctgtaggtggcggagcgggcaggaaggcgctttcgcaattgaaccgtctgcatgcccgagggttgggtggtttcggcctcctcttctgttccccctcgtgtctctcctcccaccttgtccccactcccgctagcccgctgcctgccgagggtataagactcccccctcccttgatttatctggttacgtgtaatcgaggcgtgttttacgcgcatctctttgcaagtgggaagtcggcactggagcacacaacagtggcatgggtcgagggtgtcccagggcccctcgcggttctccctcctttcctcccggcctgctccccttcccattgcccctgacacctgcacttcctggtctccccgcagggtggcggcggcatggaggcgcgcttcacgcgcgggaagtcggcgctgctggagcgcgcgctggcgcggccgcgcaccgaggtgagcctgagcgccttcgcactgctgttctccgagctggtacagcactgccagagccgcgtcttctccgtggccgagctgcagtcgcgcctggccgcgctgggccgccaggtgggcgcgcgcgtgctggatgcgctggtggcgcgcgaaaagggtgcccggcgtgagaccaaggtgctaggcgcgttgctcttcgtcaagggcgccgtgtggaaggcgctcttcggcaaggaggcagcttcacggcgggcatcgtggaggcggtgctcacacacagcggcttccctgccaaggtcacggcgcactggcacaagggcaccacgctcatgatcaagttcgaggaggcagtcatcgctcgagaccgggccctggagggccgctgaccctgccggagataaaggatacagagagcccctc

SEQ ID NO: 357851 - DNA, 805 bp, Homo sapiens
tgacgtcagcgccgccgcggtgatttaacagcttttgttttgggcagaagaacctatgggcacaaaaagcaggaacgagtagcggtggctgaagaacgagcaggagcttgaatttcagttttcttatgaggaattttccagaaaagatatcttcactgtgaaataactaaataaatgcccactcagtacagtcactgtctcccttttggaacttgatggcaccttaagcccaggtttgcctccactctagaaactcatcagagtgatgcccttctcaaatgggggaggtcccaaagcggatatcctggcagtgtgaaaggccggctaaaggtttgtgccaagaggatctgtggaatgcatctcctacagctggtgctgctgagtaaccactctgatctggcatcttctttgatcaagttacagagcagagtttccagggctggggattgaagtcctgcctcctccctttgtctctggttgtcctcggtaatgtttttccctcaaggtactcatgatacttcccatgggctttccctgcactccaaacacagagctgagacttccacctaatgtagaaagctagcacgagccggcgctgacagatggaagacttgagatgttacaagattatatatggaaacacaaaaggagataccggagccatgacagactgtgatggggctggtggacagttcagcaagacattgatattgtccattggcgctcagttcatctgtaatgacacattcaaggatgacgattaatgtccaatatgtataaagtggatccctttgtaaaaacaata

SEQ ID NO: 357852 - DNA, 788 bp, Homo sapiens
  misc_feature (15)..(15): n is a, c, g, or t
  misc_feature (47)..(47): n is a, c, g, or t
  misc_feature (52)..(52): n is a, c, g, or t
  misc_feature (57)..(57): n is a, c, g, or t
ttaggttaaattaancccctaccttggccaattgcctattatccatnatttntaatnattggtacctgaatttctgttgaacttgctattgtcaggttttggtgtattatgttggttttggagaataaatttaaaagtttcctttatgttatctatacattgcctgaaaagagtttaaatagcattgaaaatgatctcttctttgaagatttaaccaatttcacctgtaaatctgtctgtgctttgtaattttggtgatactgttgactcaaattccaaaagcagtaaatgcagtgttttatatttttctattaaaaatgtaaaatcaaattatattactcatttgtatatagtctttgatttttttctaaagaatgagcccttattttatcataagctcagtgaagaagttgctacagttgtacttttttatttcccacctaatacactactctcagataatgtaccacatgacacacctatctgtgaatatcagaatctgaagttatatatcatgtgtaggccaatctcttaagctctgaatttatttgttcagctactcgatatattcacttagctattccataagctattccataagcacttcaaattcaatatatttagttcattatctgctcccctcttgctattgccaagtttaaaatagtaatttcctccctttcccttgcttcccacatccaatcaattaccatgcccctttacctcagttttctaaataactttaaaatctacccatctctctccattttcccagccactaccttagt

SEQ ID NO: 357853 - DNA, 518 bp, Homo sapiens
tgacgtcagcgccgccgcggtgatttaacagcttttgttttgggcagaagaacctatgggcacaaaaagcaggaacgagtagcggtggctgaagaacgagcaggagcttgaatttcagttttcttatgaggaattttccagaaaagatatcttcactgtgaaataactaaataaatgcccactcagtacactttccctgcactccaaacacagagctgagacttccacctaatgtagaaagctagcacgagccggcgctgacagatggaagacttgagatgttacaagattatatatggaaacacaaaaggtctcactctgtcactccagcctggatgacagagcaacaccctgtcttaaaaaagatcaacattatgaattttatggttatgtataatttaccacaattaaaaaatagtagcagccagatgtggtggcttacaccttggcctccgaaagagttgggattataggcatgagccaacatgcatggtcaaatgctttttaaactagtaatt

SEQ ID NO: 357854 - DNA, 607 bp, Homo sapiens
tgacgtcagcgccgccgcggtgatttaacagcttttgttttgggcagaagaacctatgggcacaaaaagcaggaacgagtagcggtggctgaagaacgagcaggagcttgaatttcagttttcttatgaggaattttccagaaaagatatcttcactgtgaaataactaaataaatgcccactcagtacagtcactgtctcccttttggaacttgatggcaccttaagcccaggtttgcctccactctagaaactcatcagagtgatgcccttctcaaatgggggaggtcccaaagcggatatcctggcagtgtgaaaggccggctaaagctttccctgcactccaaacacagagctgagacttccacctaatgtagaaagctagcacgagccggcgctgacagatggaagacttgagatgttacaagattatatatggaaacacaaaaggagataccggagccatgacagactgtgatggggctggtggacagttcagcaagacattgatattgtccattggcgctcagttcatctgtaatgacacattcaaggatgacgattaatgtccaatatgtataaagtggatccctttgtaaaaacaata

SEQ ID NO: 357855 - DNA, 542 bp, Homo sapiens
tgacgtcagcgccgccgcggtgatttaacagcttttgttttgggcagaagaacctatgggcacaaaaagcaggaacgagtagcggtggctgaagaacgagcaggagcttgaatttcagttttcttatgaggaattttccagaaaagatatcttcactgtgaaataactaaataaatgcccactcagtacaacaaaaatacctgctacatgcttccttctgtatgaatacatgagacctaccttcattcatgtttcctctatgaagctttccctgcactccaaacacagagctgagacttccacctaatgtagaaagctagcacgagccggcgctgacagatggaagacttgagatgttacaagattatatatggaaacacaaaaggagataccggagccatgacagactgtgatggggctggtggacagttcagcaagacattgatattgtccattggcgctcagttcatctgtaatgacacattcaaggatgacgattaatgtccaatatgtataaagtggatccctttgtaaaaacaata

SEQ ID NO: 357856 - DNA, 2954 bp, Homo sapiens
agtttttgccaatctaaaaggtgaaaatattttatcttgcatgaataaagttgaatattttttctttttttcccttaatcgtttgcatttcttctactgggttgtctttttaactgatgcataagagctttttaaattttctcttttttaagagttaggatcttgctgtgtggcttaactctcaaactcttgggctctagcagtcctcccaccttagcctcccgagtagctgggactacaggcatgtgctgctgtgtgcagcagatgtgtacaaaagagctttaaaggtagtactgaaaacagttcctttatagttctatgttgaaaataatttcttcccacttttttattgtcttaatttacagattttttgctgtgcagtaggttttatgttgtcaaatgtattaatcttttaacctaggttttaagttaaaatgctttccccatgctaagatttttaaaaagaaaaactcttccatgtttcctaatatttatactgtttcaaatttttatgttcaaatctttgatccatctgaaattcactttggtgtaaggaataaggaagcattctaaatagatgtcatacacatcaacaaatatatatatatagcccccacccaaatgtggatgtaaactgtttctacatcattattgaataatccatcctctcacccactgatctgaaatctcactgttgctatatactatggtcctatgtggattagcatctacgcctggattctctattcgctcctctgactattcctggcccagtaacttgtctgacaagttcagttttacagtatgttttgttctctagtaaagcagcacacccttgctctcccaactcttccttttcagttttcttggctattcttgagggtttttttccagataaacttcaataaacgtgtatcaaggtccaaaatgaacgctggtaggtttttttttttttcgagttggggtctcactctgtcgcctaggctggagtgcagtggcgtggatctctgctcactgcaagctccgcctcccgggttcatgccattctcctgactcagcctccggagtagcggggactacaggcgcacgccaccaggcccggctaatttttttttttgtatttttagtagagacggggtttcaccgcgttagccagaatggtttctatctcctgacctcatgatccgcccacctcggcctcccaaagtgctgggattacaggcgtgagccactgtgcctggccaaacgctggtaggttttgagtgagaccacattacatttaaatatatttacaatgttttctgctctattctttagtagacttttcctcacgtggtcctacgcatttctttctaagtttattttcatatagcctatccctgtctacaatttaaattgggatcttctatattctagttattatttgtaaataagaaaactactgacttttttctagtatattttctcagaataggattttctatttttctataaaatgaccaatgttatgaagcttcgtaagttttgtcaaagtgatacacacatacagcaaaaaatcaaatagtacagaagtataaaagcaacaacctctgccttgccccttctccaccttcaggtccccttcccagatacaataatttttagctttttatttttaattattctggttgttacctacataactctgggcaatatggaaaagttattgattttgtatattaatttcataatcagttaccttgatgaattctcttgtttctagtagtttttctttagggttttaaagggatacaatcataccatttgcagttagtaaccattttatctcctcttatttccaacttcgtactgttttctcttgtctaatttgtttttaattggtgggtacttctagaacaaggttaaataaaagtggtgttggtgggcgtccttatttctgatattaatgggaatgagtataatgtataaatatataaccatgattttggtttttttccaagtttttatcagtaatgattgctgagttttatcaaaatttttttggcatccattgagaggattatatattactctttgacacattaatgtggttaattaaagtaaccaacttattaaccttgaaatagtcttagttaaataaaccctacttgtcaatgctatatcattattttaatattgtactgaacattttacaaaggtgtttcaccataaggcatattgatctgtaatttttttttttctgttgaacttgctattgtcaggttttggtgtattatgttggttttggagaataaatttaaaagtttcctttatgttatctatacattgcctgaaaagagtttaaatagcattgaaaatgatctcttctttgaagatttaaccaatttcacctgtaaatctgtctgtgctttgtaattttggtgatactgttgactcaaattccaaaagcagtaaatgcagtgttttatatttttctattaaaaatgtaaaatcaaattatattactcatttgtatatagtctttgatttttttctaaagaatgagcccttattttatcataagctcagtgaagaagttgctacagttgtacttttttatttcccacctaatacactactctcagataatgtaccacatgacacacctatctgtgaatatcagaatctgaagttatatatcatgtgtaggccaatctcttaagctctgaatttatttgttcagctactcgatatattcacttagctattccataagctattccataagcacttcaaattcaatatatttagttcattatctgctcccctcttgctattgccaagtttaaaatagtaatttcctccctttcccttgcttcccacatccaatcaattaccatgcccctttacctcagttttctaaataactttaaaatctacccatctctctccattttcccagccactaccttagt

SEQ ID NO: 357857 - DNA, 2527 bp, Homo sapiens
tgacgtcagcgccgccgcggtgatttaacagcttttgttttgggcagaagaacctatgggcacaaaaagcaggaacgagtagcggtggctgaagaacgagcaggagcttgaatttcagttttcttatgaggaattttccagaaaagatatcttcactgtgaaataactaaataaatgcccactcagtacagtcactgtctcccttttggaacttgatggcaccttaagcccaggtttgcctccactctagaaactcatcagagtgatgcccttctcaaatgggggaggtcccaaagcggatatcctggcagtgtgaaaggccggctaaaggtttgtgccaagaggatctgtggaatgcatctcctacagctggtgctgctgagtaaccactctgatctggcatcttctttgatcaagttacagagcagagtttccagggctggggattgaagtcctgcctcctccctttgtctctggttgtcctcgctttccctgcactccaaacacagagctgagacttccacctaatgtagaaagctagcacgagccggcgctgacagatggaagacttgagatgttacaagattatatatggaaacacaaaaggagtggagttgctgggtcatatggcaattcatttgaggaactgagaagcttattccatggaggctgaactgttttatattcccaccagcaacgttagagacggggtttcaccgcgttagccagaatggtttctatctcctgacctcatgatccgcccacctcggcctcccaaagtgctgggattacaggcgtgagccactgtgcctggccaaacgctggtaggttttgagtgagaccacattacatttaaatatatttacaatgttttctgctctattctttagtagacttttcctcacgtggtcctacgcatttctttctaagtttattttcatatagcctatccctgtctacaatttaaattgggatcttctatattctagttattatttgtaaataagaaaactactgacttttttctagtatattttctcagaataggattttctatttttctataaaatgaccaatgttatgaagcttcgtaagttttgtcaaagtgatacacacatacagcaaaaaatcaaatagtacagaagtataaaagcaacaacctctgccttgccccttctccaccttcaggtccccttcccagatacaataatttttagctttttatttttaattattctggttgttacctacataactctgggcaatatggaaaagttattgattttgtatattaatttcataatcagttaccttgatgaattctcttgtttctagtagtttttctttagggttttaaagggatacaatcataccatttgcagttagtaaccattttatctcctcttatttccaacttcgtactgttttctcttgtctaatttgtttttaattggtgggtacttctagaacaaggttaaataaaagtggtgttggtgggcgtccttatttctgatattaatgggaatgagtataatgtataaatatataaccatgattttggtttttttccaagtttttatcagtaatgattgctgagttttatcaaaatttttttggcatccattgagaggattatatattactctttgacacattaatgtggttaattaaagtaaccaacttattaaccttgaaatagtcttagttaaataaaccctacttgtcaatgctatatcattattttaatattgtactgaacattttacaaaggtgtttcaccataaggcatattgatctgtaatttttttttttctgttgaacttgctattgtcaggttttggtgtattatgttggttttggagaataaatttaaaagtttcctttatgttatctatacattgcctgaaaagagtttaaatagcattgaaaatgatctcttctttgaagatttaaccaatttcacctgtaaatctgtctgtgctttgtaattttggtgatactgttgactcaaattccaaaagcagtaaatgcagtgttttatatttttctattaaaaatgtaaaatcaaattatattactcatttgtatatagtctttgatttttttctaaagaatgagcccttattttatcataagctcagtgaagaagttgctacagttgtacttttttatttcccacctaatacactactctcagataatgtaccacatgacacacctatctgtgaatatcagaatctgaagttatatatcatgtgtaggccaatctcttaagctctgaatttatttgttcagctactcgatatattcacttagctattccataagctattccataagcacttcaaattcaatatatttagttcattatctgctcccctcttgctattgccaagtttaaaatagtaatttcctccctttcccttgcttcccacatccaatcaattaccatgcccctttacctcagttttctaaataactttaaaatctacccatctctctccattttcccagccactaccttagt

SEQ ID NO: 357858 - DNA, 1780 bp, Homo sapiens
gggtgcagtggctcacgcctgtaatctcagcactttgggaggccgaggcgtgagccactgtgcctggccaaacgctggtaggttttgagtgagaccacattacatttaaatatatttacaatgttttctgctctattctttagtagacttttcctcacgtggtcctacgcatttctttctaagtttattttcatatagcctatccctgtctacaatttaaattgggatcttctatattctagttattatttgtaaataagaaaactactgacttttttctagtatattttctcagaataggattttctatttttctataaaatgaccaatgttatgaagcttcgtaagttttgtcaaagtgatacacacatacagcaaaaaatcaaatagtacagaagtataaaagcaacaacctctgccttgccccttctccaccttcaggtccccttcccagatacaataatttttagctttttatttttaattattctggttgttacctacataactctgggcaatatggaaaagttattgattttgtatattaatttcataatcagttaccttgatgaattctcttgtttctagtagtttttctttagggttttaaagggatacaatcataccatttgcagttagtaaccattttatctcctcttatttccaacttcgtactgttttctcttgtctaatttgtttttaattggtgggtacttctagaacaaggttaaataaaagtggtgttggtgggcgtccttatttctgatattaatgggaatgagtataatgtataaatatataaccatgattttggtttttttccaagtttttatcagtaatgattgctgagttttatcaaaatttttttggcatccattgagaggattatatattactctttgacacattaatgtggttaattaaagtaaccaacttattaaccttgaaatagtcttagttaaataaaccctacttgtcaatgctatatcattattttaatattgtactgaacattttacaaaggtgtttcaccataaggcatattgatctgtaatttttttttttctgttgaacttgctattgtcaggttttggtgtattatgttggttttggagaataaatttaaaagtttcctttatgttatctatacattgcctgaaaagagtttaaatagcattgaaaatgatctcttctttgaagatttaaccaatttcacctgtaaatctgtctgtgctttgtaattttggtgatactgttgactcaaattccaaaagcagtaaatgcagtgttttatatttttctattaaaaatgtaaaatcaaattatattactcatttgtatatagtctttgatttttttctaaagaatgagcccttattttatcataagctcagtgaagaagttgctacagttgtacttttttatttcccacctaatacactactctcagataatgtaccacatgacacacctatctgtgaatatcagaatctgaagttatatatcatgtgtaggccaatctcttaagctctgaatttatttgttcagctactcgatatattcacttagctattccataagctattccataagcacttcaaattcaatatatttagttcattatctgctcccctcttgctattgccaagtttaaaatagtaatttcctccctttcccttgcttcccacatccaatcaattaccatgcccctttacctcagttttctaaataactttaaaatctacccatctctctccattttcccagccactaccttagt

SEQ ID NO: 357859 - DNA, 2895 bp, Homo sapiens
agtttttgccaatctaaaaggtgaaaatattttatcttgcatgaataaagttgaatattttttctttttttcccttaatcgtttgcatttcttctactgggttgtctttttaactgatgcataagagctttttaaattttctcttttttaagagttaggatcttgctgtgtggcttaactctcaaactcttgggctctagcagtcctcccaccttagcctcccgagtagctgggactacaggcatgtgctgctgtgtgcagcagatgtgtacaaaagagctttaaaggtagtactgaaaacagttcctttatagttctatgttgaaaataatttcttcccacttttttattgtcttaatttacagattttttgctgtgcagtaggttttatgttgtcaaatgtattaatcttttaacctaggttttaagttaaaatgctttccccatgctaagatttttaaaaagaaaaactcttccatgtttcctaatatttatactgtttcaaatttttatgttcaaatctttgatccatctgaaattcactttggtgtaaggaataaggaagcattctaaatagatgtcatacacatcaacaaatatatatatatagcccccacccaaatgtggatgtaaactgtttctacatcattattgaataatccatcctctcacccactgatctgaaatctcactgttgctatatactatggtcctatgtggattagcatctacgcctggattctctattcgctcctctgactattcctggcccagtaacttgtctgacaagttcagttttacagtatgttttgttctctagtaaagcagcacacccttgctctcccaactcttccttttcagttttcttggctattcttgagggtttttttccagataaacttcaataaacgtgtatcaaggtccaaaatgaacgctggtaggtttttttttttttcgagttggggtctcactctgtcgcctaggctggagtgcagtggcgtggatctctgctcactgcaagctccgcctcccgggttcatgccattctcctgactcagcctccggagtagcggggactacaggcgcacgccaccaggcccggctaatttttttttttgtatttttagtagagacggggtttcaccgcgttagccagaatggtttctatctcctgacctcatgatccgcccacctcggcctcccaaagtgctgggattacaggcgtgagccactgtgcctggccaaacgctggtaggttttgagtgagaccacattacatttaaatatatttacaatgttttctgctctattctttagtagacttttcctcacgtggtcctacgcatttctttctaagtttattttcatatagcctatccctgtctacaatttaaattgggatcttctatattctagttattatttgtaaataagaaaactactgacttttttctagtatattttctcagaataggattttctatttttctataaaatgaccaatgttatgaagcttcgtaagttttgtcaaagtgatacacacatacagcaaaaaatcaaatagtacagaagtataaaagcaacaacctctgccttgccccttctccaccttcaggtccccttcccagatacaataatttttagctttttatttttaattattctggttgttacctacataactctgggcaatatggaaaagttattgattttgtatattaatttcataatcagttaccttgatgaattctcttgtttctagtagtttttctttagggttttaaagggatacaatcataccatttgcagttagtaaccattttatctcctcttatttccaacttcgtactgttttctcttgtctaatttgtttttaattggtgggtacttctagaacaaggttaaataaaagtggtgttggtgggcgtccttatttctgatattaatgggaatgagtataatgtataaatatataaccatgattttggtttttttccaagtttttatcagtaatgattgctgagttttatcaaaatttttttggcatccattgagaggattatatattactctttgacacattaatgtggttaattaaagtaaccaacttattaaccttgaaatagtcttagttaaataaaccctacttgtcaatgctatatcattattttaatatttttctgttgaacttgctattgtcaggttttggtgtattatgttggttttggagaataaatttaaaagtttcctttatgttatctatacattgcctgaaaagagtttaaatagcattgaaaatgatctcttctttgaagatttaaccaatttcacctgtaaatctgtctgtgctttgtaattttggtgatactgttgactcaaattccaaaagcagtaaatgcagtgttttatatttttctattaaaaatgtaaaatcaaattatattactcatttgtatatagtctttgatttttttctaaagaatgagcccttattttatcataagctcagtgaagaagttgctacagttgtacttttttatttcccacctaatacactactctcagataatgtaccacatgacacacctatctgtgaatatcagaatctgaagttatatatcatgtgtaggccaatctcttaagctctgaatttatttgttcagctactcgatatattcacttagctattccataagctattccataagcacttcaaattcaatatatttagttcattatctgctcccctcttgctattgccaagtttaaaatagtaatttcctccctttcccttgcttcccacatccaatcaattaccatgcccctttacctcagttttctaaataactttaaaatctacccatctctctccattttcccagccactaccttagt

SEQ ID NO: 357860 - DNA, 1396 bp, Homo sapiens
tgacgtcagcgccgccgcggtgatttaacagcttttgttttgggcagaagaacctatgggcacaaaaagcaggaacgagtagcggtggctgaagaacgagcaggagcttgaatttcagttttcttatgaggaattttccagaaaagatatcttcactgtgaaataactaaataaatgcccactcagtacaacaaaaatacctgctacatgcttccttctgtatgaatacatgagacctaccttcattcatgtttcctctatgaagctttccctgcactccaaacacagagctgagacttccacctaatgtagaaagctagcacgagccggcgctgacagatggaagacttgagatgttacaagattatatatggaaacacaaaaggagtggagttgctgggtcatatggcaattcatttgaggaactgagaagcttattccatggaggctgaactgttttatattcccaccagcaacgtgtaaggttccagtttatctacatcatcaccaacacttgctattttccatttcattaatgatagccatcctagtggatttgaagtggtaccttattatcgtggttttgattgcattctctattgactaatgatatcgagcatcttttcatgtattttttggtcatttggtcatttttcttttttaattttaaaattttgagacaggctctcactatgttgcccaggtggtctcaaactcctgggttccagcgatgctcatgcctcagtctcccaaaggggtgggattacaggtgtgagccactttgcccagcccatttgtatatctcctttggagaatatctaggttcttttgaaggtagctgcatataaactagccaaattaacagactgtggtttttagatggctttccatatctacaagaactatttagttctcaaaactgggaagaaatgtttcagaggcatcattaattcataatctaaaaatttatcttgggtttccttttttcccccagattctgtatcctccatagtcctattcatgacatgggtcgttcatctctgtattctaaaccctcaatgaactgtagacagtaataaatatttattggatgaatggtctctcatcagctactcgggaggctgaggcgggagaattgcttgggcctgggaggcagaggttgcagtgagctgagatcatgccaccgcactccaaccagggcaacagatcaagactccatcttggggaaaaaaaaaaaaattagccaggcttggtggtggatgcctgtgttcccagcttcttgggagactgaagcaggaggatcgcttgagcccaggaggcggaggttgcagtgagttgagattgtgccactgtactccagcctgggcaacagaaacaatactccgtctcaaaaaaa

SEQ ID NO: 357861 - DNA, 1102 bp, Homo sapiens
tgacgtcagcgccgccgcggtgatttaacagcttttgttttgggcagaagaacctatgggcacaaaaagcaggaacgagtagcggtggctgaagaacgagcaggagcttgaatttcagttttcttatgaggaattttccagaaaagatatcttcactgtgaaataactaaataaatgcccactcagtacagtcactgtctcccttttggaacttgatggcaccttaagcccaggtttgcctccactctagaaactcatcagagtgatgcccttctcaaatgggggaggtcccaaagcggatatcctggcagtgtgaaaggccggctaaaggtttgtgccaagaggatctgtggaatgcatctcctacagctggtgctgctgagtaaccactctgatctggcatcttctttgatcaagttacagagcagagtttccagggctggggattgaagtcctgcctcctccctttgtctctggttgtcctcgctttccctgcactccaaacacagagctgagacttccacctaatgtagaaagctagcacgagccggcgctgacagatggaagacttgagatgttacaagattatatatggaaacacaaaaggagtggagttgctgggtcatatggcaattcatttgaggaactgagaagcttattccatggaggctgaactgttttatattcccaccagcaacgtattctgtatcctccatagtcctattcatgacatgggtcgttcatctctgtattctaaaccctcaatgaactgtagacagtaataaatatttattggatgaatggtctctcatcagctactcgggaggctgaggcgggagaattgcttgggcctgggaggcagaggttgcagtgagctgagatcatgccaccgcactccaaccagggcaacagatcaagactccatcttggggaaaaaaaaaaaaattagccaggcttggtggtggatgcctgtgttcccagcttcttgggagactgaagcaggaggatcgcttgagcccaggaggcggaggttgcagtgagttgagattgtgccactgtactccagcctgggcaacagaaacaatactccgtctcaaaaaaa

SEQ ID NO: 357862 - DNA, 574 bp, Homo sapiens
agagatggggtttcactatgttgttcaggctggtcttaaactcctgggctcaaatgatcctctgtctcagcctccaaaagtgctggaattacagtcatgagccactgcaactgaattgcctttttttttttaaagagacattcttgctatgctgcccagctggagtgtagtggtgggatcacagctcactgcaggttcaacctcctgggctcaagtgatccctcaggctcaggtgatccccctgccttagcctccagagtaagtaggactataggctagcctccagagtaggtaggactatatgcccagctaatccagataccctttttattaaaaatctgaaaatcaggctgggaccagtggctcacacctgtaattgcagcactttgggaggacaaggtgggtggatcatgaggtcgggagttcgagaccagcctgaccaatatggtaaaaccccatctctactacaattacaaaaattagccaggtgtggtggcatgcacctgtagttccagctactcggaaggctgaggcaggagaatcgcttgaactcaggaggtggaggttgcagtga

SEQ ID NO: 357863 - DNA, 314 bp, Homo sapiens
ttatgacaactgtttctatgcatatgaaccaagcaaccaaatatctataaccatggaaatatctgattagaaatatttctaatttgggccgggctcggtggctcacgcctataatcccagcactttgggaggccaaggcaggcggatcacctgaggtcgggagttcgagaccagcctgaccaatatggtaaaaccccatctctactacaattacaaaaattagccaggtgtggtggcatgcacctgtagttccagctactcggaaggctgaggcaggagaatcgcttgaactcaggaggtggaggttgcagtga

SEQ ID NO: 357864 - DNA, 427 bp, Homo sapiens
ggcagattgtttcagctcttcaattcgagatcaaccccgggcaacatggtgaaaccccatctctacaaaaaatgcacaaatgagtcaggtgtggtggcacatgcctgtagtcccagctttttgggaggctgaggtggaggatggcttcagcctaggaggcagaggatgcagtgagccaagagcatgccactgcactccagcatgggccacagagactaaccttgtctcagaaaaaaagaaaatgaggttcttgatttataaaactggaaaaggccaggcacagtggctcacacctgtaatcccagcacagattactctgggcaacagagcaagactctgtccctccccctcaaaaaaataagttaaataaaaaataaaataaaactgaaacagaaggaccacacaaaccccaaagcaacaacaacaa

SEQ ID NO: 357865 - DNA, 186 bp, Homo sapiens
caggagttaggaacacaggttccaagcagcctgatttcaaatcctggttccatctctcactagctggccaagggacttgcctcctctgtggaagtggtcttggaagtgggctagcacacctatcccagtctcacaggctactgtgaaggcaacatggaacgcagagtgtgaacacagtccctggtg

SEQ ID NO: 357866 - DNA, 708 bp, Homo sapiens
ccaatttaaactcactgtgatagcacacgtcgtgacggatttgggtggtggtttcctttccagttggctctaagaataatgtattaagccagaccacaatcagatgccaagcccatgattagctttctctctccacttgggtcgcttttgttttttgagcagatatgcagtgctggatacagccatttgtgggtgggctgaggatgggctctgttaaaagagatgtgataatggctgtgaaaatccattttaagtgctgcaacccttgttgctttaaatgttatctgtgaatttcctgctaagggttgcatttctgtaatagtgattgcaaactggtggcccctgggccaaatatggctcacagatgtgttttatttggccagctcagtgttataaaagcatctgaatttgtggccaatatttacatattaagagatgctacacaaaaatctagatttcggtcttctcatgagaaactcgatgtgaccacattgggcccacttttccatgtggcaacaattggctggggctgagttgcagctggctctttgagacagagtatgtaccatctggttagcataatatctatccagctcacttctcccatttaggtaacttgctgcatctctgtgagtgtttagattttcaacactggtttatcaagatcaagagatcaaagatcaagagatcttaattatctaagcttct

SEQ ID NO: 357867 - DNA, 435 bp, Homo sapiens
aaccaaattaataaataaaaatataaaagagaaaagatagtccgactctgttccccaggctgttgtgcagtggcctgatcttgctcactgcaacctccgcctcctgtgcggtcctaccacctcagcctctcaagtagctgggaccacaagtgccaaccaccatgcctggctaatgatataaaaccaattgacaggggctggggtgcatacagggttggatgtaaatgagcttgcacgttactttggatcatcagtttcgaagtcagcatgtcgtatatgtgtatatggatgtattttctatgtgttaggtatttccattcacctctgctgactgacccaattgggaggtggcagggaggagatcgctagttgactgggctaatggaaagtcaactaaacttataaagcctgaaattgggaacagattgtgaggac

SEQ ID NO: 357868 - DNA, 1023 bp, Homo sapiens
  misc_feature (975)..(975): n is a, c, g, or t
cctacctcagcctcccgagtagctgggattacaggcatgcaccaccaagccaggctaattttttctatttttagtagagacggggtttctccacattggtcaggctggtctcgaactcctgacctcaggtgatccacctgcctcggcctcccaaagtgctgggattacaggtgtgagtcactgcacctggccaaaaatatattcttaattaacagtattatgttattcataaatataggttgtctcatgatacagacttgtcttcctcaatttagtagttcaactaaataaagaagttttcctaagcagcccagcaaatcattctgcagcagatactatttccagtatttgtagttttggtcattttgaacaaagctgtcagtaaaagctgctgaaattccaaggatgggtgtgaggagggcatgcttcataccacatattctgtgataaggagtggtaggggccatggcatgcatgatggtgctaccaccctgacgttgatcctgggcaggataattgccacttggttatataaaggcagataagctccctgtttttgtggggtagaagaaatagaaaaccggaaatattgactttaggccaggccttttcactatttatttttctaaatactccctggcttacggccttaggtataaagtctctgcccagctttcaagacattttaagctttcatgtttcttgtcagccatgattattctgtataatcaatgctttaaaagaacatagaaattcctatatgtacatgcatgttttcacaggatatttttaaacaagctactgaagatagattaacaagtgcaaaggaattgccttatttcgagggtgatttctggcccaatgttctggaagaaagcattaaggaactggaacaggaggaagaagagagaaaacgagaggaaaacaccagcaatgaaagcacagatgtgaccaagggagggaggaaggaaggangcaaggaaggaagggagggagggagggagggagagaggctgtgccgaa

SEQ ID NO: 357869 - DNA, 639 bp, Homo sapiens
acaaaacaaaaaacagccaggcatgatagtatgtgcctatcctagccaggtagctgagaggccaaggcaggaaaatggcttgagcccaggagtttaaggttgtagtgagctgtgatcatgccacccactccagcctgtacaacagagaccctatctctaaaaaaatagaaactttattaaaactattttcagttctttggtcatgaccttggctgtctttgtcagaagtcatgggaaatattgcaagttttcatttggttaaggtttggggttaattttggaattggctctgctcttccaggtttgttgaatgtacagagtgcggaagaaagatgcatcagatctgtgtccttcaccatgagatcatctggcctgctgggtaagtcttaacgttgttactttctctggaatttttctttatcgtgaatattaacaagttttttattctatgcaattgactgtattatatcttcaaagttactatctttaaattgttttctttgggtttggccacgataattatagttcgctttttaaaaattaagtaacctagtatccaaaaatagatttttatcttatttttatgcattcttcttagccatataaatatattttattctgctggattgtttattaaaa

SEQ ID NO: 357870 - DNA, 6061 bp, Homo sapiens
ctcaggccattgctgagaagcagccttcccaggaagtgaagatggaggccaaaatggaagtggatcaaccagaaccagcagatactcagccggaggatatttcagagtctaaagtggaagactgtaaaatggaatctaccgaaacagaagagagaagcactgagttaaaaactgaaataaaagaggaggaagaccagccaagtacttcagctacccagtcatctccggctccaggacagtcaaagaaaaagattttcaaaccagaagaactacgacaggcactgatgccaacattggaggcactttaccgtcaggatccagaatcccttccctttcgtcaacctgtggaccctcagcttttaggaatccctgattactttgatattgtgaagagccccatggatctttctaccattaagaggaagttagacactggacagtatcaggagccctggcagtatgtcgatgatatttggcttatgttcaataatgcctggttatataaccggaaaacatcacgggtatacaaatactgctccaagctctctgaggtctttgaacaagaaattgacccagtgatgcaaagccttggatactgttgtggcagaaagttggagttctctccacagacactgtgttgctacggcaaacagttgtgcacaatacctcgtgatgccacttattacagttaccagaacaggtatcatttctgtgagaagtgtttcaatgagatccaaggggagagcgtttctttgggggatgacccttcccagcctcaaactacaataaataaagaacaattttccaagagaaaaaatgacacactggatcctgaactgtttgttgaatgtacagagtgcggaagaaagatgcatcagatctgtgtccttcaccatgagatcatctggcctgctggattcgtctgtgatggctgtttaaagaaaagtgcacgaactaggaaagaaaataagttttctgctaaaaggttgccatctaccagacttggcacctttctagagaatcgtgtgaatgactttctgaggcgacagaatcaccctgagtcaggagaggtcactgttagagtagttcatgcttctgacaaaaccgtggaagtaaaaccaggcatgaaagcaaggtttgtggacagtggagagatggcagaatcctttccataccgaaccaaagccctctttgcctttgaagaaattgatggtgttgacctgtgcttctttggcatgcatgttcaagagtatggctctgactgccctccacccaaccagaggagagtatacatatcttacctcgatagtgttcatttcttccgtcctaaatgcttgaggactgcagtctatcatgaaatcctaattggatatttagaatatgtcaagaaattaggttacacaacagggcatatttgggcatgtccaccaagtgagggagatgattatatcttccattgccatcctcctgaccagaagatacccaagcccaagcgactgcaggaatggtacaaaaaaatgcttgacaaggctgtatcagagcgtattgtccatgactacaaggatatttttaaacaagctactgaagatagattaacaagtgcaaaggaattgccttatttcgagggtgatttctggcccaatgttctggaagaaagcattaaggaactggaacaggaggaagaagagagaaaacgagaggaaaacaccagcaatgaaagcacagatgtgaccaagggagacagcaaaaatgctaaaaagaagaataataagaaaaccagcaaaaataagagcagcctgagtaggggcaacaagaagaaacccgggatgcccaatgtatctaacgacctctcacagaaactatatgccaccatggagaagcataaagaggtcttctttgtgatccgcctcattgctggccctgctgccaactccctgcctcccattgttgatcctgatcctctcatcccctgcgatctgatggatggtcgggatgcgtttctcacgctggcaagggacaagcacctggagttctcttcactccgaagagcccagtggtccaccatgtgcatgctggtggagctgcacacgcagagccaggaccgctttgtctacacctgcaatgaatgcaagcaccatgtggagacacgctggcactgtactgtctgtgaggattatgacttgtgtatcacctgctataacactaaaaaccatgaccacaaaatggagaaactaggccttggcttagatgatgagagcaacaaccagcaggctgcagccacccagagcccaggcgattctcgccgcctgagtatccagcgctgcatccagtctctggtccatgcttgccagtgtcggaatgccaattgctcactgccatcctgccagaagatgaagcgggttgtgcagcataccaagggttgcaaacggaaaaccaatggcgggtgccccatctgcaagcagctcattgccctctgctgctaccatgccaagcactgccaggagaacaaatgcccggtgccgttctgcctaaacatcaagcagaagctccggcagcaacagctgcagcaccgactacagcaggcccaaatgcttcgcaggaggatggccagcatgcagcggactggtgtggttgggcagcaacagggcctcccttcccccactcctgccactccaacgacaccaactggccaacagccaaccaccccgcagacgccccagcccacttctcagcctcagcctacccctcccaatagcatgccaccctacttgcccaggactcaagctgctggccctgtgtcccagggtaaggcagcaggccaggtgacccctccaacccctcctcagactgctcagccaccccttccagggcccccacctgcagcagtggaaatggcaatgcagattcagagagcagcggagacgcagcgccagatggcccacgtgcaaatttttcaaaggccaatccaacaccagatgcccccgatgactcccatggcccccatgggtatgaacccacctcccatgaccagaggtcccagtgggcatttggagccagggatgggaccgacagggatgcagcaacagccaccctggagccaaggaggattgcctcagccccagcaactacagtctgggatgccaaggccagccatgatgtcagtggcccagcatggtcaacctttgaacatggctccacaaccaggattgggccaggtaggtatcagcccactcaaaccaggcactgtgtctcaacaagccttacaaaaccttttgcggactctcaggtctcccagctctcccctgcagcagcaacaggtgcttagtatccttcacgccaacccccagctgttggctgcattcatcaagcagcgggctgccaagtatgccaactctaatccacaacccatccctgggcagcctggcatgccccaggggcagccagggctacagccacctaccatgccaggtcagcagggggtccactccaatccagccatgcagaacatgaatccaatgcaggcgggcgttcagagggctggcctgccccagcagcaaccacagcagcaactccagccacccatgggagggatgagcccccaggctcagcagatgaacatgaaccacaacaccatgccttcacaattccgagacatcttgagacgacagcaaatgatgcaacagcagcagcaacagggagcagggccaggaataggccctggaatggccaaccataaccagttccagcaaccccaaggagttggctacccaccacagcagcagcagcggatgcagcatcacatgcaacagatgcaacaaggaaatatgggacagataggccagcttccccaggccttgggagcagaggcaggtgccagtctacaggcctatcagcagcgactccttcagcaacagatggggtcccctgttcagcccaaccccatgagcccccagcagcatatgctcccaaatcaggcccagtccccacacctacaaggccagcagatccctaattctctctccaatcaagtgcgctctccccagcctgtcccttctccacggccacagtcccagcccccccactccagtccttccccaaggatgcagcctcagccttctccacaccacgtttccccacagacaagttccccacatcctggactggtagctgcccaggccaaccccatggaacaagggcattttgccagcccggaccagaattcaatgctttctcagcttgctagcaatccaggcatggcaaacctccatggtgcaagcgccacggacctgggactcagcaccgataactcagacttgaattcaaacctctcacagagtacactagacatacactagagacaccttgtagtattttgggagcaaaaaaattattttctcttaacaagactttttgtactgaaaacaatttttttgaatctttcgtagcctaaaagacaattttccttggaacacataagaactgtgcagtagccgtttgtggtttaaagcaaacatgcaagatgaacctgagggatgatagaatacaaagaatatatttttgttatggctggttaccaccagcctttcttcccctttgtgtgtgtggttcaagtgtgcactgggaggaggctgaggcctgtgaagccaaacaatatgctcctgccttgcacctccaataggttttattattttttttaaattaatgaacatatgtaatattaatagttattatttactggtgcagatggttgacatttttccctattttcctcactttatggaagagttaaaacatttctaaaccagaggacaaaaggggttaatgttactttaaaattacattctatatatatataaatatatataaatatatattaaaataccagttttttttctctgggtgcaaagatgttcattcttttaaaaaatgtttaaaaaaaaaaaaaaactgcctttcttcccctcaagtcaacttttgtgctccagaaaattttctattctgtaagtctgagcgtaaaacttcaagtattaaaataatttgtacatgtagagagaaaaatgactttttcaaaaatatacaggggcagctgccaaattgatgtattatatattgtggtttctgtttcttgaaagaatttttttcgttatttttacatctaacaaagtaaaaaaattaaaaagagggtaagaaacgattccggtgggatgattttaacatgcaaaatgtccctgggggtttcttctttgcttgctttcttcctccttaccctaccccccccccccacacacacacacacacacacacacacacacacactttctataaaacttgaaaatagcaaaaaccctcaactgttgtaaatcatgcaattaaagttgattacttataaatatgaactttggatcactgtatagactgttaaatttgatttcttattacctattgttaaataaactgtgtgagacagacaaaaaaaaaaaaaaaaacaaaaaacaaaacaacaaaacaaaaacaaacaaaaacaaaaaaaacaccaacacaaacacacaaccaacaacaacaacacaacaacacaccaccaaaccacacccaccccccccaccacaccccccagaagcagcgatgaagcaacagagaactgcagcaggcggcgggcgccgcgcgcaggcaacgcgcgccagcaggcgaggggcaccagcggacgggagcaccaagcaggacagacaaacacagggcggcacagccgcgacagaccagaacgcgcgcggcacccccggcaggcaacagcagaaagaggacagcgccacaagcaacaagagcaggaaacaagacagaccagacgaatggaaactcacacaggccgcaaccggcacagacaccgcagcagagcaggcacgagcaaaaagcccaggacagagcggcaggcagggacagacagacacacagacgcagccaccacagcacaggccagacgcaagtcgcggcagagaccaacacgaacacgaagccacaggcaagtgcagcaagaagtaccagcagagagcaagaccgaagagacaga

SEQ ID NO: 357871 - DNA, 6062 bp, Homo sapiens
ctcaggccattgctgagaagcagccttcccaggaagtgaagatggaggccaaaatggaagtggatcaaccagaaccagcagatactcagccggaggatatttcagagtctaaagtggaagactgtaaaatggaatctaccgaaacagaagagagaagcactgagttaaaaactgaaataaaagaggaggaagaccagccaagtacttcagctacccagtcatctccggctccaggacagtcaaagaaaaagattttcaaaccagaagaactacgacaggcactgatgccaacattggaggcactttaccgtcaggatccagaatcccttccctttcgtcaacctgtggaccctcagcttttaggaatccctgattactttgatattgtgaagagccccatggatctttctaccattaagaggaagttagacactggacagtatcaggagccctggcagtatgtcgatgatatttggcttatgttcaataatgcctggttatataaccggaaaacatcacgggtatacaaatactgctccaagctctctgaggtctttgaacaagaaattgacccagtgatgcaaagccttggatactgttgtggcagaaagttggagttctctccacagacactgtgttgctacggcaaacagttgtgcacaatacctcgtgatgccacttattacagttaccagaacaggtatcatttctgtgagaagtgtttcaatgagatccaaggggagagcgtttctttgggggatgacccttcccagcctcaaactacaataaataaagaacaattttccaagagaaaaaatgacacactggatcctgaactgtttgttgaatgtacagagtgcggaagaaagatgcatcagatctgtgtccttcaccatgagatcatctggcctgctggattcgtctgtgatggctgtttaaagaaaagtgcacgaactaggaaagaaaataagttttctgctaaaaggttgccatctaccagacttggcacctttctagagaatcgtgtgaatgactttctgaggcgacagaatcaccctgagtcaggagaggtcactgttagagtagttcatgcttctgacaaaaccgtggaagtaaaaccaggcatgaaagcaaggtttgtggacagtggagagatggcagaatcctttccataccgaaccaaagccctctttgcctttgaagaaattgatggtgttgacctgtgcttctttggcatgcatgttcaagagtatggctctgactgccctccacccaaccagaggagagtatacatatcttacctcgatagtgttcatttcttccgtcctaaatgcttgaggactgcagtctatcatgaaatcctaattggatatttagaatatgtcaagaaattaggttacacaacagggcatatttgggcatgtccaccaagtgagggagatgattatatcttccattgccatcctcctgaccagaagatacccaagcccaagcgactgcaggaatggtacaaaaaaatgcttgacaaggctgtatcagagcgtattgtccatgactacaaggatatttttaaacaagctactgaagatagattaacaagtgcaaaggaattgccttatttcgagggtgatttctggcccaatgttctggaagaaagcattaaggaactggaacaggaggaagaagagagaaaacgagaggaaaacaccagcaatgaaagcacagatgtgaccaagggagacagcaaaaatgctaaaaagaagaataataagaaaaccagcaaaaataagagcagcctgagtaggggcaacaagaagaaacccgggatgcccaatgtatctaacgacctctcacagaaactatatgccaccatggagaagcataaagaggtcttctttgtgatccgcctcattgctggccctgctgccaactccctgcctcccattgttgatcctgatcctctcatcccctgcgatctgatggatggtcgggatgcgtttctcacgctggcaagggacaagcacctggagttctcttcactccgaagagcccagtggtccaccatgtgcatgctggtggagctgcacacgcagagccaggaccgctttgtctacacctgcaatgaatgcaagcaccatgtggagacacgctggcactgtactgtctgtgaggattatgacttgtgtatcacctgctataacactaaaaaccatgaccacaaaatggagaaactaggccttggcttagatgatgagagcaacaaccagcaggctgcagccacccagagcccaggcgattctcgccgcctgagtatccagcgctgcatccagtctctggtccatgcttgccagtgtcggaatgccaattgctcactgccatcctgccagaagatgaagcgggttgtgcagcataccaagggttgcaaacggaaaaccaatggcgggtgccccatctgcaagcagctcattgccctctgctgctaccatgccaagcactgccaggagaacaaatgcccggtgccgttctgcctaaacatcaagcagaagctccggcagcaacagctgcagcaccgactacagcaggcccaaatgcttcgcaggaggatggccagcatgcagcggactggtgtggttgggcagcaacagggcctcccttcccccactcctgccactccaacgacaccaactggccaacagccaaccaccccgcagacgccccagcccacagcagacgcctcagcaacagttgtgactgtggttgagccttacttggaccctgatagagatccccctcgtgctcaaggatcttcttgtctgaccatcagtgctgcttctagggggggtgccagatgctcagccaccccttccagggcccccacctgcagcagtggaaatggcaatgcagattcagagagcagcggagacgcagcgccagatggcccacgtgcaaatttttcaaaggccaatccaacaccagatgcccccgatgactcccatggcccccatgggtatgaacccacctcccatgaccagaggtcccagtgggcatttggagccagggatgggaccgacagggatgcagcaacagccaccctggagccaaggaggattgcctcagccccagcaactacagtctgggatgccaaggccagccatgatgtcagtggcccagcatggtcaacctttgaacatggctccacaaccaggattgggccaggtaggtatcagcccactcaaaccaggcactgtgtctcaacaagccttacaaaaccttttgcggactctcaggtctcccagctctcccctgcagcagcaacaggtgcttagtatccttcacgccaacccccagctgttggctgcattcatcaagcagcgggctgccaagtatgccaactctaatccacaacccatccctgggcagcctggcatgccccaggggcagccagggctacagccacctaccatgccaggtcagcagggggtccactccaatccagccatgcagaacatgaatccaatgcaggcgggcgttcagagggctggcctgccccagcagcaaccacagcagcaactccagccacccatgggagggatgagcccccaggctcagcagatgaacatgaaccacaacaccatgccttcacaattccgagacatcttgagacgacagcaaatgatgcaacagcagcagcaacagggagcagggccaggaataggccctggaatggccaaccataaccagttccagcaaccccaaggagttggctacccaccacagcagcagcagcggatgcagcatcacatgcaacagatgcaacaaggaaatatgggacagataggccagcttccccaggccttgggagcagaggcaggtgccagtctacaggcctatcagcagcgactccttcagcaacagatggggtcccctgttcagcccaaccccatgagcccccagcagcatatgctcccaaatcaggcccagtccccacacctacaaggccagcagatccctaattctctctccaatcaagtgcgctctccccagcctgtcccttctccacggccacagtcccagcccccccactccagtccttccccaaggatgcagcctcagccttctccacaccacgtttccccacagacaagttccccacatcctggactggtagctgcccaggccaaccccatggaacaagggcattttgccagcccggaccagaattcaatgctttctcagcttgctagcaatccaggcatggcaaacctccatggtgcaagcgccacggacctgggactcagcaccgataactcagacttgaattcaaacctctcacagagtacactagacatacactagagacaccttgtagtattttgggagcaaaaaaattattttctcttaacaagactttttgtactgaaaacaatttttttgaatctttcgtagcctaaaagacaattttccttggaacacataagaactgtgcagtagccgtttgtggtttaaagcaaacatgcaagatgaacctgagggatgatagaatacaaagaatatatttttgttatggctggttaccaccagcctttcttcccctttgtgtgtgtggttcaagtgtgcactgggaggaggctgaggcctgtgaagccaaacaatatgctcctgccttgcacctccaataggttttattattttttttaaattaatgaacatatgtaatattaatagttattatttactggtgcagatggttgacatttttccctattttcctcactttatggaagagttaaaacatttctaaaccagaggacaaaaggggttaatgttactttaaaattacattctatatatatataaatatatataaatatatattaaaataccagttttttttctctgggtgcaaagatgttcattcttttaaaaaatgtttaaaaaaaaaaaaaaactgcctttcttcccctcaagtcaacttttgtgctccagaaaattttctattctgtaagtctgagcgtaaaacttcaagtattaaaataatttgtacatgtagagagaaaaatgactttttcaaaaatatacaggggcagctgccaaattgatgtattatatattgtggtttctgtttcttgaaagaatttttttcgttatttttacatctaacaaagtaaaaaaattaaaaagagggtaagaaacgattccggtgggatgattttaacatgcaaaatgtccctgggggtttcttctttgcttgctttcttcctccttaccctaccccccccccccacacacacacacacacacacacacacacacacactttctataaaacttgaaaatagcaaaaaccctcaactgttgtaaatcatgcaattaaagttgattacttataaatatgaactttggatcactgtatagactgttaaatttgatttcttattacctattgttaaataaactgtgtgagacagacaaaaaaaaaaaaaaaaacaaaaaacaaaacaacaaaacaaaaacaaacaaaaacaaaaaaaacaccaacacaaacacacaaccaacaacaacaacacaacaacacaccaccaaaccacacccaccccccccaccacaccccccagaagcagcgatgaagcaacagagaactgcagcaggcggcgggcgccgcgcgcaggcaacgcgcgccagcaggcgaggggcaccagcggacgggagcaccaagcaggacagacaaacacagggcggcacagccgcgacagaccagaacgcgcgcggcacccccggcaggcaacagcagaaagaggacagcgccacaagcaacaagagcaggaaacaagacagaccagacgaatggaaactcacacaggccgcaaccggcacagacaccgcagcagagcaggcacgagcaaaaagcccaggacagagcggcaggcagggacagacagacacacagacgcagccaccacagcacaggccagacgcaagtcgcggcagagaccaacacgaacacgaagccacaggcaagtgcagcaagaagtaccagcagagagcaagaccgaagagacaga

SEQ ID NO: 357872 - DNA, 6305 bp, Homo sapiens
ctcaggccattgctgagaagcagccttcccaggaagtgaagatggaggccaaaatggaagtggatcaaccagaaccagcagatactcagccggaggatatttcagagtctaaagtggaagactgtaaaatggaatctaccgaaacagaagagagaagcactgagttaaaaactgaaataaaagaggaggaagaccagccaagtacttcagctacccagtcatctccggctccaggacagtcaaagaaaaagattttcaaaccagaagaactacgacaggcactgatgccaacattggaggcactttaccgtcaggatccagaatcccttccctttcgtcaacctgtggaccctcagcttttaggaatccctgattactttgatattgtgaagagccccatggatctttctaccattaagaggaagttagacactggacagtatcaggagccctggcagtatgtcgatgatatttggcttatgttcaataatgcctggttatataaccggaaaacatcacgggtatacaaatactgctccaagctctctgaggtctttgaacaagaaattgacccagtgatgcaaagccttggatactgttgtggcagaaagttggagttctctccacagacactgtgttgctacggcaaacagttgtgcacaatacctcgtgatgccacttattacagttaccagaacaggtatcatttctgtgagaagtgtttcaatgagatccaaggggagagcgtttctttgggggatgacccttcccagcctcaaactacaataaataaagaacaattttccaagagaaaaaatgacacactggatcctgaactgtttgttgaatgtacagagtgcggaagaaagatgcatcagatctgtgtccttcaccatgagatcatctggcctgctggattcgtctgtgatggctgtttaaagaaaagtgcacgaactaggaaagaaaataagttttctgctaaaaggttgccatctaccagacttggcacctttctagagaatcgtgtgaatgactttctgaggcgacagaatcaccctgagtcaggagaggtcactgttagagtagttcatgcttctgacaaaaccgtggaagtaaaaccaggcatgaaagcaaggtttgtggacagtggagagatggcagaatcctttccataccgaaccaaagccctctttgcctttgaagaaattgatggtgttgacctgtgcttctttggcatgcatgttcaagagtatggctctgactgccctccacccaaccagaggagagtatacatatcttacctcgatagtgttcatttcttccgtcctaaatgcttgaggactgcagtctatcatgaaatcctaattggatatttagaatatgtcaagaaattaggttacacaacagggcatatttgggcatgtccaccaagtgagggagatgattatatcttccattgccatcctcctgaccagaagatacccaagcccaagcgactgcaggaatggtacaaaaaaatgcttgacaaggctgtatcagagcgtattgtccatgactacaaggatatttttaaacaagctactgaagatagattaacaagtgcaaaggaattgccttatttcgagggtgatttctggcccaatgttctggaagaaagcattaaggaactggaacaggaggaagaagagagaaaacgagaggaaaacaccagcaatgaaagcacagatgtgaccaagggagacagcaaaaatgctaaaaagaagaataataagaaaaccagcaaaaataagagcagcctgagtaggggcaacaagaagaaacccgggatgcccaatgtatctaacgacctctcacagaaactatatgccaccatggagaagcataaagaggtcttctttgtgatccgcctcattgctggccctgctgccaactccctgcctcccattgttgatcctgatcctctcatcccctgcgatctgatggatggtcgggatgcgtttctcacgctggcaagggacaagcacctggagttctcttcactccgaagagcccagtggtccaccatgtgcatgctggtggagctgcacacgcagagccaggaccgctttgtctacacctgcaatgaatgcaagcaccatgtggagacacgctggcactgtactgtctgtgaggtaggcaccgggttgtgggaaggaggaggtgagctccgcagggttgttctgaggggccatgcagccacgtattttatagaggcctgtgggatgctaggggcttggcctcgtgtttgaggggcagagctgaagaggctagtttttgttctacgaaaggggcttttctagcccaaacaatatctaaaatacttttgaatgacttaaatcttggagagtttacgtgcacctcctgttttttccctaggattatgacttgtgtatcacctgctataacactaaaaaccatgaccacaaaatggagaaactaggccttggcttagatgatgagagcaacaaccagcaggctgcagccacccagagcccaggcgattctcgccgcctgagtatccagcgctgcatccagtctctggtccatgcttgccagtgtcggaatgccaattgctcactgccatcctgccagaagatgaagcgggttgtgcagcataccaagggttgcaaacggaaaaccaatggcgggtgccccatctgcaagcagctcattgccctctgctgctaccatgccaagcactgccaggagaacaaatgcccggtgccgttctgcctaaacatcaagcagaagctccggcagcaacagctgcagcaccgactacagcaggcccaaatgcttcgcaggaggatggccagcatgcagcggactggtgtggttgggcagcaacagggcctcccttcccccactcctgccactccaacgacaccaactggccaacagccaaccaccccgcagacgccccagcccacttctcagcctcagcctacccctcccaatagcatgccaccctacttgcccaggactcaagctgctggccctgtgtcccagggtaaggcagcaggccaggtgacccctccaacccctcctcagactgctcagccaccccttccagggcccccacctgcagcagtggaaatggcaatgcagattcagagagcagcggagacgcagcgccagatggcccacgtgcaaatttttcaaaggccaatccaacaccagatgcccccgatgactcccatggcccccatgggtatgaacccacctcccatgaccagaggtcccagtgggcatttggagccagggatgggaccgacagggatgcagcaacagccaccctggagccaaggaggattgcctcagccccagcaactacagtctgggatgccaaggccagccatgatgtcagtggcccagcatggtcaacctttgaacatggctccacaaccaggattgggccaggtaggtatcagcccactcaaaccaggcactgtgtctcaacaagccttacaaaaccttttgcggactctcaggtctcccagctctcccctgcagcagcaacaggtgcttagtatccttcacgccaacccccagctgttggctgcattcatcaagcagcgggctgccaagtatgccaactctaatccacaacccatccctgggcagcctggcatgccccaggggcagccagggctacagccacctaccatgccaggtcagcagggggtccactccaatccagccatgcagaacatgaatccaatgcaggcgggcgttcagagggctggcctgccccagcagcaaccacagcagcaactccagccacccatgggagggatgagcccccaggctcagcagatgaacatgaaccacaacaccatgccttcacaattccgagacatcttgagacgacagcaaatgatgcaacagcagcagcaacagggagcagggccaggaataggccctggaatggccaaccataaccagttccagcaaccccaaggagttggctacccaccacagcagcagcagcggatgcagcatcacatgcaacagatgcaacaaggaaatatgggacagataggccagcttccccaggccttgggagcagaggcaggtgccagtctacaggcctatcagcagcgactccttcagcaacagatggggtcccctgttcagcccaaccccatgagcccccagcagcatatgctcccaaatcaggcccagtccccacacctacaaggccagcagatccctaattctctctccaatcaagtgcgctctccccagcctgtcccttctccacggccacagtcccagcccccccactccagtccttccccaaggatgcagcctcagccttctccacaccacgtttccccacagacaagttccccacatcctggactggtagctgcccaggccaaccccatggaacaagggcattttgccagcccggaccagaattcaatgctttctcagcttgctagcaatccaggcatggcaaacctccatggtgcaagcgccacggacctgggactcagcaccgataactcagacttgaattcaaacctctcacagagtacactagacatacactagagacaccttgtagtattttgggagcaaaaaaattattttctcttaacaagactttttgtactgaaaacaatttttttgaatctttcgtagcctaaaagacaattttccttggaacacataagaactgtgcagtagccgtttgtggtttaaagcaaacatgcaagatgaacctgagggatgatagaatacaaagaatatatttttgttatggctggttaccaccagcctttcttcccctttgtgtgtgtggttcaagtgtgcactgggaggaggctgaggcctgtgaagccaaacaatatgctcctgccttgcacctccaataggttttattattttttttaaattaatgaacatatgtaatattaatagttattatttactggtgcagatggttgacatttttccctattttcctcactttatggaagagttaaaacatttctaaaccagaggacaaaaggggttaatgttactttaaaattacattctatatatatataaatatatataaatatatattaaaataccagttttttttctctgggtgcaaagatgttcattcttttaaaaaatgtttaaaaaaaaaaaaaaactgcctttcttcccctcaagtcaacttttgtgctccagaaaattttctattctgtaagtctgagcgtaaaacttcaagtattaaaataatttgtacatgtagagagaaaaatgactttttcaaaaatatacaggggcagctgccaaattgatgtattatatattgtggtttctgtttcttgaaagaatttttttcgttatttttacatctaacaaagtaaaaaaattaaaaagagggtaagaaacgattccggtgggatgattttaacatgcaaaatgtccctgggggtttcttctttgcttgctttcttcctccttaccctaccccccccccccacacacacacacacacacacacacacacacacactttctataaaacttgaaaatagcaaaaaccctcaactgttgtaaatcatgcaattaaagttgattacttataaatatgaactttggatcactgtatagactgttaaatttgatttcttattacctattgttaaataaactgtgtgagacagacaaaaaaaaaaaaaaaaacaaaaaacaaaacaacaaaacaaaaacaaacaaaaacaaaaaaaacaccaacacaaacacacaaccaacaacaacaacacaacaacacaccaccaaaccacacccaccccccccaccacaccccccagaagcagcgatgaagcaacagagaactgcagcaggcggcgggcgccgcgcgcaggcaacgcgcgccagcaggcgaggggcaccagcggacgggagcaccaagcaggacagacaaacacagggcggcacagccgcgacagaccagaacgcgcgcggcacccccggcaggcaacagcagaaagaggacagcgccacaagcaacaagagcaggaaacaagacagaccagacgaatggaaactcacacaggccgcaaccggcacagacaccgcagcagagcaggcacgagcaaaaagcccaggacagagcggcaggcagggacagacagacacacagacgcagccaccacagcacaggccagacgcaagtcgcggcagagaccaacacgaacacgaagccacaggcaagtgcagcaagaagtaccagcagagagcaagaccgaagagacaga

SEQ ID NO: 357873 - DNA, 4356 bp, Homo sapiens
tcaagctatacggctaggtagcgtgaccaagggagacagcaaaaatgctaaaaagaagaataataagaaaaccagcaaaaataagagcagcctgagtaggggcaacaagaagaaacccgggatgcccaatgtatctaacgacctctcacagaaactatatgccaccatggagaagcataaagaggtcttctttgtgatccgcctcattgctggccctgctgccaactccctgcctcccattgttgatcctgatcctctcatcccctgcgatctgatggatggtcgggatgcgtttctcacgctggcaagggacaagcacctggagttctcttcactccgaagagcccagtggtccaccatgtgcatgctggtggagctgcacacgcagagccaggaccgctttgtctacacctgcaatgaatgcaagcaccatgtggagacacgctggcactgtactgtctgtgaggattatgacttgtgtatcacctgctataacactaaaaaccatgaccacaaaatggagaaactaggccttggcttagatgatgagagcaacaaccagcaggctgcagccacccagagcccaggcgattctcgccgcctgagtatccagcgctgcatccagtctctggtccatgcttgccagtgtcggaatgccaattgctcactgccatcctgccagaagatgaagcgggttgtgcagcataccaagggttgcaaacggaaaaccaatggcgggtgccccatctgcaagcagctcattgccctctgctgctaccatgccaagcactgccaggagaacaaatgcccggtgccgttctgcctaaacatcaagcagaagctccggcagcaacagctgcagcaccgactacagcaggcccaaatgcttcgcaggaggatggccagcatgcagcggactggtgtggttgggcagcaacagggcctcccttcccccactcctgccactccaacgacaccaactggccaacagccaaccaccccgcagacgccccagcccacttctcagcctcagcctacccctcccaatagcatgccaccctacttgcccaggactcaagctgctggccctgtgtcccagggtaaggcagcaggccaggtgacccctccaacccctcctcagactgctcagccaccccttccagggcccccacctgcagcagtggaaatggcaatgcagattcagagagcagcggagacgcagcgccagatggcccacgtgcaaatttttcaaaggccaatccaacaccagatgcccccgatgactcccatggcccccatgggtatgaacccacctcccatgaccagaggtcccagtgggcatttggagccagggatgggaccgacagggatgcagcaacagccaccctggagccaaggaggattgcctcagccccagcaactacagtctgggatgccaaggccagccatgatgtcagtggcccagcatggtcaacctttgaacatggctccacaaccaggattgggccaggtaggtatcagcccactcaaaccaggcactgtgtctcaacaagccttacaaaaccttttgcggactctcaggtctcccagctctcccctgcagcagcaacaggtgcttagtatccttcacgccaacccccagctgttggctgcattcatcaagcagcgggctgccaagtatgccaactctaatccacaacccatccctgggcagcctggcatgccccaggggcagccagggctacagccacctaccatgccaggtcagcagggggtccactccaatccagccatgcagaacatgaatccaatgcaggcgggcgttcagagggctggcctgccccagcagcaaccacagcagcaactccagccacccatgggagggatgagcccccaggctcagcagatgaacatgaaccacaacaccatgccttcacaattccgagacatcttgagacgacagcaaatgatgcaacagcagcagcaacagggagcagggccaggaataggccctggaatggccaaccataaccagttccagcaaccccaaggagttggctacccaccacagcagcagcagcggatgcagcatcacatgcaacagatgcaacaaggaaatatgggacagataggccagcttccccaggccttgggagcagaggcaggtgccagtctacaggcctatcagcagcgactccttcagcaacagatggggtcccctgttcagcccaaccccatgagcccccagcagcatatgctcccaaatcaggcccagtccccacacctacaaggccagcagatccctaattctctctccaatcaagtgcgctctccccagcctgtcccttctccacggccacagtcccagcccccccactccagtccttccccaaggatgcagcctcagccttctccacaccacgtttccccacagacaagttccccacatcctggactggtagctgcccaggccaaccccatggaacaagggcattttgccagcccggaccagaattcaatgctttctcagcttgctagcaatccaggcatggcaaacctccatggtgcaagcgccacggacctgggactcagcaccgataactcagacttgaattcaaacctctcacagagtacactagacatacactagagacaccttgtagtattttgggagcaaaaaaattattttctcttaacaagactttttgtactgaaaacaatttttttgaatctttcgtagcctaaaagacaattttccttggaacacataagaactgtgcagtagccgtttgtggtttaaagcaaacatgcaagatgaacctgagggatgatagaatacaaagaatatatttttgttatggctggttaccaccagcctttcttcccctttgtgtgtgtggttcaagtgtgcactgggaggaggctgaggcctgtgaagccaaacaatatgctcctgccttgcacctccaataggttttattattttttttaaattaatgaacatatgtaatattaatagttattatttactggtgcagatggttgacatttttccctattttcctcactttatggaagagttaaaacatttctaaaccagaggacaaaaggggttaatgttactttaaaattacattctatatatatataaatatatataaatatatattaaaataccagttttttttctctgggtgcaaagatgttcattcttttaaaaaatgtttaaaaaaaaaaaaaaactgcctttcttcccctcaagtcaacttttgtgctccagaaaattttctattctgtaagtctgagcgtaaaacttcaagtattaaaataatttgtacatgtagagagaaaaatgactttttcaaaaatatacaggggcagctgccaaattgatgtattatatattgtggtttctgtttcttgaaagaatttttttcgttatttttacatctaacaaagtaaaaaaattaaaaagagggtaagaaacgattccggtgggatgattttaacatgcaaaatgtccctgggggtttcttctttgcttgctttcttcctccttaccctaccccccccccccacacacacacacacacacacacacacacacacactttctataaaacttgaaaatagcaaaaaccctcaactgttgtaaatcatgcaattaaagttgattacttataaatatgaactttggatcactgtatagactgttaaatttgatttcttattacctattgttaaataaactgtgtgagacagacaaaaaaaaaaaaaaaaacaaaaaacaaaacaacaaaacaaaaacaaacaaaaacaaaaaaaacaccaacacaaacacacaaccaacaacaacaacacaacaacacaccaccaaaccacacccaccccccccaccacaccccccagaagcagcgatgaagcaacagagaactgcagcaggcggcgggcgccgcgcgcaggcaacgcgcgccagcaggcgaggggcaccagcggacgggagcaccaagcaggacagacaaacacagggcggcacagccgcgacagaccagaacgcgcgcggcacccccggcaggcaacagcagaaagaggacagcgccacaagcaacaagagcaggaaacaagacagaccagacgaatggaaactcacacaggccgcaaccggcacagacaccgcagcagagcaggcacgagcaaaaagcccaggacagagcggcaggcagggacagacagacacacagacgcagccaccacagcacaggccagacgcaagtcgcggcagagaccaacacgaacacgaagccacaggcaagtgcagcaagaagtaccagcagagagcaagaccgaagagacaga

SEQ ID NO: 357874 - DNA, 4213 bp, Homo sapiens
  misc_feature (25)..(26): n is a, c, g, or t
gactctagagatcccagtcgcgttnntgagaagataaagaggtcttctttgtgatccgcctcattgctggccctgctgccaactccctgcctcccattgttgatcctgatcctctcatcccctgcgatctgatggatggtcgggatgcgtttctcacgctggcaagggacaagcacctggagttctcttcactccgaagagcccagtggtccaccatgtgcatgctggtggagctgcacacgcagagccaggaccgctttgtctacacctgcaatgaatgcaagcaccatgtggagacacgctggcactgtactgtctgtgaggattatgacttgtgtatcacctgctataacactaaaaaccatgaccacaaaatggagaaactaggccttggcttagatgatgagagcaacaaccagcaggctgcagccacccagagcccaggcgattctcgccgcctgagtatccagcgctgcatccagtctctggtccatgcttgccagtgtcggaatgccaattgctcactgccatcctgccagaagatgaagcgggttgtgcagcataccaagggttgcaaacggaaaaccaatggcgggtgccccatctgcaagcagctcattgccctctgctgctaccatgccaagcactgccaggagaacaaatgcccggtgccgttctgcctaaacatcaagcagaagctccggcagcaacagctgcagcaccgactacagcaggcccaaatgcttcgcaggaggatggccagcatgcagcggactggtgtggttgggcagcaacagggcctcccttcccccactcctgccactccaacgacaccaactggccaacagccaaccaccccgcagacgccccagcccacttctcagcctcagcctacccctcccaatagcatgccaccctacttgcccaggactcaagctgctggccctgtgtcccagggtaaggcagcaggccaggtgacccctccaacccctcctcagactgctcagccaccccttccagggcccccacctgcagcagtggaaatggcaatgcagattcagagagcagcggagacgcagcgccagatggcccacgtgcaaatttttcaaaggccaatccaacaccagatgcccccgatgactcccatggcccccatgggtatgaacccacctcccatgaccagaggtcccagtgggcatttggagccagggatgggaccgacagggatgcagcaacagccaccctggagccaaggaggattgcctcagccccagcaactacagtctgggatgccaaggccagccatgatgtcagtggcccagcatggtcaacctttgaacatggctccacaaccaggattgggccaggtaggtatcagcccactcaaaccaggcactgtgtctcaacaagccttacaaaaccttttgcggactctcaggtctcccagctctcccctgcagcagcaacaggtgcttagtatccttcacgccaacccccagctgttggctgcattcatcaagcagcgggctgccaagtatgccaactctaatccacaacccatccctgggcagcctggcatgccccaggggcagccagggctacagccacctaccatgccaggtcagcagggggtccactccaatccagccatgcagaacatgaatccaatgcaggcgggcgttcagagggctggcctgccccagcagcaaccacagcagcaactccagccacccatgggagggatgagcccccaggctcagcagatgaacatgaaccacaacaccatgccttcacaattccgagacatcttgagacgacagcaaatgatgcaacagcagcagcaacagggagcagggccaggaataggccctggaatggccaaccataaccagttccagcaaccccaaggagttggctacccaccacagcagcagcagcggatgcagcatcacatgcaacagatgcaacaaggaaatatgggacagataggccagcttccccaggccttgggagcagaggcaggtgccagtctacaggcctatcagcagcgactccttcagcaacagatggggtcccctgttcagcccaaccccatgagcccccagcagcatatgctcccaaatcaggcccagtccccacacctacaaggccagcagatccctaattctctctccaatcaagtgcgctctccccagcctgtcccttctccacggccacagtcccagcccccccactccagtccttccccaaggatgcagcctcagccttctccacaccacgtttccccacagacaagttccccacatcctggactggtagctgcccaggccaaccccatggaacaagggcattttgccagcccggaccagaattcaatgctttctcagcttgctagcaatccaggcatggcaaacctccatggtgcaagcgccacggacctgggactcagcaccgataactcagacttgaattcaaacctctcacagagtacactagacatacactagagacaccttgtagtattttgggagcaaaaaaattattttctcttaacaagactttttgtactgaaaacaatttttttgaatctttcgtagcctaaaagacaattttccttggaacacataagaactgtgcagtagccgtttgtggtttaaagcaaacatgcaagatgaacctgagggatgatagaatacaaagaatatatttttgttatggctggttaccaccagcctttcttcccctttgtgtgtgtggttcaagtgtgcactgggaggaggctgaggcctgtgaagccaaacaatatgctcctgccttgcacctccaataggttttattattttttttaaattaatgaacatatgtaatattaatagttattatttactggtgcagatggttgacatttttccctattttcctcactttatggaagagttaaaacatttctaaaccagaggacaaaaggggttaatgttactttaaaattacattctatatatatataaatatatataaatatatattaaaataccagttttttttctctgggtgcaaagatgttcattcttttaaaaaatgtttaaaaaaaaaaaaaaactgcctttcttcccctcaagtcaacttttgtgctccagaaaattttctattctgtaagtctgagcgtaaaacttcaagtattaaaataatttgtacatgtagagagaaaaatgactttttcaaaaatatacaggggcagctgccaaattgatgtattatatattgtggtttctgtttcttgaaagaatttttttcgttatttttacatctaacaaagtaaaaaaattaaaaagagggtaagaaacgattccggtgggatgattttaacatgcaaaatgtccctgggggtttcttctttgcttgctttcttcctccttaccctaccccccccccccacacacacacacacacacacacacacacacacactttctataaaacttgaaaatagcaaaaaccctcaactgttgtaaatcatgcaattaaagttgattacttataaatatgaactttggatcactgtatagactgttaaatttgatttcttattacctattgttaaataaactgtgtgagacagacaaaaaaaaaaaaaaaaacaaaaaacaaaacaacaaaacaaaaacaaacaaaaacaaaaaaaacaccaacacaaacacacaaccaacaacaacaacacaacaacacaccaccaaaccacacccaccccccccaccacaccccccagaagcagcgatgaagcaacagagaactgcagcaggcggcgggcgccgcgcgcaggcaacgcgcgccagcaggcgaggggcaccagcggacgggagcaccaagcaggacagacaaacacagggcggcacagccgcgacagaccagaacgcgcgcggcacccccggcaggcaacagcagaaagaggacagcgccacaagcaacaagagcaggaaacaagacagaccagacgaatggaaactcacacaggccgcaaccggcacagacaccgcagcagagcaggcacgagcaaaaagcccaggacagagcggcaggcagggacagacagacacacagacgcagccaccacagcacaggccagacgcaagtcgcggcagagaccaacacgaacacgaagccacaggcaagtgcagcaagaagtaccagcagagagcaagaccgaagagacaga

SEQ ID NO: 357875 - DNA, 4844 bp, Homo sapiens
tgtgcatttcagttctatttatagtcagtctcaagagaccaaagaggtaaagcaggaaaaggaacaggaggcgtatggtggtgaaactaactcagcattcgccagtctcattggtgctcagcctgctgtacctgctcacacctgtaatcccagcactctgggaggctgaggcaggcagatcacttgagcttaggagtttgagaccagcctgggcaacatggcgaagcctcgtctctacaaaaaatgcagaaattagccaggtgtggtggtgtgggcctgtggtctcagctattcaggaggccatggtgggataattgcttgagcccaggaggcagaggttgtagtgagccaagatcacgccactgcattccagcctggatgacagagcgaggccctgtctcaaaaaaaagagactgtctgtttttcaggtcttctttgtgatccgcctcattgctggccctgctgccaactccctgcctcccattgttgatcctgatcctctcatcccctgcgatctgatggatggtcgggatgcgtttctcacgctggcaagggacaagcacctggagttctcttcactccgaagagcccagtggtccaccatgtgcatgctggtggagctgcacacgcagagccaggaccgctttgtctacacctgcaatgaatgcaagcaccatgtggagacacgctggcactgtactgtctgtgaggtaggcaccgggttgtgggaaggaggaggtgagctccgcagggttgttctgaggggccatgcagccacgtattttatagaggcctgtgggatgctaggggcttggcctcgtgtttgaggggcagagctgaagaggctagtttttgttctacgaaaggggcttttctagcccaaacaatatctaaaatacttttgaatgacttaaatcttggagagtttacgtgcacctcctgttttttccctaggattatgacttgtgtatcacctgctataacactaaaaaccatgaccacaaaatggagaaactaggccttggcttagatgatgagagcaacaaccagcaggctgcagccacccagagcccaggcgattctcgccgcctgagtatccagcgctgcatccagtctctggtccatgcttgccagtgtcggaatgccaattgctcactgccatcctgccagaagatgaagcgggttgtgcagcataccaagggttgcaaacggaaaaccaatggcgggtgccccatctgcaagcagctcattgccctctgctgctaccatgccaagcactgccaggagaacaaatgcccggtgccgttctgcctaaacatcaagcagaagctccggcagcaacagctgcagcaccgactacagcaggcccaaatgcttcgcaggaggatggccagcatgcagcggactggtgtggttgggcagcaacagggcctcccttcccccactcctgccactccaacgacaccaactggccaacagccaaccaccccgcagacgccccagcccacttctcagcctcagcctacccctcccaatagcatgccaccctacttgcccaggactcaagctgctggccctgtgtcccagggtaaggcagcaggccaggtgacccctccaacccctcctcagactgctcagccaccccttccagggcccccacctgcagcagtggaaatggcaatgcagattcagagagcagcggagacgcagcgccagatggcccacgtgcaaatttttcaaaggccaatccaacaccagatgcccccgatgactcccatggcccccatgggtatgaacccacctcccatgaccagaggtcccagtgggcatttggagccagggatgggaccgacagggatgcagcaacagccaccctggagccaaggaggattgcctcagccccagcaactacagtctgggatgccaaggccagccatgatgtcagtggcccagcatggtcaacctttgaacatggctccacaaccaggattgggccaggtaggtatcagcccactcaaaccaggcactgtgtctcaacaagccttacaaaaccttttgcggactctcaggtctcccagctctcccctgcagcagcaacaggtgcttagtatccttcacgccaacccccagctgttggctgcattcatcaagcagcgggctgccaagtatgccaactctaatccacaacccatccctgggcagcctggcatgccccaggggcagccagggctacagccacctaccatgccaggtcagcagggggtccactccaatccagccatgcagaacatgaatccaatgcaggcgggcgttcagagggctggcctgccccagcagcaaccacagcagcaactccagccacccatgggagggatgagcccccaggctcagcagatgaacatgaaccacaacaccatgccttcacaattccgagacatcttgagacgacagcaaatgatgcaacagcagcagcaacagggagcagggccaggaataggccctggaatggccaaccataaccagttccagcaaccccaaggagttggctacccaccacagcagcagcagcggatgcagcatcacatgcaacagatgcaacaaggaaatatgggacagataggccagcttccccaggccttgggagcagaggcaggtgccagtctacaggcctatcagcagcgactccttcagcaacagatggggtcccctgttcagcccaaccccatgagcccccagcagcatatgctcccaaatcaggcccagtccccacacctacaaggccagcagatccctaattctctctccaatcaagtgcgctctccccagcctgtcccttctccacggccacagtcccagcccccccactccagtccttccccaaggatgcagcctcagccttctccacaccacgtttccccacagacaagttccccacatcctggactggtagctgcccaggccaaccccatggaacaagggcattttgccagcccggaccagaattcaatgctttctcagcttgctagcaatccaggcatggcaaacctccatggtgcaagcgccacggacctgggactcagcaccgataactcagacttgaattcaaacctctcacagagtacactagacatacactagagacaccttgtagtattttgggagcaaaaaaattattttctcttaacaagactttttgtactgaaaacaatttttttgaatctttcgtagcctaaaagacaattttccttggaacacataagaactgtgcagtagccgtttgtggtttaaagcaaacatgcaagatgaacctgagggatgatagaatacaaagaatatatttttgttatggctggttaccaccagcctttcttcccctttgtgtgtgtggttcaagtgtgcactgggaggaggctgaggcctgtgaagccaaacaatatgctcctgccttgcacctccaataggttttattattttttttaaattaatgaacatatgtaatattaatagttattatttactggtgcagatggttgacatttttccctattttcctcactttatggaagagttaaaacatttctaaaccagaggacaaaaggggttaatgttactttaaaattacattctatatatatataaatatatataaatatatattaaaataccagttttttttctctgggtgcaaagatgttcattcttttaaaaaatgtttaaaaaaaaaaaaaaactgcctttcttcccctcaagtcaacttttgtgctccagaaaattttctattctgtaagtctgagcgtaaaacttcaagtattaaaataatttgtacatgtagagagaaaaatgactttttcaaaaatatacaggggcagctgccaaattgatgtattatatattgtggtttctgtttcttgaaagaatttttttcgttatttttacatctaacaaagtaaaaaaattaaaaagagggtaagaaacgattccggtgggatgattttaacatgcaaaatgtccctgggggtttcttctttgcttgctttcttcctccttaccctaccccccccccccacacacacacacacacacacacacacacacacactttctataaaacttgaaaatagcaaaaaccctcaactgttgtaaatcatgcaattaaagttgattacttataaatatgaactttggatcactgtatagactgttaaatttgatttcttattacctattgttaaataaactgtgtgagacagacaaaaaaaaaaaaaaaaacaaaaaacaaaacaacaaaacaaaaacaaacaaaaacaaaaaaaacaccaacacaaacacacaaccaacaacaacaacacaacaacacaccaccaaaccacacccaccccccccaccacaccccccagaagcagcgatgaagcaacagagaactgcagcaggcggcgggcgccgcgcgcaggcaacgcgcgccagcaggcgaggggcaccagcggacgggagcaccaagcaggacagacaaacacagggcggcacagccgcgacagaccagaacgcgcgcggcacccccggcaggcaacagcagaaagaggacagcgccacaagcaacaagagcaggaaacaagacagaccagacgaatggaaactcacacaggccgcaaccggcacagacaccgcagcagagcaggcacgagcaaaaagcccaggacagagcggcaggcagggacagacagacacacagacgcagccaccacagcacaggccagacgcaagtcgcggcagagaccaacacgaacacgaagccacaggcaagtgcagcaagaagtaccagcagagagcaagaccgaagagacaga

SEQ ID NO: 357876 - DNA, 2212 bp, Homo sapiens
attgcataagggtgtgggacgctgtgtttctctttcacttgttccaggtctcaagccagccagtaagtgtctcagtgtcctcagaagaccccatgagcccccagcagcatatgctcccaaatcaggcccagtccccacacctacaaggccagcagatccctaattctctctccaatcaagtgcgctctccccagcctgtcccttctccacggccacagtcccagcccccccactccagtccttccccaaggatgcagcctcagccttctccacaccacgtttccccacagacaagttccccacatcctggactggtagctgcccaggccaaccccatggaacaagggcattttgccagcccggaccagaattcaatgctttctcagcttgctagcaatccaggcatggcaaacctccatggtgcaagcgccacggacctgggactcagcaccgataactcagacttgaattcaaacctctcacagagtacactagacatacactagagacaccttgtagtattttgggagcaaaaaaattattttctcttaacaagactttttgtactgaaaacaatttttttgaatctttcgtagcctaaaagacaattttccttggaacacataagaactgtgcagtagccgtttgtggtttaaagcaaacatgcaagatgaacctgagggatgatagaatacaaagaatatatttttgttatggctggttaccaccagcctttcttcccctttgtgtgtgtggttcaagtgtgcactgggaggaggctgaggcctgtgaagccaaacaatatgctcctgccttgcacctccaataggttttattattttttttaaattaatgaacatatgtaatattaatagttattatttactggtgcagatggttgacatttttccctattttcctcactttatggaagagttaaaacatttctaaaccagaggacaaaaggggttaatgttactttaaaattacattctatatatatataaatatatataaatatatattaaaataccagttttttttctctgggtgcaaagatgttcattcttttaaaaaatgtttaaaaaaaaaaaaaaactgcctttcttcccctcaagtcaacttttgtgctccagaaaattttctattctgtaagtctgagcgtaaaacttcaagtattaaaataatttgtacatgtagagagaaaaatgactttttcaaaaatatacaggggcagctgccaaattgatgtattatatattgtggtttctgtttcttgaaagaatttttttcgttatttttacatctaacaaagtaaaaaaattaaaaagagggtaagaaacgattccggtgggatgattttaacatgcaaaatgtccctgggggtttcttctttgcttgctttcttcctccttaccctaccccccccccccacacacacacacacacacacacacacacacacactttctataaaacttgaaaatagcaaaaaccctcaactgttgtaaatcatgcaattaaagttgattacttataaatatgaactttggatcactgtatagactgttaaatttgatttcttattacctattgttaaataaactgtgtgagacagacaaaaaaaaaaaaaaaaacaaaaaacaaaacaacaaaacaaaaacaaacaaaaacaaaaaaaacaccaacacaaacacacaaccaacaacaacaacacaacaacacaccaccaaaccacacccaccccccccaccacaccccccagaagcagcgatgaagcaacagagaactgcagcaggcggcgggcgccgcgcgcaggcaacgcgcgccagcaggcgaggggcaccagcggacgggagcaccaagcaggacagacaaacacagggcggcacagccgcgacagaccagaacgcgcgcggcacccccggcaggcaacagcagaaagaggacagcgccacaagcaacaagagcaggaaacaagacagaccagacgaatggaaactcacacaggccgcaaccggcacagacaccgcagcagagcaggcacgagcaaaaagcccaggacagagcggcaggcagggacagacagacacacagacgcagccaccacagcacaggccagacgcaagtcgcggcagagaccaacacgaacacgaagccacaggcaagtgcagcaagaagtaccagcagagagcaagaccgaagagacaga

SEQ ID NO: 357877 - DNA, 1134 bp, Homo sapiens
ctcaggccattgctgagaagcagccttcccaggaagtgaagatggaggccaaaatggaagtggatcaaccagaaccagcagatactcagccggaggatatttcagagtctaaagtggaagactgtaaaatggaatctaccgaaacagaagagagaagcactgagttaaaaactgaaataaaagaggaggaagaccagccaagtacttcagctacccagtcatctccggctccaggacagtcaaagaaaaagattttcaaaccagaagaactacgacaggcactgatgccaacattggaggcactttaccgtcaggatccagaatcccttccctttcgtcaacctgtggaccctcagcttttaggaatccctgattactttgatattgtgaagagccccatggatctttctaccattaagaggaagttagacactggacagtatcaggagccctggcagtatgtcgatgatatttggcttatgttcaataatgcctggttatataaccggaaaacatcacgggtatacaaatactgctccaagctctctgaggtctttgaacaagaaattgacccagtgatgcaaagccttggatactgttgtggcagaaagttggagttctctccacagacactgtgttgctacggcaaacagttgtgcacaatacctcgtgatgccacttattacagttaccagaacaggtatcatttctgtgagaagtgtttcaatgagatccaaggggagagcgtttctttgggggatgacccttcccagcctcaaactacaataaataaagaacaattttccaagagaaaaaatgacacactggatcctgaactgtttgttgaatgtacagagtgcggaagaaagatgcatcagatctgtgtccttcaccatgagatcatctggcctgctggattcgtctgtgatggctgtttaaagaaaagtgcacgaactaggaaagaaaataagttttctgctaaaaggttgccatctaccagacttggcacctttctagagaatcgtgtgaatgactttctgaggcgacagaatcaccctgagtcaggagaggtcactgttagagtagttcatgcttctgacaaaaccgtggtgtattccgggatcctctagatcg

SEQ ID NO: 357878 - DNA, 1113 bp, Homo sapiens
ctcaggccattgctgagaagcagccttcccaggaagtgaagatggaggccaaaatggaagtggatcaaccagaaccagcagatactcagccggaggatatttcagagtctaaagtggaagactgtaaaatggaatctaccgaaacagaagagagaagcactgagttaaaaactgaaataaaagaggaggaagaccagccaagtacttcagctacccagtcatctccggctccaggacagtcaaagaaaaagattttcaaaccagaagaactacgacaggcactgatgccaacattggaggcactttaccgtcaggatccagaatcccttccctttcgtcaacctgtggaccctcagcttttaggaatccctgattactttgatattgtgaagagccccatggatctttctaccattaagaggaagttagacactggacagtatcaggagccctggcagtatgtcgatgatatttggcttatgttcaataatgcctggttatataaccggaaaacatcacgggtatacaaatactgctccaagctctctgaggtctttgaacaagaaattgacccagtgatgcaaagccttggatactgttgtggcagaaagttggagttctctccacagacactgtgttgctacggcaaacagttgtgcacaatacctcgtgatgccacttattacagttaccagaacaggtaagcttggccaggtgtggaccatggtccatgtgtccacatgtccagggagtgcatgcggatgggccagcacacatacagtcatggttcatgtgtatcttgcttgaagacagctgtatagcacaagttctgttttttgccttctgcctttgtttgcagaacaataaaattttctatcagagtagccttgcatcagttacctgggttcctcccaagagcttgagaagttaagcaactttgtgagttgttggcctagatgggtctatatcccaggccccacttctctttctactgtgtgtttgttgatcaccacagcctgaggcaaaactgagaagatttttaaacttttaactgaaactcgctagacagctttttggaaatatttcctttttagatgaggcctatccctaagt

SEQ ID NO: 357879 - DNA, 939 bp, Homo sapiens
gaaacccagtctttacacacacacacacctgggcacaatgccgaaacccagtctctacacacacaaacacacacctgggcaacatggtgaaacccagtccctacacacacacacacacacacatgcacacacctgggcaacatggtgaaacccagtccctacacacacagacacacacacacacacacacacactttctataaaacttgaaaatagcaaaaaccctcaactgttgtaaatcatgcaattaaagttgattacttataaatatgaactttggatcactgtatagactgttaaatttgatttcttattacctattgttaaataaactgtgtgagacagacaaaaaaaaaaaaaaaaacaaaaaacaaaacaacaaaacaaaaacaaacaaaaacaaaaaaaacaccaacacaaacacacaaccaacaacaacaacacaacaacacaccaccaaaccacacccaccccccccaccacaccccccagaagcagcgatgaagcaacagagaactgcagcaggcggcgggcgccgcgcgcaggcaacgcgcgccagcaggcgaggggcaccagcggacgggagcaccaagcaggacagacaaacacagggcggcacagccgcgacagaccagaacgcgcgcggcacccccggcaggcaacagcagaaagaggacagcgccacaagcaacaagagcaggaaacaagacagaccagacgaatggaaactcacacaggccgcaaccggcacagacaccgcagcagagcaggcacgagcaaaaagcccaggacagagcggcaggcagggacagacagacacacagacgcagccaccacagcacaggccagacgcaagtcgcggcagagaccaacacgaacacgaagccacaggcaagtgcagcaagaagtaccagcagagagcaagaccgaagagacaga

SEQ ID NO: 357880 - DNA, 908 bp, Homo sapiens
aatggtctgagattccttatattcaggctttcttcattctccgtaaccacccttctctctgccactcctgctctactttccaaatcctactcaccagctcaaaacctgactcatctcccgtccccccacacacacacacacacacacacacacacacacacactttctataaaacttgaaaatagcaaaaaccctcaactgttgtaaatcatgcaattaaagttgattacttataaatatgaactttggatcactgtatagactgttaaatttgatttcttattacctattgttaaataaactgtgtgagacagacaaaaaaaaaaaaaaaaacaaaaaacaaaacaacaaaacaaaaacaaacaaaaacaaaaaaaacaccaacacaaacacacaaccaacaacaacaacacaacaacacaccaccaaaccacacccaccccccccaccacaccccccagaagcagcgatgaagcaacagagaactgcagcaggcggcgggcgccgcgcgcaggcaacgcgcgccagcaggcgaggggcaccagcggacgggagcaccaagcaggacagacaaacacagggcggcacagccgcgacagaccagaacgcgcgcggcacccccggcaggcaacagcagaaagaggacagcgccacaagcaacaagagcaggaaacaagacagaccagacgaatggaaactcacacaggccgcaaccggcacagacaccgcagcagagcaggcacgagcaaaaagcccaggacagagcggcaggcagggacagacagacacacagacgcagccaccacagcacaggccagacgcaagtcgcggcagagaccaacacgaacacgaagccacaggcaagtgcagcaagaagtaccagcagagagcaagaccgaagagacaga

SEQ ID NO: 357881 - DNA, 6165 bp, Homo sapiens
catgcctgctacatccactttcccagccatctataacagttgaaagacaggtcttacattgtccatctactactagcatagatgtgatttctcgacggccgattgctgagaagcatgccttcccaggaactcagtatggatgccgagattgtctgtagttcacccaggcaagccatacatcctcagaccggaggcagtctttcagacgtctgtagtggctagactcctcccctgggcgtctaccgaaacagaagagagaagcactgagttaaaaactgaaataaaagaggaggaagaccagccaagtacttcagctacccagtcatctccggctccaggacagtcaaagaaaaagattttcaaaccagaagaactacgacaggcactgatgccaacattggaggcactttaccgtcaggatccagaatcccttccctttcgtcaacctgtggaccctcagcttttaggaatccctgattactttgatattgtgaagagccccatggatctttctaccattaagaggaagttagacactggacagtatcaggagccctggcagtatgtcgatgatatttggcttatgttcaataatgcctggttatataaccggaaaacatcacgggtatacaaatactgctccaagctctctgaggtctttgaacaagaaattgacccagtgatgcaaagccttggatactgttgtggcagaaagttggagttctctccacagacactgtgttgctacggcaaacagttgtgcacaatacctcgtgatgccacttattacagttaccagaacaggtatcatttctgtgagaagtgtttcaatgagatccaaggggagagcgtttctttgggggatgacccttcccagcctcaaactacaataaataaagaacaattttccaagagaaaaaatgacacactggatcctgaactgtttgttgaatgtacagagtgcggaagaaagatgcatcagatctgtgtccttcaccatgagatcatctggcctgctggattcgtctgtgatggctgtttaaagaaaagtgcacgaactaggaaagaaaataagttttctgctaaaaggttgccatctaccagacttggcacctttctagagaatcgtgtgaatgactttctgaggcgacagaatcaccctgagtcaggagaggtcactgttagagtagttcatgcttctgacaaaaccgtggaagtaaaaccaggcatgaaagcaaggtttgtggacagtggagagatggcagaatcctttccataccgaaccaaagccctctttgcctttgaagaaattgatggtgttgacctgtgcttctttggcatgcatgttcaagagtatggctctgactgccctccacccaaccagaggagagtatacatatcttacctcgatagtgttcatttcttccgtcctaaatgcttgaggactgcagtctatcatgaaatcctaattggatatttagaatatgtcaagaaattaggttacacaacagggcatatttgggcatgtccaccaagtgagggagatgattatatcttccattgccatcctcctgaccagaagatacccaagcccaagcgactgcaggaatggtacaaaaaaatgcttgacaaggctgtatcagagcgtattgtccatgactacaaggatatttttaaacaagctactgaagatagattaacaagtgcaaaggaattgccttatttcgagggtgatttctggcccaatgttctggaagaaagcattaaggaactggaacaggaggaagaagagagaaaacgagaggaaaacaccagcaatgaaagcacagatgtgaccaagggagacagcaaaaatgctaaaaagaagaataataagaaaaccagcaaaaataagagcagcctgagtaggggcaacaagaagaaacccgggatgcccaatgtatctaacgacctctcacagaaactatatgccaccatggagaagcataaagaggtcttctttgtgatccgcctcattgctggccctgctgccaactccctgcctcccattgttgatcctgatcctctcatcccctgcgatctgatggatggtcgggatgcgtttctcacgctggcaagggacaagcacctggagttctcttcactccgaagagcccagtggtccaccatgtgcatgctggtggagctgcacacgcagagccaggaccgctttgtctacacctgcaatgaatgcaagcaccatgtggagacacgctggcactgtactgtctgtgaggattatgacttgtgtatcacctgctataacactaaaaaccatgaccacaaaatggagaaactaggccttggcttagatgatgagagcaacaaccagcaggctgcagccacccagagcccaggcgattctcgccgcctgagtatccagcgctgcatccagtctctggtccatgcttgccagtgtcggaatgccaattgctcactgccatcctgccagaagatgaagcgggttgtgcagcataccaagggttgcaaacggaaaaccaatggcgggtgccccatctgcaagcagctcattgccctctgctgctaccatgccaagcactgccaggagaacaaatgcccggtgccgttctgcctaaacatcaagcagaagctccggcagcaacagctgcagcaccgactacagcaggcccaaatgcttcgcaggaggatggccagcatgcagcggactggtgtggttgggcagcaacagggcctcccttcccccactcctgccactccaacgacaccaactggccaacagccaaccaccccgcagacgccccagcccacttctcagcctcagcctacccctcccaatagcatgccaccctacttgcccaggactcaagctgctggccctgtgtcccagggtaaggcagcaggccaggtgacccctccaacccctcctcagactgctcagccaccccttccagggcccccacctgcagcagtggaaatggcaatgcagattcagagagcagcggagacgcagcgccagatggcccacgtgcaaatttttcaaaggccaatccaacaccagatgcccccgatgactcccatggcccccatgggtatgaacccacctcccatgaccagaggtcccagtgggcatttggagccagggatgggaccgacagggatgcagcaacagccaccctggagccaaggaggattgcctcagccccagcaactacagtctgggatgccaaggccagccatgatgtcagtggcccagcatggtcaacctttgaacatggctccacaaccaggattgggccaggtaggtatcagcccactcaaaccaggcactgtgtctcaacaagccttacaaaaccttttgcggactctcaggtctcccagctctcccctgcagcagcaacaggtgcttagtatccttcacgccaacccccagctgttggctgcattcatcaagcagcgggctgccaagtatgccaactctaatccacaacccatccctgggcagcctggcatgccccaggggcagccagggctacagccacctaccatgccaggtcagcagggggtccactccaatccagccatgcagaacatgaatccaatgcaggcgggcgttcagagggctggcctgccccagcagcaaccacagcagcaactccagccacccatgggagggatgagcccccaggctcagcagatgaacatgaaccacaacaccatgccttcacaattccgagacatcttgagacgacagcaaatgatgcaacagcagcagcaacagggagcagggccaggaataggccctggaatggccaaccataaccagttccagcaaccccaaggagttggctacccaccacagcagcagcagcggatgcagcatcacatgcaacagatgcaacaaggaaatatgggacagataggccagcttccccaggccttgggagcagaggcaggtgccagtctacaggcctatcagcagcgactccttcagcaacagatggggtcccctgttcagcccaaccccatgagcccccagcagcatatgctcccaaatcaggcccagtccccacacctacaaggccagcagatccctaattctctctccaatcaagtgcgctctccccagcctgtcccttctccacggccacagtcccagcccccccactccagtccttccccaaggatgcagcctcagccttctccacaccacgtttccccacagacaagttccccacatcctggactggtagctgcccaggccaaccccatggaacaagggcattttgccagcccggaccagaattcaatgctttctcagcttgctagcaatccaggcatggcaaacctccatggtgcaagcgccacggacctgggactcagcaccgataactcagacttgaattcaaacctctcacagagtacactagacatacactagagacaccttgtagtattttgggagcaaaaaaattattttctcttaacaagactttttgtactgaaaacaatttttttgaatctttcgtagcctaaaagacaattttccttggaacacataagaactgtgcagtagccgtttgtggtttaaagcaaacatgcaagatgaacctgagggatgatagaatacaaagaatatatttttgttatggctggttaccaccagcctttcttcccctttgtgtgtgtggttcaagtgtgcactgggaggaggctgaggcctgtgaagccaaacaatatgctcctgccttgcacctccaataggttttattattttttttaaattaatgaacatatgtaatattaatagttattatttactggtgcagatggttgacatttttccctattttcctcactttatggaagagttaaaacatttctaaaccagaggacaaaaggggttaatgttactttaaaattacattctatatatatataaatatatataaatatatattaaaataccagttttttttctctgggtgcaaagatgttcattcttttaaaaaatgtttaaaaaaaaaaaaaaactgcctttcttcccctcaagtcaacttttgtgctccagaaaattttctattctgtaagtctgagcgtaaaacttcaagtattaaaataatttgtacatgtagagagaaaaatgactttttcaaaaatatacaggggcagctgccaaattgatgtattatatattgtggtttctgtttcttgaaagaatttttttcgttatttttacatctaacaaagtaaaaaaattaaaaagagggtaagaaacgattccggtgggatgattttaacatgcaaaatgtccctgggggtttcttctttgcttgctttcttcctccttaccctaccccccccccccacacacacacacacacacacacacacacacacactttctataaaacttgaaaatagcaaaaaccctcaactgttgtaaatcatgcaattaaagttgattacttataaatatgaactttggatcactgtatagactgttaaatttgatttcttattacctattgttaaataaactgtgtgagacagacaaaaaaaaaaaaaaaaacaaaaaacaaaacaacaaaacaaaaacaaacaaaaacaaaaaaaacaccaacacaaacacacaaccaacaacaacaacacaacaacacaccaccaaaccacacccaccccccccaccacaccccccagaagcagcgatgaagcaacagagaactgcagcaggcggcgggcgccgcgcgcaggcaacgcgcgccagcaggcgaggggcaccagcggacgggagcaccaagcaggacagacaaacacagggcggcacagccgcgacagaccagaacgcgcgcggcacccccggcaggcaacagcagaaagaggacagcgccacaagcaacaagagcaggaaacaagacagaccagacgaatggaaactcacacaggccgcaaccggcacagacaccgcagcagagcaggcacgagcaaaaagcccaggacagagcggcaggcagggacagacagacacacagacgcagccaccacagcacaggccagacgcaagtcgcggcagagaccaacacgaacacgaagccacaggcaagtgcagcaagaagtaccagcagagagcaagaccgaagagacaga

SEQ ID NO: 357882 - DNA, 5281 bp, Homo sapiens
cctacctcagcctcccgagtagctgggattacaggcatgcaccaccaagccaggctaattttttctatttttagtagagacggggtttctccacattggtcaggctggtctcgaactcctgacctcaggtgatccacctgcctcggcctcccaaagtgctgggattacaggtgtgagtcactgcacctggccaaaaatatattcttaattaacagtattatgttattcataaatataggttgtctcatgatacagacttgtcttcctcaatttagtagttcaactaaataaagaagttttcctaagcagcccagcaaatcattctgcagcagatactatttccagtatttgtagttttggtcattttgaacaaagctgtcagtaaaagctgctgaaattccaaggatgggtgtgaggagggcatgcttcataccacatattctgtgataaggagtggtaggggccatggcatgcatgatggtgctaccaccctgacgttgatcctgggcaggataattgccacttggttatataaaggcagataagctccctgtttttgtggggtagaagaaatagaaaaccggaaatattgactttaggccaggccttttcactatttatttttctaaatactccctggcttacggccttaggtataaagtctctgcccagctttcaagacattttaagctttcatgtttcttgtcagccatgattattctgtataatcaatgctttaaaagaacatagaaattcctatatgtacatgcatgttttcacaggatatttttaaacaagctactgaagatagattaacaagtgcaaaggaattgccttatttcgagggtgatttctggcccaatgttctggaagaaagcattaaggaactggaacaggaggaagaagagagaaaacgagaggaaaacaccagcaatgaaagcacagatgtgaccaagggagacagcaaaaatgctaaaaagaagaataataagaaaaccagcaaaaataagagcagcctgagtaggggcaacaagaagaaacccgggatgcccaatgtatctaacgacctctcacagaaactatatgccaccatggagaagcataaagaggtcttctttgtgatccgcctcattgctggccctgctgccaactccctgcctcccattgttgatcctgatcctctcatcccctgcgatctgatggatggtcgggatgcgtttctcacgctggcaagggacaagcacctggagttctcttcactccgaagagcccagtggtccaccatgtgcatgctggtggagctgcacacgcagagccaggaccgctttgtctacacctgcaatgaatgcaagcaccatgtggagacacgctggcactgtactgtctgtgaggattatgacttgtgtatcacctgctataacactaaaaaccatgaccacaaaatggagaaactaggccttggcttagatgatgagagcaacaaccagcaggctgcagccacccagagcccaggcgattctcgccgcctgagtatccagcgctgcatccagtctctggtccatgcttgccagtgtcggaatgccaattgctcactgccatcctgccagaagatgaagcgggttgtgcagcataccaagggttgcaaacggaaaaccaatggcgggtgccccatctgcaagcagctcattgccctctgctgctaccatgccaagcactgccaggagaacaaatgcccggtgccgttctgcctaaacatcaagcagaagctccggcagcaacagctgcagcaccgactacagcaggcccaaatgcttcgcaggaggatggccagcatgcagcggactggtgtggttgggcagcaacagggcctcccttcccccactcctgccactccaacgacaccaactggccaacagccaaccaccccgcagacgccccagcccacttctcagcctcagcctacccctcccaatagcatgccaccctacttgcccaggactcaagctgctggccctgtgtcccagggtaaggcagcaggccaggtgacccctccaacccctcctcagactgctcagccaccccttccagggcccccacctgcagcagtggaaatggcaatgcagattcagagagcagcggagacgcagcgccagatggcccacgtgcaaatttttcaaaggccaatccaacaccagatgcccccgatgactcccatggcccccatgggtatgaacccacctcccatgaccagaggtcccagtgggcatttggagccagggatgggaccgacagggatgcagcaacagccaccctggagccaaggaggattgcctcagccccagcaactacagtctgggatgccaaggccagccatgatgtcagtggcccagcatggtcaacctttgaacatggctccacaaccaggattgggccaggtaggtatcagcccactcaaaccaggcactgtgtctcaacaagccttacaaaaccttttgcggactctcaggtctcccagctctcccctgcagcagcaacaggtgcttagtatccttcacgccaacccccagctgttggctgcattcatcaagcagcgggctgccaagtatgccaactctaatccacaacccatccctgggcagcctggcatgccccaggggcagccagggctacagccacctaccatgccaggtcagcagggggtccactccaatccagccatgcagaacatgaatccaatgcaggcgggcgttcagagggctggcctgccccagcagcaaccacagcagcaactccagccacccatgggagggatgagcccccaggctcagcagatgaacatgaaccacaacaccatgccttcacaattccgagacatcttgagacgacagcaaatgatgcaacagcagcagcaacagggagcagggccaggaataggccctggaatggccaaccataaccagttccagcaaccccaaggagttggctacccaccacagcagcagcagcggatgcagcatcacatgcaacagatgcaacaaggaaatatgggacagataggccagcttccccaggccttgggagcagaggcaggtgccagtctacaggcctatcagcagcgactccttcagcaacagatggggtcccctgttcagcccaaccccatgagcccccagcagcatatgctcccaaatcaggcccagtccccacacctacaaggccagcagatccctaattctctctccaatcaagtgcgctctccccagcctgtcccttctccacggccacagtcccagcccccccactccagtccttccccaaggatgcagcctcagccttctccacaccacgtttccccacagacaagttccccacatcctggactggtagctgcccaggccaaccccatggaacaagggcattttgccagcccggaccagaattcaatgctttctcagcttgctagcaatccaggcatggcaaacctccatggtgcaagcgccacggacctgggactcagcaccgataactcagacttgaattcaaacctctcacagagtacactagacatacactagagacaccttgtagtattttgggagcaaaaaaattattttctcttaacaagactttttgtactgaaaacaatttttttgaatctttcgtagcctaaaagacaattttccttggaacacataagaactgtgcagtagccgtttgtggtttaaagcaaacatgcaagatgaacctgagggatgatagaatacaaagaatatatttttgttatggctggttaccaccagcctttcttcccctttgtgtgtgtggttcaagtgtgcactgggaggaggctgaggcctgtgaagccaaacaatatgctcctgccttgcacctccaataggttttattattttttttaaattaatgaacatatgtaatattaatagttattatttactggtgcagatggttgacatttttccctattttcctcactttatggaagagttaaaacatttctaaaccagaggacaaaaggggttaatgttactttaaaattacattctatatatatataaatatatataaatatatattaaaataccagttttttttctctgggtgcaaagatgttcattcttttaaaaaatgtttaaaaaaaaaaaaaaactgcctttcttcccctcaagtcaacttttgtgctccagaaaattttctattctgtaagtctgagcgtaaaacttcaagtattaaaataatttgtacatgtagagagaaaaatgactttttcaaaaatatacaggggcagctgccaaattgatgtattatatattgtggtttctgtttcttgaaagaatttttttcgttatttttacatctaacaaagtaaaaaaattaaaaagagggtaagaaacgattccggtgggatgattttaacatgcaaaatgtccctgggggtttcttctttgcttgctttcttcctccttaccctaccccccccccccacacacacacacacacacacacacacacacacactttctataaaacttgaaaatagcaaaaaccctcaactgttgtaaatcatgcaattaaagttgattacttataaatatgaactttggatcactgtatagactgttaaatttgatttcttattacctattgttaaataaactgtgtgagacagacaaaaaaaaaaaaaaaaacaaaaaacaaaacaacaaaacaaaaacaaacaaaaacaaaaaaaacaccaacacaaacacacaaccaacaacaacaacacaacaacacaccaccaaaccacacccaccccccccaccacaccccccagaagcagcgatgaagcaacagagaactgcagcaggcggcgggcgccgcgcgcaggcaacgcgcgccagcaggcgaggggcaccagcggacgggagcaccaagcaggacagacaaacacagggcggcacagccgcgacagaccagaacgcgcgcggcacccccggcaggcaacagcagaaagaggacagcgccacaagcaacaagagcaggaaacaagacagaccagacgaatggaaactcacacaggccgcaaccggcacagacaccgcagcagagcaggcacgagcaaaaagcccaggacagagcggcaggcagggacagacagacacacagacgcagccaccacagcacaggccagacgcaagtcgcggcagagaccaacacgaacacgaagccacaggcaagtgcagcaagaagtaccagcagagagcaagaccgaagagacaga

SEQ ID NO: 357883 - DNA, 4600 bp, Homo sapiens
tgtgcatttcagttctatttatagtcagtctcaagagaccaaagaggtaaagcaggaaaaggaacaggaggcgtatggtggtgaaactaactcagcattcgccagtctcattggtgctcagcctgctgtacctgctcacacctgtaatcccagcactctgggaggctgaggcaggcagatcacttgagcttaggagtttgagaccagcctgggcaacatggcgaagcctcgtctctacaaaaaatgcagaaattagccaggtgtggtggtgtgggcctgtggtctcagctattcaggaggccatggtgggataattgcttgagcccaggaggcagaggttgtagtgagccaagatcacgccactgcattccagcctggatgacagagcgaggccctgtctcaaaaaaaagagactgtctgtttttcaggtcttctttgtgatccgcctcattgctggccctgctgccaactccctgcctcccattgttgatcctgatcctctcatcccctgcgatctgatggatggtcgggatgcgtttctcacgctggcaagggacaagcacctggagttctcttcactccgaagagcccagtggtccaccatgtgcatgctggtggagctgcacacgcagagccaggaccgctttgtctacacctgcaatgaatgcaagcaccatgtggagacacgctggcactgtactgtctgtgaggattatgacttgtgtatcacctgctataacactaaaaaccatgaccacaaaatggagaaactaggccttggcttagatgatgagagcaacaaccagcaggctgcagccacccagagcccaggcgattctcgccgcctgagtatccagcgctgcatccagtctctggtccatgcttgccagtgtcggaatgccaattgctcactgccatcctgccagaagatgaagcgggttgtgcagcataccaagggttgcaaacggaaaaccaatggcgggtgccccatctgcaagcagctcattgccctctgctgctaccatgccaagcactgccaggagaacaaatgcccggtgccgttctgcctaaacatcaagcagaagctccggcagcaacagctgcagcaccgactacagcaggcccaaatgcttcgcaggaggatggccagcatgcagcggactggtgtggttgggcagcaacagggcctcccttcccccactcctgccactccaacgacaccaactggccaacagccaaccaccccgcagacgccccagcccacttctcagcctcagcctacccctcccaatagcatgccaccctacttgcccaggactcaagctgctggccctgtgtcccagggtaaggcagcaggccaggtgacccctccaacccctcctcagactgctcagccaccccttccagggcccccacctgcagcagtggaaatggcaatgcagattcagagagcagcggagacgcagcgccagatggcccacgtgcaaatttttcaaaggccaatccaacaccagatgcccccgatgactcccatggcccccatgggtatgaacccacctcccatgaccagaggtcccagtgggcatttggagccagggatgggaccgacagggatgcagcaacagccaccctggagccaaggaggattgcctcagccccagcaactacagtctgggatgccaaggccagccatgatgtcagtggcccagcatggtcaacctttgaacatggctccacaaccaggattgggccaggtaggtatcagcccactcaaaccaggcactgtgtctcaacaagccttacaaaaccttttgcggactctcaggtctcccagctctcccctgcagcagcaacaggtgcttagtatccttcacgccaacccccagctgttggctgcattcatcaagcagcgggctgccaagtatgccaactctaatccacaacccatccctgggcagcctggcatgccccaggggcagccagggctacagccacctaccatgccaggtcagcagggggtccactccaatccagccatgcagaacatgaatccaatgcaggcgggcgttcagagggctggcctgccccagcagcaaccacagcagcaactccagccacccatgggagggatgagcccccaggctcagcagatgaacatgaaccacaacaccatgccttcacaattccgagacatcttgagacgacagcaaatgatgcaacagcagcagcaacagggagcagggccaggaataggccctggaatggccaaccataaccagttccagcaaccccaaggagttggctacccaccacagcagcagcagcggatgcagcatcacatgcaacagatgcaacaaggaaatatgggacagataggccagcttccccaggccttgggagcagaggcaggtgccagtctacaggcctatcagcagcgactccttcagcaacagatggggtcccctgttcagcccaaccccatgagcccccagcagcatatgctcccaaatcaggcccagtccccacacctacaaggccagcagatccctaattctctctccaatcaagtgcgctctccccagcctgtcccttctccacggccacagtcccagcccccccactccagtccttccccaaggatgcagcctcagccttctccacaccacgtttccccacagacaagttccccacatcctggactggtagctgcccaggccaaccccatggaacaagggcattttgccagcccggaccagaattcaatgctttctcagcttgctagcaatccaggcatggcaaacctccatggtgcaagcgccacggacctgggactcagcaccgataactcagacttgaattcaaacctctcacagagtacactagacatacactagagacaccttgtagtattttgggagcaaaaaaattattttctcttaacaagactttttgtactgaaaacaatttttttgaatctttcgtagcctaaaagacaattttccttggaacacataagaactgtgcagtagccgtttgtggtttaaagcaaacatgcaagatgaacctgagggatgatagaatacaaagaatatatttttgttatggctggttaccaccagcctttcttcccctttgtgtgtgtggttcaagtgtgcactgggaggaggctgaggcctgtgaagccaaacaatatgctcctgccttgcacctccaataggttttattattttttttaaattaatgaacatatgtaatattaatagttattatttactggtgcagatggttgacatttttccctattttcctcactttatggaagagttaaaacatttctaaaccagaggacaaaaggggttaatgttactttaaaattacattctatatatatataaatatatataaatatatattaaaataccagttttttttctctgggtgcaaagatgttcattcttttaaaaaatgtttaaaaaaaaaaaaaaactgcctttcttcccctcaagtcaacttttgtgctccagaaaattttctattctgtaagtctgagcgtaaaacttcaagtattaaaataatttgtacatgtagagagaaaaatgactttttcaaaaatatacaggggcagctgccaaattgatgtattatatattgtggtttctgtttcttgaaagaatttttttcgttatttttacatctaacaaagtaaaaaaattaaaaagagggtaagaaacgattccggtgggatgattttaacatgcaaaatgtccctgggggtttcttctttgcttgctttcttcctccttaccctaccccccccccccacacacacacacacacacacacacacacacacactttctataaaacttgaaaatagcaaaaaccctcaactgttgtaaatcatgcaattaaagttgattacttataaatatgaactttggatcactgtatagactgttaaatttgatttcttattacctattgttaaataaactgtgtgagacagacaaaaaaaaaaaaaaaaacaaaaaacaaaacaacaaaacaaaaacaaacaaaaacaaaaaaaacaccaacacaaacacacaaccaacaacaacaacacaacaacacaccaccaaaccacacccaccccccccaccacaccccccagaagcagcgatgaagcaacagagaactgcagcaggcggcgggcgccgcgcgcaggcaacgcgcgccagcaggcgaggggcaccagcggacgggagcaccaagcaggacagacaaacacagggcggcacagccgcgacagaccagaacgcgcgcggcacccccggcaggcaacagcagaaagaggacagcgccacaagcaacaagagcaggaaacaagacagaccagacgaatggaaactcacacaggccgcaaccggcacagacaccgcagcagagcaggcacgagcaaaaagcccaggacagagcggcaggcagggacagacagacacacagacgcagccaccacagcacaggccagacgcaagtcgcggcagagaccaacacgaacacgaagccacaggcaagtgcagcaagaagtaccagcagagagcaagaccgaagagacaga

SEQ ID NO: 357884 - DNA, 6040 bp, Homo sapiens
ctcaggccattgctgagaagcagccttcccaggaagtgaagatggaggccaaaatggaagtggatcaaccagaaccagcagatactcagccggaggatatttcagagtctaaagtggaagactgtaaaatggaatctaccgaaacagaagagagaagcactgagttaaaaactgaaataaaagaggaggaagaccagccaagtacttcagctacccagtcatctccggctccaggacagtcaaagaaaaagattttcaaaccagaagaactacgacaggcactgatgccaacattggaggcactttaccgtcaggatccagaatcccttccctttcgtcaacctgtggaccctcagcttttaggaatccctgattactttgatattgtgaagagccccatggatctttctaccattaagaggaagttagacactggacagtatcaggagccctggcagtatgtcgatgatatttggcttatgttcaataatgcctggttatataaccggaaaacatcacgggtatacaaatactgctccaagctctctgaggtctttgaacaagaaattgacccagtgatgcaaagccttggatactgttgtggcagaaagttggagttctctccacagacactgtgttgctacggcaaacagttgtgcacaatacctcgtgatgccacttattacagttaccagaacaggtatcatttctgtgagaagtgtttcaatgagatccaaggggagagcgtttctttgggggatgacccttcccagcctcaaactacaataaataaagaacaattttccaagagaaaaaatgacacactggatcctgaactgtttgttgaatgtacagagtgcggaagaaagatgcatcagatctgtgtccttcaccatgagatcatctggcctgctggattcgtctgtgatggctgtttaaagaaaagtgcacgaactaggaaagaaaataagttttctgctaaaaggttgccatctaccagacttggcacctttctagagaatcgtgtgaatgactttctgaggcgacagaatcaccctgagtcaggagaggtcactgttagagtagttcatgcttctgacaaaaccgtggaagtaaaaccaggcatgaaagcaaggtttgtggacagtggagagatggcagaatcctttccataccgaaccaaagccctctttgcctttgaagaaattgatggtgttgacctgtgcttctttggcatgcatgttcaagagtatggctctgactgccctccacccaaccagaggagagtatacatatcttacctcgatagtgttcatttcttccgtcctaaatgcttgaggactgcagtctatcatgaaatcctaattggatatttagaatatgtcaagaaattaggttacacaacagggcatatttgggcatgtccaccaagtgagggagatgattatatcttccattgccatcctcctgaccagaagatacccaagcccaagcgactgcaggaatggtacaaaaaaatgcttgacaaggctgtatcagagcgtattgtccatgactacaaggatatttttaaacaagctactgaagatagattaacaagtgcaaaggaattgccttatttcgagggtgatttctggcccaatgttctggaagaaagcattaaggaactggaacaggaggaagaagagagaaaacgagaggaaaacaccagcaatgaaagcacagatgtgaccaagggagacagcaaaaatgctaaaaagaagaataataagaaaaccagcaaaaataagagcagcctgagtaggggcaacaagaagaaacccgggatgcccaatgtatctaacgacctctcacagaaactatatgccaccatggagaagcataaagaggtcttctttgtgatccgcctcattgctggccctgctgccaactccctgcctcccattgttgatcctgatcctctcatcccctgcgatctgatggatggtcgggatgcgtttctcacgctggcaagggacaagcacctggagttctcttcactccgaagagcccagtggtccaccatgtgcatgctggtggagctgcacacgcagagccaggaccgctttgtctacacctgcaatgaatgcaagcaccatgtggagacacgctggcactgtactgtctgtgaggattatgacttgtgtatcacctgctataacactaaaaaccatgaccacaaaatggagaaactaggccttggcttagatgatgagagcaacaaccagcaggctgcagccacccagagcccaggcgattctcgccgcctgagtatccagcgctgcatccagtctctggtccatgcttgccagtgtcggaatgccaattgctcactgccatcctgccagaagatgaagcgggttgtgcagcataccaagggttgcaaacggaaaaccaatggcgggtgccccatctgcaagcagctcattgccctctgctgctaccatgccaagcactgccaggagaacaaatgcccggtgccgttctgcctaaacatcaagcagaagctccggcagcaacagctgcagcaccgactacagcaggcccaaatgcttcgcaggaggatggccagcatgcagcggactggtgtggttgggcagcaacagggcctcccttcccccactcctgccactccaacgacaccaactggccaacagccaaccaccccgcagacgccccagcccacttctcagcctcagcctacccctcccaatagcatgccaccctacttgcccaggactcaagctgctggccctgtgtcccagggtaaggcagcaggccaggtgacccctccaacccctcctcagactgctcagccaccccttccagggcccccacctgcagcagtggaaatggcaatgcagattcagagagcagcggagacgcagcgccagatggcccacgtgcaaatttttcaaaggccaatccaacaccagatgcccccgatgactcccatggcccccatgggtatgaacccacctcccatgaccagaggtcccagtgggcatttggagccagggatgggaccgacagggatgcagcaacagccaccctggagccaaggaggattgcctcagccccagcaactacagtctgggatgccaaggccagccatgatgtcagtggcccagcatggtcaacctttgaacatggctccacaaccaggattgggccaggtaggtatcagcccactcaaaccaggcactgtgtctcaacaagccttacaaaaccttttgcggactctcaggtctcccagctctcccctgcagcagcaacaggtgcttagtatccttcacgccaacccccagctgttggctgcattcatcaagcagcgggctgccaagtatgccaactctaatccacaacccatccctgggcagcctggcatgccccaggggcagccagggctacagccacctaccatgccaggtcagcagggggtccactccaatccagccatgcagaacatgaatccaatgcaggcgggcgttcagagggctggcctgccccagcagcaaccacagcagcaactccagccacccatgggagggatgagcccccaggctcagcagatgaacatgaaccacaacaccatgccttcacaattccgagacatcttgagacgacagcaaatgatgcaacagcagcagcaacagggagcagggccaggaataggccctggaatggccaaccataaccagttccagcaaccccaaggagttggctacccaccacagcagcagcagcggatgcagcatcacatgcaacagatgcaacaaggaaatatgggacagataggccagcttccccaggccttgggagcagaggcaggtgccagtctacaggcctatcagcagcgactccttcagcaacagatggggtcccctgttcagcccaaccccatgagcccccagcagcatatgctcccaaatcaggcccagtccccacacctacaaggccagcagatccctaattctctctccaatcaagtgcgctctccccagcctgtcccttctccacggccacagtcccagcccccccactccagtccttccccaaggatgcagcctcagccttctccacaccacgtttccccacagacaagttccccacatcctggactggtagctgcccaggccaaccccatggaacaagggcattttgccagcccggaccagaattcaatgctttctcagcttgctagcaatccaggcatggcaaacctccatggtgcaagcgccacggacctgggactcagcaccgataactcagacttgaattcaaacctctcacagagtacactagacatacactagagacaccttgtagtattttgggagcaaaaaaattattttctcttaacaagactttttgtactgaaaacaatttttttgaatctttcgtagcctaaaagacaattttccttggaacacataagaactgtgcagtagccgtttgtggtttaaagcaaacatgcaagatgaacctgagggatgatagaatacaaagaatatatttttgttatggctggttaccaccagcctttcttcccctttgtgtgtgtggttcaagtgtgcactgggaggaggctgaggcctgtgaagccaaacaatatgctcctgccttgcacctccaataggttttattattttttttaaattaatgaacatatgtaatattaatagttattatttactggtgcagatggttgacatttttccctattttcctcactttatggaagagttaaaacatttctaaaccagaggacaaaaggggttaatgttactttaaaattacattctatatatatataaatatatataaatatatattaaaataccagttttttttctctgggtgcaaagatgttcattcttttaaaaaatgtttaaaaaaaaaaaaaaactgcctttcttcccctcaagtcaacttttgtgctccagaaaattttctattctgtaagtctgagcgtaaaacttcaagtattaaaataatttgtacatgtagagagaaaaatgactttttcaaaaatatacaggggcagctgccaaattgatgtattatatattgtggtttctgtttcttgaaagaatttttttcgttatttttacatctaacaaagtaaaaaaattaaaaagagggtaagaaacgattccggtgggatgattttaacatgcaaaatgtccctgggggtttcttctttgcttgctttcttcctccttaccctaccccccccccccacacacacacacatttctataaaacttgaaaatagcaaaaaccctcaactgttgtaaatcatgcaattaaagttgattacttataaatatgaactttggatcactgtatagactgttaaatttgatttcttattacctattgttaaataaactgtgtgagacagacaaaaaaaaaaaaaaaaacaaaaaacaaaacaacaaaacaaaaacaaacaaaaacaaaaaaaacaccaacacaaacacacaaccaacaacaacaacacaacaacacaccaccaaaccacacccaccccccccaccacaccccccagaagcagcgatgaagcaacagagaactgcagcaggcggcgggcgccgcgcgcaggcaacgcgcgccagcaggcgaggggcaccagcggacgggagcaccaagcaggacagacaaacacagggcggcacagccgcgacagaccagaacgcgcgcggcacccccggcaggcaacagcagaaagaggacagcgccacaagcaacaagagcaggaaacaagacagaccagacgaatggaaactcacacaggccgcaaccggcacagacaccgcagcagagcaggcacgagcaaaaagcccaggacagagcggcaggcagggacagacagacacacagacgcagccaccacagcacaggccagacgcaagtcgcggcagagaccaacacgaacacgaagccacaggcaagtgcagcaagaagtaccagcagagagcaagaccgaagagacaga

SEQ ID NO: 357885 - DNA, 3465 bp, Homo sapiens
ctcaggccattgctgagaagcagccttcccaggaagtgaagatggaggccaaaatggaagtggatcaaccagaaccagcagatactcagccggaggatatttcagagtctaaagtggaagactgtaaaatggaatctaccgaaacagaagagagaagcactgagttaaaaactgaaataaaagaggaggaagaccagccaagtacttcagctacccagtcatctccggctccaggacagtcaaagaaaaagattttcaaaccagaagaactacgacaggcactgatgccaacattggaggcactttaccgtcaggatccagaatcccttccctttcgtcaacctgtggaccctcagcttttaggaatccctgattactttgatattgtgaagagccccatggatctttctaccattaagaggaagttagacactggacagtatcaggagccctggcagtatgtcgatgatatttggcttatgttcaataatgcctggttatataaccggaaaacatcacgggtatacaaatactgctccaagctctctgaggtctttgaacaagaaattgacccagtgatgcaaagccttggatactgttgtggcagaaagttggagttctctccacagacactgtgttgctacggcaaacagttgtgcacaatacctcgtgatgccacttattacagttaccagaacaggtatcatttctgtgagaagtgtttcaatgagatccaaggggagagcgtttctttgggggatgacccttcccagcctcaaactacaataaataaagaacaattttccaagagaaaaaatgacacactggatcctgaactgtttgttgaatgtacagagtgcggaagaaagatgcatcagatctgtgtccttcaccatgagatcatctggcctgctggattcgtctgtgatggctgtttaaagaaaagtgcacgaactaggaaagaaaataagttttctgctaaaaggttgccatctaccagacttggcacctttctagagaatcgtgtgaatgactttctgaggcgacagaatcaccctgagtcaggagaggtcactgttagagtagttcatgcttctgacaaaaccgtggaagtaaaaccaggcatgaaagcaaggtttgtggacagtggagagatggcagaatcctttccataccgaaccaaagccctctttgcctttgaagaaattgatggtgttgacctgtgcttctttggcatgcatgttcaagagtatggctctgactgccctccacccaaccagaggagagtatacatatcttacctcgatagtgttcatttcttccgtcctaaatgcttgaggactgcagtctatcatgaaatcctaattggatatttagaatatgtcaagaaattaggttacacaacagggcatatttgggcatgtccaccaagtgagggagatgattatatcttccattgccatcctcctgaccagaagatacccaagcccaagcgactgcaggaatggtacaaaaaaatgcttgacaaggctgtatcagagcgtattgtccatgactacaaggatatttttaaacaagctactgaagatagattaacaagtgcaaaggaattgccttatttcgagggtgatttctggcccaatgttctggaagaaagcattaaggaactggaacaggaggaagaagagagaaaacgagaggaaaacaccagcaatgaaagcacagatgtgaccaagggagacagcaaaaatgctaaaaagaagaataataagaaaaccagcaaaaataagagcagcctgagtaggggcaacaagaagaaacccgggatgcccaatgtatctaacgacctctcacagaaactatatgccaccatggagaagcataaagaggtcttctttgtgatccgcctcattgctggccctgctgccaactccctgcctcccattgttgatcctgatcctctcatcccctgcgatctgatggatggtcgggatgcgtttctcacgctggcaagggacaagcacctggagttctcttcactccgaagagcccagtggtccaccatgtgcatgctggtggagctgcacacgcagagccaggaccgctttgtctacacctgcaatgaatgcaagcaccatgtggagacacgctggcactgtactgtctgtgaggattatgacttgtgtatcacctgctataacactaaaaaccatgaccacaaaatggagaaactaggccttggcttagatgatgagagcaacaaccagcaggctgcagccacccagagcccaggcgattctcgccgcctgagtatccagcgctgcatccagtctctggtccatgcttgccagtgtcggaatgccaattgctcactgccatcctgccagaagatgaagcgggttgtgcagcataccaagggttgcaaacggaaaaccaatggcgggtgccccatctgcaagcagctcattgccctctgctgctaccatgccaagcactgccaggagaacaaatgcccggtgccgttctgcctaaacatcaagcagaagctccggcagcaacagctgcagcaccgactacagcaggcccaaatgcttcgcaggaggatggccagcatgcagcggactggtgtggttgggcagcaacagggcctcccttcccccactcctgccactccaacgacaccaactggccaacagccaaccaccccgcagacgccccagcccacttctcagcctcagcctacccctcccaatagcatgccaccctacttgcccaggactcaagctgctggccctgtgtcccagggtaaggcagcaggccaggtgacccctccaacccctcctcagactgctcagccaccccttccagggcccccacctgcagcagtggaaatggcaatgcagattcagagagcagcggagacgcagcgccagatggcccacgtgcaaatttttcaaaggccaatccaacaccagatgcccccgatgactcccatggcccccatgggtatgaacccacctcccatgaccagaggtcccagtgggcatttggagccagggatgggaccgacagggatgcagcaacagccaccctggagccaaggaggattgcctcagccccagcaactacagtctgggatgccaaggccagccatgatgtcagtggcccagcatggtcaacctttgaacatggctccacaaccaggattgggccaggtaggtatcagcccactcaaaccaggcactgtgtctcaacaagccttacaaaaccttttgcggactctcaggtctcccagctctcccctgcagcagcaacaggtgcttagtatccttcacgccaacccccagctgttggctgcattcatcaagcagcgggctgccaagtatgccaacacagccaacctaccctgtgcagcctcctgggaatccagtataccctcagaccttgcatcttcctcaggctcca

SEQ ID NO: 357886 - DNA, 1176 bp, Homo sapiens
ctcaggccattgctgagaagcagccttcccaggaagtgaagatggaggccaaaatggaagtggatcaaccagaaccagcagatactcagccggaggatatttcagagtctaaagtggaagactgtaaaatggaatctaccgaaacagaagagagaagcactgagttaaaaactgaaataaaagaggaggaagaccagccaagtacttcagctacccagtcatctccggctccaggacagtcaaagaaaaagattttcaaaccagaagaactacgacaggcactgatgccaacattggaggcactttaccgtcaggatccagaatcccttccctttcgtcaacctgtggaccctcagcttttaggaatccctgattactttgatattgtgaagagccccatggatctttctaccattaagaggaagttagacactggacagtatcaggagccctggcagtatgtcgatgatatttggcttatgttcaataatgcctggttatataaccggaaaacatcacgggtatacaaatactgctccaagctctctgaggtctttgaacaagaaattgacccagtgatgcaaagccttggatactgttgtggcagaaagttggagttctctccacagacactgtgttgctacggcaaacagttgtgcacaatacctcgtgatgccacttattacagttaccagaacaggtatcatttctgtgagaagtgtttcaatgagatccaaggggagagcgtttctttgggggatgacccttcccagcctcaaactacaataaataaagaacaattttccaagagaaaaaatgacacactggatcctgaactgtttgttgaatgtacagagtgcggaagaaagatgcatcagatctgtgtccttcaccatgagatcatctggcctgctgggtaagtcttaacgttgttactttctctggaatttttctttatcgtgaatattaacaagttttttattctatgcaattgactgtattatatcttcaaagttactatctttaaattgttttctttgggtttggccacgataattatagttcgctttttaaaaattaagtaacctagtatccaaaaatagatttttatcttatttttatgcattcttcttagccatataaatatattttattctgctggattgtttattaaaa

SEQ ID NO: 357887 - DNA, 955 bp, Homo sapiens
ccaaaatgctggaattacaggtgtgagccactgcgcccaacctaagtctctttttcttaatcgcctatgacctccttggatatctcactctactactaccaaaatgatggtggttggggtggatccatatctttgtattctttcaagagtgcctggcatttagcaagcactcagtaaatgtttatgacacacacacacacacacacacactttctataaaacttgaaaatagcaaaaaccctcaactgttgtaaatcatgcaattaaagttgattacttataaatatgaactttggatcactgtatagactgttaaatttgatttcttattacctattgttaaataaactgtgtgagacagacaaaaaaaaaaaaaaaaacaaaaaacaaaacaacaaaacaaaaacaaacaaaaacaaaaaaaacaccaacacaaacacacaaccaacaacaacaacacaacaacacaccaccaaaccacacccaccccccccaccacaccccccagaagcagcgatgaagcaacagagaactgcagcaggcggcgggcgccgcgcgcaggcaacgcgcgccagcaggcgaggggcaccagcggacgggagcaccaagcaggacagacaaacacagggcggcacagccgcgacagaccagaacgcgcgcggcacccccggcaggcaacagcagaaagaggacagcgccacaagcaacaagagcaggaaacaagacagaccagacgaatggaaactcacacaggccgcaaccggcacagacaccgcagcagagcaggcacgagcaaaaagcccaggacagagcggcaggcagggacagacagacacacagacgcagccaccacagcacaggccagacgcaagtcgcggcagagaccaacacgaacacgaagccacaggcaagtgcagcaagaagtaccagcagagagcaagaccgaagagacaga

SEQ ID NO: 357888 - DNA, 977 bp, Homo sapiens
gatatgcttctaaagagggattcagtgaaattgtactggaggcgagaatttcttgacttagcgtaaaacacccaaaggaaaaaaaaaaaaaaagcatcattactatttgaggaattaacgtgccacccagaaaatcctcaggggtcagatgaggactgtcaaaaattctgcataagttcagtatattctaaattagacacacacacacacacacacacacacacacacacactttctataaaacttgaaaatagcaaaaaccctcaactgttgtaaatcatgcaattaaagttgattacttataaatatgaactttggatcactgtatagactgttaaatttgatttcttattacctattgttaaataaactgtgtgagacagacaaaaaaaaaaaaaaaaacaaaaaacaaaacaacaaaacaaaaacaaacaaaaacaaaaaaaacaccaacacaaacacacaaccaacaacaacaacacaacaacacaccaccaaaccacacccaccccccccaccacaccccccagaagcagcgatgaagcaacagagaactgcagcaggcggcgggcgccgcgcgcaggcaacgcgcgccagcaggcgaggggcaccagcggacgggagcaccaagcaggacagacaaacacagggcggcacagccgcgacagaccagaacgcgcgcggcacccccggcaggcaacagcagaaagaggacagcgccacaagcaacaagagcaggaaacaagacagaccagacgaatggaaactcacacaggccgcaaccggcacagacaccgcagcagagcaggcacgagcaaaaagcccaggacagagcggcaggcagggacagacagacacacagacgcagccaccacagcacaggccagacgcaagtcgcggcagagaccaacacgaacacgaagccacaggcaagtgcagcaagaagtaccagcagagagcaagaccgaagagacaga

SEQ ID NO: 357889 - DNA, 114 bp, Homo sapiens
ccctggcttggaagtgagtgggagaagaaaccttagagaaattcttggaaccagagtagaggtggtggtacacatggatacagatgatacagatgtttgtgtaacacaaaagga

SEQ ID NO: 357890 - DNA, 2780 bp, Homo sapiens
agctctggggccacagcgccagcgccactctgccaggctcccggccatcgcccgcctggtgcgccgcccgccagctctttgcccgcgcggggccgcccgccgcgggctcagggcagaccatgcgcccgccaagtccgctgcccgcccgctggctatgcgtgctggcaggcgccctcgcctgggcccttgggccggcgggcggccaggcggccaggctgcaggaggagtgtgactatgtgcagatgatcgaggtgcagcacaagcagtgcctggaggaggcccagctggagaatgagacaataggctgcagcaagatgtgggacaacctcacctgctggccagccacccctcggggccaggtagttgtcttggcctgtcccctcatcttcaagctcttctcctccattcaaggccgcaatgtaagccgcagctgcaccgacgaaggctggacgcacctggagcctggcccgtaccccattgcctgtggtttggatgacaaggcagcgagtttggatgagcagcagaccatgttctacggttctgtgaagaccggctacaccattggctacggcctgtccctcgccacccttctggtcgccacagctatcctgagcctgttcaggaagctccactgcacgcggaactacatccacatgcacctcttcatatccttcatcctgagggctgccgctgtcttcatcaaagacttggccctcttcgacagcggggagtcggaccagtgctccgagggctcggtgggctgtaaggcagccatggtctttttccaatattgtgtcatggctaacttcttctggctgctggtggagggcctctacctgtacaccctgcttgccgtctccttcttctctgagcggaagtacttctgggggtacatactcatcggctggggggtacccagcacattcaccatggtgtggaccatcgccaggatccattttgaggattatgggtgctgggacaccatcaactcctcactgtggtggatcataaagggccccatcctcacctccatcttggtaaacttcatcctgtttatttgcatcatccgaatcctgcttcagaaactgcggcccccagatatcaggaagagtgacagcagtccatactcaaggctagccaggtccacactcctgctgatccccctgtttggagtacactacatcatgttcgccttctttccggacaattttaagcctgaagtgaagatggtctttgagctcgtcgtggggtctttccagggttttgtggtggctatcctctactgcttcctcaatggtgaggtgcaggcggagctgaggcggaagtggcggcgctggcacctgcagggcgtcctgggctggaaccccaaataccggcacccgtcgggaggcagcaacggcgccacgtgcagcacgcaggtttccatgctgacccgcgtcagcccaggtgcccgccgctcctccagcttccaagccgaagtctccctggtctgaccaccaggatcccaggggcccaaggcggcccctcccgccccttcccactcaccccggcagacgccggggacagaggcctgcccgggcgcggccagccccggccctgggctcggaggctgcccccggccccctggtctctggtccggacactcctagagaacgcagccctagagcctgcctggagcgtttctagcaagtgagagagatgggagctcctctcctggaggattgcaggtggaactcagtcattagactcctcctccaaaggccccctacgccaatcaagggcaaaaagtctacatactttcatcctgactctgccccctgctggctcttctgcccaattggaggaaagcaaccggtggatcctcaaacaacactggtgtgacctgagggcagaaaggttctgcccgggaaggtcaccagcaccaacaccacggtagtgcctgaaatttcaccattgctgtcaagttcctttgggttaagcattaccactcaggcatttgactgaagatgcagctcactaccctattctctctttacgcttagttatcagctttttaaagtgggttattctggagtttttgtttggagagcacacctatcttagtggttccccaccgaagtggactggcccctgggtcagtctggtgggaggacggtgcaacccaaggactgagggactctgaagcctctgggaaatgagaaggcagccaccagcgaatgctaggtctcggactaagcctacctgctctccaagtctcagtggcttcatctgtcaagtgggatctgtcacaccagccatacttatctctctgtgctgtggaagcaacaggaatcaagagctgccctccttgtccacccacctatgtgccaactgttgtaactaggctcagagatgtgcacccatgggctctgacagaaagcagatacctcaccctgctacacatacaggatttgaactcagatctgtctgataggaatgtgaaagcacggactcttactgctaacttttgtgtatcgtaaccagccagatcctcttggttatttgtttaccacttgtattattaatgccattatccctgaatcccccttgccaccccaccctccctggagtgtggctgaggaggcctccatctcatgtatcatctggataggagcctgctggtcacagcctcctctgtctgcccttcaccccagtggccactcagcttcctacccacacctctgccagaagatcccctcaggactgcaacaggcttgtgcaacaataaatgttggcttgga

SEQ ID NO: 357891 - DNA, 2674 bp, Homo sapiens
agctctggggccacagcgccagcgccactctgccaggctcccggccatcgcccgcctggtgcgccgcccgccagctctttgcccgcgcggggccgcccgccgcgggctcagggcagaccatgcgcccgccaagtccgctgcccgcccgctggctatgcgtgctggcaggcgccctcgcctgggcccttgggccggcggctgcagcaagatgtgggacaacctcacctgctggccagccacccctcggggccaggtagttgtcttggcctgtcccctcatcttcaagctcttctcctccattcaaggccgcaatgtaagccgcagctgcaccgacgaaggctggacgcacctggagcctggcccgtaccccattgcctgtggtttggatgacaaggcagcgagtttggatgagcagcagaccatgttctacggttctgtgaagaccggctacaccattggctacggcctgtccctcgccacccttctggtcgccacagctatcctgagcctgttcaggaagctccactgcacgcggaactacatccacatgcacctcttcatatccttcatcctgagggctgccgctgtcttcatcaaagacttggccctcttcgacagcggggagtcggaccagtgctccgagggctcggtgggctgtaaggcagccatggtctttttccaatattgtgtcatggctaacttcttctggctgctggtggagggcctctacctgtacaccctgcttgccgtctccttcttctctgagcggaagtacttctgggggtacatactcatcggctggggggtacccagcacattcaccatggtgtggaccatcgccaggatccattttgaggattatgggtgctgggacaccatcaactcctcactgtggtggatcataaagggccccatcctcacctccatcttggtaaacttcatcctgtttatttgcatcatccgaatcctgcttcagaaactgcggcccccagatatcaggaagagtgacagcagtccatactcaaggctagccaggtccacactcctgctgatccccctgtttggagtacactacatcatgttcgccttctttccggacaattttaagcctgaagtgaagatggtctttgagctcgtcgtggggtctttccagggttttgtggtggctatcctctactgcttcctcaatggtgaggtgcaggcggagctgaggcggaagtggcggcgctggcacctgcagggcgtcctgggctggaaccccaaataccggcacccgtcgggaggcagcaacggcgccacgtgcagcacgcaggtttccatgctgacccgcgtcagcccaggtgcccgccgctcctccagcttccaagccgaagtctccctggtctgaccaccaggatcccaggggcccaaggcggcccctcccgccccttcccactcaccccggcagacgccggggacagaggcctgcccgggcgcggccagccccggccctgggctcggaggctgcccccggccccctggtctctggtccggacactcctagagaacgcagccctagagcctgcctggagcgtttctagcaagtgagagagatgggagctcctctcctggaggattgcaggtggaactcagtcattagactcctcctccaaaggccccctacgccaatcaagggcaaaaagtctacatactttcatcctgactctgccccctgctggctcttctgcccaattggaggaaagcaaccggtggatcctcaaacaacactggtgtgacctgagggcagaaaggttctgcccgggaaggtcaccagcaccaacaccacggtagtgcctgaaatttcaccattgctgtcaagttcctttgggttaagcattaccactcaggcatttgactgaagatgcagctcactaccctattctctctttacgcttagttatcagctttttaaagtgggttattctggagtttttgtttggagagcacacctatcttagtggttccccaccgaagtggactggcccctgggtcagtctggtgggaggacggtgcaacccaaggactgagggactctgaagcctctgggaaatgagaaggcagccaccagcgaatgctaggtctcggactaagcctacctgctctccaagtctcagtggcttcatctgtcaagtgggatctgtcacaccagccatacttatctctctgtgctgtggaagcaacaggaatcaagagctgccctccttgtccacccacctatgtgccaactgttgtaactaggctcagagatgtgcacccatgggctctgacagaaagcagatacctcaccctgctacacatacaggatttgaactcagatctgtctgataggaatgtgaaagcacggactcttactgctaacttttgtgtatcgtaaccagccagatcctcttggttatttgtttaccacttgtattattaatgccattatccctgaatcccccttgccaccccaccctccctggagtgtggctgaggaggcctccatctcatgtatcatctggataggagcctgctggtcacagcctcctctgtctgcccttcaccccagtggccactcagcttcctacccacacctctgccagaagatcccctcaggactgcaacaggcttgtgcaacaataaatgttggcttgga

SEQ ID NO: 357892 - DNA, 2654 bp, Homo sapiens
agctctggggccacagcgccagcgccactctgccaggctcccggccatcgcccgcctggtgcgccgcccgccagctctttgcccgcgcggggccgcccgccgcgggctcagggcagaccatgcgcccgccaagtccgctgcccgcccgctggctatgcgtgctggcaggcgccctcgcctgggcccttgggccggcggctgcagcaagatgtgggacaacctcacctgctggccagccacccctcggggccaggtagttgtcttggcctgtcccctcatcttcaagctcttctcctccattcaaggccgcaatgtaagccgcagctgcaccgacgaaggctggacgcacctggagcctggcccgtaccccattgcctgtggtttggatgacaaggcagcgagtttggatgagcagcagaccatgttctacggttctgtgaagaccggctacaccattggctacggcctgtccctcgccacccttctggtcgccacagctatcctgagcctgttcaggaagctccactgcacgcggaactacatccacatgcacctcttcatatccttcatcctgagggctgccgctgtcttcatcaaagacttggccctcttcgacagcggggagtcggaccagtgctccgagggctcggtgggctgtaaggcagccatggtctttttccaatattgtgtcatggctaacttcttctggctgctggtggagggcctctacctgtacaccctgcttgccgtctccttcttctctgagcggaagtacttctgggggggtacccagcacattcaccatggtgtggaccatcgccaggatccattttgaggattatgggtgctgggacaccatcaactcctcactgtggtggatcataaagggccccatcctcacctccatcttggtaaacttcatcctgtttatttgcatcatccgaatcctgcttcagaaactgcggcccccagatatcaggaagagtgacagcagtccatactcaaggctagccaggtccacactcctgctgatccccctgtttggagtacactacatcatgttcgccttctttccggacaattttaagcctgaagtgaagatggtctttgagctcgtcgtggggtctttccagggttttgtggtggctatcctctactgcttcctcaatggtgaggtgcaggcggagctgaggcggaagtggcggcgctggcacctgcagggcgtcctgggctggaaccccaaataccggcacccgtcgggaggcagcaacggcgccacgtgcagcacgcaggtttccatgctgacccgcgtcagcccaggtgcccgccgctcctccagcttccaagccgaagtctccctggtctgaccaccaggatcccaggggcccaaggcggcccctcccgccccttcccactcaccccggcagacgccggggacagaggcctgcccgggcgcggccagccccggccctgggctcggaggctgcccccggccccctggtctctggtccggacactcctagagaacgcagccctagagcctgcctggagcgtttctagcaagtgagagagatgggagctcctctcctggaggattgcaggtggaactcagtcattagactcctcctccaaaggccccctacgccaatcaagggcaaaaagtctacatactttcatcctgactctgccccctgctggctcttctgcccaattggaggaaagcaaccggtggatcctcaaacaacactggtgtgacctgagggcagaaaggttctgcccgggaaggtcaccagcaccaacaccacggtagtgcctgaaatttcaccattgctgtcaagttcctttgggttaagcattaccactcaggcatttgactgaagatgcagctcactaccctattctctctttacgcttagttatcagctttttaaagtgggttattctggagtttttgtttggagagcacacctatcttagtggttccccaccgaagtggactggcccctgggtcagtctggtgggaggacggtgcaacccaaggactgagggactctgaagcctctgggaaatgagaaggcagccaccagcgaatgctaggtctcggactaagcctacctgctctccaagtctcagtggcttcatctgtcaagtgggatctgtcacaccagccatacttatctctctgtgctgtggaagcaacaggaatcaagagctgccctccttgtccacccacctatgtgccaactgttgtaactaggctcagagatgtgcacccatgggctctgacagaaagcagatacctcaccctgctacacatacaggatttgaactcagatctgtctgataggaatgtgaaagcacggactcttactgctaacttttgtgtatcgtaaccagccagatcctcttggttatttgtttaccacttgtattattaatgccattatccctgaatcccccttgccaccccaccctccctggagtgtggctgaggaggcctccatctcatgtatcatctggataggagcctgctggtcacagcctcctctgtctgcccttcaccccagtggccactcagcttcctacccacacctctgccagaagatcccctcaggactgcaacaggcttgtgcaacaataaatgttggcttgga

SEQ ID NO: 357893 - DNA, 2647 bp, Homo sapiens
agctctggggccacagcgccagcgccactctgccaggctcccggccatcgcccgcctggtgcgccgcccgccagctctttgcccgcgcggggccgcccgccgcgggctcagggcagaccatgcgcccgccaagtccgctgcccgcccgctggctatgcgtgctggcaggcgccctcgcctgggcccttgggccggcgggcggccaggcggccaggctgcaggaggagtgtgactatgtgcagatgatcgaggtgcagcacaagcagtgcctggaggaggcccagctggagaatgagacaataggctgcagcaagatgtgggacaacctcacctgctggccagccacccctcggggccaggtagttgtcttggcctgtcccctcatcttcaagctcttctcctccattcaaggccgcaatgtaagccgcagctgcaccgacgaaggctggacgcacctggagcctggcccgtaccccattgcctgtggtttggatgacaaggcagcgagtttggatgagcagcagaccatgttctacggttctgtgaagaccggctacaccattggctacggcctgtccctcgccacccttctggtcgccacagctatcctgagcctgttcaggtgggctgtaaggcagccatggtctttttccaatattgtgtcatggctaacttcttctggctgctggtggagggcctctacctgtacaccctgcttgccgtctccttcttctctgagcggaagtacttctgggggtacatactcatcggctggggggtacccagcacattcaccatggtgtggaccatcgccaggatccattttgaggattatgggtgctgggacaccatcaactcctcactgtggtggatcataaagggccccatcctcacctccatcttggtaaacttcatcctgtttatttgcatcatccgaatcctgcttcagaaactgcggcccccagatatcaggaagagtgacagcagtccatactcaaggctagccaggtccacactcctgctgatccccctgtttggagtacactacatcatgttcgccttctttccggacaattttaagcctgaagtgaagatggtctttgagctcgtcgtggggtctttccagggttttgtggtggctatcctctactgcttcctcaatggtgaggtgcaggcggagctgaggcggaagtggcggcgctggcacctgcagggcgtcctgggctggaaccccaaataccggcacccgtcgggaggcagcaacggcgccacgtgcagcacgcaggtttccatgctgacccgcgtcagcccaggtgcccgccgctcctccagcttccaagccgaagtctccctggtctgaccaccaggatcccaggggcccaaggcggcccctcccgccccttcccactcaccccggcagacgccggggacagaggcctgcccgggcgcggccagccccggccctgggctcggaggctgcccccggccccctggtctctggtccggacactcctagagaacgcagccctagagcctgcctggagcgtttctagcaagtgagagagatgggagctcctctcctggaggattgcaggtggaactcagtcattagactcctcctccaaaggccccctacgccaatcaagggcaaaaagtctacatactttcatcctgactctgccccctgctggctcttctgcccaattggaggaaagcaaccggtggatcctcaaacaacactggtgtgacctgagggcagaaaggttctgcccgggaaggtcaccagcaccaacaccacggtagtgcctgaaatttcaccattgctgtcaagttcctttgggttaagcattaccactcaggcatttgactgaagatgcagctcactaccctattctctctttacgcttagttatcagctttttaaagtgggttattctggagtttttgtttggagagcacacctatcttagtggttccccaccgaagtggactggcccctgggtcagtctggtgggaggacggtgcaacccaaggactgagggactctgaagcctctgggaaatgagaaggcagccaccagcgaatgctaggtctcggactaagcctacctgctctccaagtctcagtggcttcatctgtcaagtgggatctgtcacaccagccatacttatctctctgtgctgtggaagcaacaggaatcaagagctgccctccttgtccacccacctatgtgccaactgttgtaactaggctcagagatgtgcacccatgggctctgacagaaagcagatacctcaccctgctacacatacaggatttgaactcagatctgtctgataggaatgtgaaagcacggactcttactgctaacttttgtgtatcgtaaccagccagatcctcttggttatttgtttaccacttgtattattaatgccattatccctgaatcccccttgccaccccaccctccctggagtgtggctgaggaggcctccatctcatgtatcatctggataggagcctgctggtcacagcctcctctgtctgcccttcaccccagtggccactcagcttcctacccacacctctgccagaagatcccctcaggactgcaacaggcttgtgcaacaataaatgttggcttgga

SEQ ID NO: 357894 - DNA, 2544 bp, Homo sapiens
cagacatctaggcttgatctgaaatgggggactttctgggaggggacagaaggcccagaataccttccagtcatgccaagtgggccacccagagccctgtgattgctctactcatgggtctccctaactccttcatggtcctcgtctgcctaagaaacccattcttccactcggtcctctgaaccccaggaggaatggccacccctcccctcttctcttcttcttcatttctacttccccctcttccaccctcttctcagtcccagtctccctccacacttccatctgggccccactccacagtccacagccctccactctcccacattgagcagactcttgcaaactcaagcaagaattctccctcataccttccagctaccttcaatacaaattggcattagatgaatgagtgggtggggtgggagtgtggatgggcaggttggtggatggctaagtaggcagcaggataaatgggttaagtaaggaagattggacagatgacaggcagaggggcaggtgggctgtaaggcagccatggtctttttccaatattgtgtcatggctaacttcttctggctgctggtggagggcctctacctgtacaccctgcttgccgtctccttcttctctgagcggaagtacttctgggggtacatactcatcggctggggggtacccagcacattcaccatggtgtggaccatcgccaggatccattttgaggattatgggtgctgggacaccatcaactcctcactgtggtggatcataaagggccccatcctcacctccatcttggtaaacttcatcctgtttatttgcatcatccgaatcctgcttcagaaactgcggcccccagatatcaggaagagtgacagcagtccatactcaaggctagccaggtccacactcctgctgatccccctgtttggagtacactacatcatgttcgccttctttccggacaattttaagcctgaagtgaagatggtctttgagctcgtcgtggggtctttccagggttttgtggtggctatcctctactgcttcctcaatggtgaggtgcaggcggagctgaggcggaagtggcggcgctggcacctgcagggcgtcctgggctggaaccccaaataccggcacccgtcgggaggcagcaacggcgccacgtgcagcacgcaggtttccatgctgacccgcgtcagcccaggtgcccgccgctcctccagcttccaagccgaagtctccctggtctgaccaccaggatcccaggggcccaaggcggcccctcccgccccttcccactcaccccggcagacgccggggacagaggcctgcccgggcgcggccagccccggccctgggctcggaggctgcccccggccccctggtctctggtccggacactcctagagaacgcagccctagagcctgcctggagcgtttctagcaagtgagagagatgggagctcctctcctggaggattgcaggtggaactcagtcattagactcctcctccaaaggccccctacgccaatcaagggcaaaaagtctacatactttcatcctgactctgccccctgctggctcttctgcccaattggaggaaagcaaccggtggatcctcaaacaacactggtgtgacctgagggcagaaaggttctgcccgggaaggtcaccagcaccaacaccacggtagtgcctgaaatttcaccattgctgtcaagttcctttgggttaagcattaccactcaggcatttgactgaagatgcagctcactaccctattctctctttacgcttagttatcagctttttaaagtgggttattctggagtttttgtttggagagcacacctatcttagtggttccccaccgaagtggactggcccctgggtcagtctggtgggaggacggtgcaacccaaggactgagggactctgaagcctctgggaaatgagaaggcagccaccagcgaatgctaggtctcggactaagcctacctgctctccaagtctcagtggcttcatctgtcaagtgggatctgtcacaccagccatacttatctctctgtgctgtggaagcaacaggaatcaagagctgccctccttgtccacccacctatgtgccaactgttgtaactaggctcagagatgtgcacccatgggctctgacagaaagcagatacctcaccctgctacacatacaggatttgaactcagatctgtctgataggaatgtgaaagcacggactcttactgctaacttttgtgtatcgtaaccagccagatcctcttggttatttgtttaccacttgtattattaatgccattatccctgaatcccccttgccaccccaccctccctggagtgtggctgaggaggcctccatctcatgtatcatctggataggagcctgctggtcacagcctcctctgtctgcccttcaccccagtggccactcagcttcctacccacacctctgccagaagatcccctcaggactgcaacaggcttgtgcaacaataaatgttggcttgga

SEQ ID NO: 357895 - DNA, 672 bp, Homo sapiens
ctgaggatgtcgcaaaccaagggtacaggaaggaagggtgggaaccaatgttttgggtacagggggaagtggaagccagacagtttcctggtggagggtggctttaagccctggctgacagacatctaggcttgatctgaaatgggggactttctgggaggggacagaaggcccagaataccttccagtcatgccaagtgggccacccagagccctgtgattgctctactcatgggtctccctaactccttcatggtcctcgtctgcctaagaaacccattcttccactcggtcctctgaaccccaggaggaatggccacccctcccctcttctcttcttcttcatttctacttccccctcttccaccctcttctcagtcccagtctccctccacacttccatctgggccccactccacagtccacagccctccactctcccacattgagcagactcttgcaaactcaagcaagaattctccctcataccttccagctaccttcaatacaaattggcattagatgaatgagtgggtggggtgggagtgtggatgggcaggttggtggatggctaagtaggcagcaggataaatgggttaagtaaggaagattggacagatgacaggcagaggggcaggtaggtagatatgtgggtggatgcacaagtggatt

SEQ ID NO: 357896 - DNA, 2839 bp, Homo sapiens
tcggagcctgcggagggtggtggtggtggtggtggtggccctcgcccgcctcactcatgcctcctcctcctctgctctcgctcaggcgcctcggtggcggttggtcggcggttacgcggctggtggtcgcggcggccggggctcgctctcggggaggccggggcggatctcgcggcgcaggcggcggcggccgaggtggggtcgcgcggcggaggcggctcgagcttcgtgctgcgcgctcgctcttgggctcctcggcggccaggcggccaggctgcaggaggagtgtgactatgtgcagatgatcgaggtgcagcacaagcagtgcctggaggaggcccagctggagaatgagacaataggctgcagcaagatgtgggacaacctcacctgctggccagccacccctcggggccaggtagttgtcttggcctgtcccctcatcttcaagctcttctcctccattcaaggccgcaatgtaagccgcagctgcaccgacgaaggctggacgcacctggagcctggcccgtaccccattgcctgtggtttggatgacaaggcagcgagtttggatgagcagcagaccatgttctacggttctgtgaagaccggctacaccattggctacggcctgtccctcgccacccttctggtcgccacagctatcctgagcctgttcaggaagctccactgcacgcggaactacatccacatgcacctcttcatatccttcatcctgagggctgccgctgtcttcatcaaagacttggccctcttcgacagcggggagtcggaccagtgctccgagggctcggtgggctgtaaggcagccatggtctttttccaatattgtgtcatggctaacttcttctggctgctggtggagggcctctacctgtacaccctgcttgccgtctccttcttctctgagcggaagtacttctgggggtacatactcatcggctggggggtacccagcacattcaccatggtgtggaccatcgccaggatccattttgaggattatgggtgctgggacaccatcaactcctcactgtggtggatcataaagggccccatcctcacctccatcttggtaaacttcatcctgtttatttgcatcatccgaatcctgcttcagaaactgcggcccccagatatcaggaagagtgacagcagtccatactcaaggctagccaggtccacactcctgctgatccccctgtttggagtacactacatcatgttcgccttctttccggacaattttaagcctgaagtgaagatggtctttgagctcgtcgtggggtctttccagggttttgtggtggctatcctctactgcttcctcaatggtgaggtgcaggcggagctgaggcggaagtggcggcgctggcacctgcagggcgtcctgggctggaaccccaaataccggcacccgtcgggaggcagcaacggcgccacgtgcagcacgcaggtttccatgctgacccgcgtcagcccaggtgcccgccgctcctccagcttccaagccgaagtctccctggtctgaccaccaggatcccaggggcccaaggcggcccctcccgccccttcccactcaccccggcagacgccggggacagaggcctgcccgggcgcggccagccccggccctgggctcggaggctgcccccggccccctggtctctggtccggacactcctagagaacgcagccctagagcctgcctggagcgtttctagcaagtgagagagatgggagctcctctcctggaggattgcaggtggaactcagtcattagactcctcctccaaaggccccctacgccaatcaagggcaaaaagtctacatactttcatcctgactctgccccctgctggctcttctgcccaattggaggaaagcaaccggtggatcctcaaacaacactggtgtgacctgagggcagaaaggttctgcccgggaaggtcaccagcaccaacaccacggtagtgcctgaaatttcaccattgctgtcaagttcctttgggttaagcattaccactcaggcatttgactgaagatgcagctcactaccctattctctctttacgcttagttatcagctttttaaagtgggttattctggagtttttgtttggagagcacacctatcttagtggttccccaccgaagtggactggcccctgggtcagtctggtgggaggacggtgcaacccaaggactgagggactctgaagcctctgggaaatgagaaggcagccaccagcgaatgctaggtctcggactaagcctacctgctctccaagtctcagtggcttcatctgtcaagtgggatctgtcacaccagccatacttatctctctgtgctgtggaagcaacaggaatcaagagctgccctccttgtccacccacctatgtgccaactgttgtaactaggctcagagatgtgcacccatgggctctgacagaaagcagatacctcaccctgctacacatacaggatttgaactcagatctgtctgataggaatgtgaaagcacggactcttactgctaacttttgtgtatcgtaaccagccagatcctcttggttatttgtttaccacttgtattattaatgccattatccctgaatcccccttgccaccccaccctccctggagtgtggctgaggaggcctccatctcatgtatcatctggataggagcctgctggtcacagcctcctctgtctgcccttcaccccagtggccactcagcttcctacccacacctctgccagaagatcccctcaggactgcaacaggcttgtgcaacaataaatgttggcttgga

SEQ ID NO: 357897 - DNA, 2760 bp, Homo sapiens
agctctggggccacagcgccagcgccactctgccaggctcccggccatcgcccgcctggtgcgccgcccgccagctctttgcccgcgcggggccgcccgccgcgggctcagggcagaccatgcgcccgccaagtccgctgcccgcccgctggctatgcgtgctggcaggcgccctcgcctgggcccttgggccggcgggcggccaggcggccaggctgcaggaggagtgtgactatgtgcagatgatcgaggtgcagcacaagcagtgcctggaggaggcccagctggagaatgagacaataggctgcagcaagatgtgggacaacctcacctgctggccagccacccctcggggccaggtagttgtcttggcctgtcccctcatcttcaagctcttctcctccattcaaggccgcaatgtaagccgcagctgcaccgacgaaggctggacgcacctggagcctggcccgtaccccattgcctgtggtttggatgacaaggcagcgagtttggatgagcagcagaccatgttctacggttctgtgaagaccggctacaccattggctacggcctgtccctcgccacccttctggtcgccacagctatcctgagcctgttcaggaagctccactgcacgcggaactacatccacatgcacctcttcatatccttcatcctgagggctgccgctgtcttcatcaaagacttggccctcttcgacagcggggagtcggaccagtgctccgagggctcggtgggctgtaaggcagccatggtctttttccaatattgtgtcatggctaacttcttctggctgctggtggagggcctctacctgtacaccctgcttgccgtctccttcttctctgagcggaagtacttctgggggggtacccagcacattcaccatggtgtggaccatcgccaggatccattttgaggattatgggtgctgggacaccatcaactcctcactgtggtggatcataaagggccccatcctcacctccatcttggtaaacttcatcctgtttatttgcatcatccgaatcctgcttcagaaactgcggcccccagatatcaggaagagtgacagcagtccatactcaaggctagccaggtccacactcctgctgatccccctgtttggagtacactacatcatgttcgccttctttccggacaattttaagcctgaagtgaagatggtctttgagctcgtcgtggggtctttccagggttttgtggtggctatcctctactgcttcctcaatggtgaggtgcaggcggagctgaggcggaagtggcggcgctggcacctgcagggcgtcctgggctggaaccccaaataccggcacccgtcgggaggcagcaacggcgccacgtgcagcacgcaggtttccatgctgacccgcgtcagcccaggtgcccgccgctcctccagcttccaagccgaagtctccctggtctgaccaccaggatcccaggggcccaaggcggcccctcccgccccttcccactcaccccggcagacgccggggacagaggcctgcccgggcgcggccagccccggccctgggctcggaggctgcccccggccccctggtctctggtccggacactcctagagaacgcagccctagagcctgcctggagcgtttctagcaagtgagagagatgggagctcctctcctggaggattgcaggtggaactcagtcattagactcctcctccaaaggccccctacgccaatcaagggcaaaaagtctacatactttcatcctgactctgccccctgctggctcttctgcccaattggaggaaagcaaccggtggatcctcaaacaacactggtgtgacctgagggcagaaaggttctgcccgggaaggtcaccagcaccaacaccacggtagtgcctgaaatttcaccattgctgtcaagttcctttgggttaagcattaccactcaggcatttgactgaagatgcagctcactaccctattctctctttacgcttagttatcagctttttaaagtgggttattctggagtttttgtttggagagcacacctatcttagtggttccccaccgaagtggactggcccctgggtcagtctggtgggaggacggtgcaacccaaggactgagggactctgaagcctctgggaaatgagaaggcagccaccagcgaatgctaggtctcggactaagcctacctgctctccaagtctcagtggcttcatctgtcaagtgggatctgtcacaccagccatacttatctctctgtgctgtggaagcaacaggaatcaagagctgccctccttgtccacccacctatgtgccaactgttgtaactaggctcagagatgtgcacccatgggctctgacagaaagcagatacctcaccctgctacacatacaggatttgaactcagatctgtctgataggaatgtgaaagcacggactcttactgctaacttttgtgtatcgtaaccagccagatcctcttggttatttgtttaccacttgtattattaatgccattatccctgaatcccccttgccaccccaccctccctggagtgtggctgaggaggcctccatctcatgtatcatctggataggagcctgctggtcacagcctcctctgtctgcccttcaccccagtggccactcagcttcctacccacacctctgccagaagatcccctcaggactgcaacaggcttgtgcaacaataaatgttggcttgga

SEQ ID NO: 357898 - DNA, 2547 bp, Homo sapiens
cgccccaccaggtcacccgggagcagggaacaccaaggaacccagagtcgggcctctttcgagccctcgcttcctctcgcctggcttcttcggcgcgaaggatgaattggggttgttgaaaattgatcaaacaacccgatctctgtcagcgcctggacacttgctgggccccagctcgcagcctgggaagataagtggcacttcctgtctcgtaatcggatttgcgcgcacgaaccctcggagacgcacagggcggccaggcggccaggctgcaggaggagtgtgactatgtgcagatgatcgaggtgcagcacaagcagtgcctggaggaggcccagctggagaatgagacaataggctgcagcaagatgtgggacaacctcacctgctggccagccacccctcggggccaggtagttgtcttggcctgtcccctcatcttcaagctcttctcctccattcaaggccgcaatgtaagccgcagctgcaccgacgaaggctggacgcacctggagcctggcccgtaccccattgcctgtggtttggatgacaaggcagcgagtttggatgagcagcagaccatgttctacggttctgtgaagaccggctacaccattggctacggcctgtccctcgccacccttctggtcgccacagctatcctgagcctgttcaggggtacccagcacattcaccatggtgtggaccatcgccaggatccattttgaggattatgggtgctgggacaccatcaactcctcactgtggtggatcataaagggccccatcctcacctccatcttggtaaacttcatcctgtttatttgcatcatccgaatcctgcttcagaaactgcggcccccagatatcaggaagagtgacagcagtccatactcaaggctagccaggtccacactcctgctgatccccctgtttggagtacactacatcatgttcgccttctttccggacaattttaagcctgaagtgaagatggtctttgagctcgtcgtggggtctttccagggttttgtggtggctatcctctactgcttcctcaatggtgaggtgcaggcggagctgaggcggaagtggcggcgctggcacctgcagggcgtcctgggctggaaccccaaataccggcacccgtcgggaggcagcaacggcgccacgtgcagcacgcaggtttccatgctgacccgcgtcagcccaggtgcccgccgctcctccagcttccaagccgaagtctccctggtctgaccaccaggatcccaggggcccaaggcggcccctcccgccccttcccactcaccccggcagacgccggggacagaggcctgcccgggcgcggccagccccggccctgggctcggaggctgcccccggccccctggtctctggtccggacactcctagagaacgcagccctagagcctgcctggagcgtttctagcaagtgagagagatgggagctcctctcctggaggattgcaggtggaactcagtcattagactcctcctccaaaggccccctacgccaatcaagggcaaaaagtctacatactttcatcctgactctgccccctgctggctcttctgcccaattggaggaaagcaaccggtggatcctcaaacaacactggtgtgacctgagggcagaaaggttctgcccgggaaggtcaccagcaccaacaccacggtagtgcctgaaatttcaccattgctgtcaagttcctttgggttaagcattaccactcaggcatttgactgaagatgcagctcactaccctattctctctttacgcttagttatcagctttttaaagtgggttattctggagtttttgtttggagagcacacctatcttagtggttccccaccgaagtggactggcccctgggtcagtctggtgggaggacggtgcaacccaaggactgagggactctgaagcctctgggaaatgagaaggcagccaccagcgaatgctaggtctcggactaagcctacctgctctccaagtctcagtggcttcatctgtcaagtgggatctgtcacaccagccatacttatctctctgtgctgtggaagcaacaggaatcaagagctgccctccttgtccacccacctatgtgccaactgttgtaactaggctcagagatgtgcacccatgggctctgacagaaagcagatacctcaccctgctacacatacaggatttgaactcagatctgtctgataggaatgtgaaagcacggactcttactgctaacttttgtgtatcgtaaccagccagatcctcttggttatttgtttaccacttgtattattaatgccattatccctgaatcccccttgccaccccaccctccctggagtgtggctgaggaggcctccatctcatgtatcatctggataggagcctgctggtcacagcctcctctgtctgcccttcaccccagtggccactcagcttcctacccacacctctgccagaagatcccctcaggactgcaacaggcttgtgcaacaataaatgttggcttgga

SEQ ID NO: 357899 - DNA, 1182 bp, Homo sapiens
agctctggggccacagcgccagcgccactctgccaggctcccggccatcgcccgcctggtgcgccgcccgccagctctttgcccgcgcggggccgcccgccgcgggctcagggcagaccatgcgcccgccaagtccgctgcccgcccgctggctatgcgtgctggcaggcgccctcgcctgggcccttgggccggcgggcggccaggcggccaggctgcaggaggagtgtgactatgtgcagatgatcgaggtgcagcacaagcagtgcctggaggaggcccagctggagaatgagacaataggctgcagcaagatgtgggacaacctcacctgctggccagccacccctcggggccaggtagttgtcttggcctgtcccctcatcttcaagctcttctcctccattcaaggccgcaatgtaagccgcagctgcaccgacgaaggctggacgcacctggagcctggcccgtaccccattgcctgtggtttggatgacaaggcagcgagtttggatgagcagcagaccatgttctacggttctgtgaagaccggctacaccattggctacggcctgtccctcgccacccttctggtcgccacagctatcctgagcctgttcaggaagctccactgcacgcggaactacatccacatgcacctcttcatatccttcatcctgagggctgccgctgtcttcatcaaagacttggccctcttcgacagcggggagtcggaccagtgctccgagggctcggtgggctgtaaggcagccatggtctttttccaatattgtgtcatggctaacttcttctggctgctggtggagggcctctacctgtacaccctgcttgccgtctccttcttctctgagcggaagtacttctgggggggtacccagcacattcaccatggtgtggaccatcgccaggatccattttgaggattatgggtgctgggacaccatcaactcctcactgtggtggatcataaagggccccatcctcacctccatcttggtaaacttcatcctgtttatttgcatcatccgaatcctgcttcagaaactgcggcccccagatatcaggaagagtgacagcagtccatactcgtgagtgtgggcctagtgcctcagcccccagtacctccatccccagtcctcaaatcatcccacatctccttga

SEQ ID NO: 357900 - DNA, 402 bp, Homo sapiens
aactctttttattggaatctcagtttgctaacccaaacaaaggaaccactaatcttttggtgacaacaactaaaccaaagtcactatctctggaactaaatagttcatttaaggcacagcctgaccactccctaatgctaatcccaactcctaagtaattactgaagtattgaaaagtgttctgattctatcttggtgtataaaaactttctattttcttctgcttatttgtgatgccactcctccttgttattcaatacattgctgaaacttacttctgtaaaatttttgtgatttgattgaatgaggactcccatgttactcagtcccttttctattctattcagactccttgtccacgccgcaccctttctggtcatttatctctgggacagttttaat

SEQ ID NO: 357901 - DNA, 281 bp, Homo sapiens
agacctcagcctgcagaagcagaatctccgtggtgggatccagagcttgtatcttggccaagccctcccagaagtttctaacatacactgaaggttctcctgcttcaagagccaagatcctcaggcacaaaatcaggcaacaggagtcctgggctctgcccttgcttgtggagttctggaaacgaatgcatttggagtaggtgatgtttaatgatcctttctgttctcaattcctgtaatacaaataaacaataaaatacttacatctttattatttacat

SEQ ID NO: 357902 - DNA, 474 bp, Homo sapiens
ttttttttttccctggacgtcaatgcattctcacttgtttttactggtaagactgaaaactttcacccactaaccttcaatttctatccatggctaattcattggtaatttcttgcaactttcagaaaaacagtaattctcaatttgacacaggtttgccaatatgcatttaaagacctcttacacttcaaaccttggacttgcagatatgaaaaataataacattctcagtattctactcttcacctttgccctgccctgagcactatctaaaaaccaatgacagaaatgaattgcaaacatagcatgaagcactgctgcaattaatcaacccagagcccaagggaggaattgtttctatttttaaatgcactgttactttaagggaaaagtctgtggagaaatatgaaaccaagctgcataatgaaaataaaaatgcatttggtgtcttcatctgtgcaaagacagtaatcc

SEQ ID NO: 357903 - DNA, 226 bp, Homo sapiens
agagatctatcatgtggtcagtggttcattcattcggtccgcaaacatttgtggtgcctcttctaagggcttccacatctctcatgctgctttccccagtgctttttgaccacctctttgtgtccatcttcactgttagactgactgtaagtttcttggttttattcgtatttgtatggccagtaactagggcagtgcctggtgcaggataatcactcagaaattg

SEQ ID NO: 357904 - DNA, 693 bp, Homo sapiens
gaatgctcaaggattattaaacaaagtaacttgaagagtggtagaataggagacataccttaacaaagcttaattatcaccctggagcaggaaacaatctctttgcctttaaatgtgccacttctctgaacctcatcaatgataacagccattccctcatagtctttttcactccagtaatatgtgcatttaggcagaaagcatgttcacctacattttctctctgcaggtgctttactccatgaactgtctaatgacggtgctcataagcagtttgatcactacctcgaagagctcatcttgcccatcatggtgggctgtgccaagaaaggagaacgagagtgccacattgttgtgctgacggatgaggattctgtggactgggatgaagaccaccctccaccaatgggggaggaatattcccaaagtaggagcttctggcatggcgtagatgttttcagcaagaaacttgctacctggagtagcagcttgatcctagaaccaatgtgaatatcaatgttgagcctgtgatgagcacactcacctggatgacaaatccctagtgacgcaggtctagcctttatgctggggaacacagtgaatgttgttcaccattcactctttctctggtgtctcgtactgtgtaagatactgaggcagcacattaaatgatggtgtcattcttctcttaat

SEQ ID NO: 357905 - DNA, 1025 bp, Homo sapiens
  misc_feature (416)..(416): n is a, c, g, or t
gcggcacagccggtcccggctgcggcttctggctgcgcggcctgcgcgcgcctcccgggcggattccagccccgagcgggacagcgcggcggggagcgacgagcctcgggtggttcatcccgccggagaggaatggcgagaacctggagtgttgactggcaaaacatttgcagacgcggtttttctggcaattaattggctccattaaaaattaggtagttggtggggacttcctcctgaactctggagccgagcgcattttgctcggtcttttcagccctgtttccgcgtcttccttccctgccacccgcaaattgccagctttcatccgtggctctgagtgcaaaagagctggggaaagccttaaccagcaattttcttttaaataaaactttgcttttaaaaaaaaaaaaaanaaaaaaaaaaaaaaaaaaaaacaaaacgacaggcgggggcggcggccccccctccccccccgcggcccccgcagaaccacgcatgagggaggaggaacaaagacacgcgcacaaccagaggatagtggaccacttaacaaccacagaagggacgaggcgaagaacaaacacacccgtgacagaggggcccaacacacgagtcgtggcgcggttgacagagggaagacaacacctaccccggcagggccgaataggaagcagcacaaccacacaacgaccatgacacgacagcgaggccagcaaacaacaaaccaaacaacagaacgcgaacgaatggatggtaagcaacgcagacggttacctactcaagcacacacaggaacgcacgaactgacctctagtcgatgatcagatagacttgatcatacaatatacgccgagggtaggcggatcgaacaaccagcgcacagcaccaacacgtcccgccccccgccgtcgcccacatacgcagacaccacacgaacccgcccgaccccccgaacccacgctcgtccgtctcccacaacgccaccacaccaccaccaagcggcgcccacccacaccacccgc

SEQ ID NO: 357906 - DNA, 6015 bp, Homo sapiens
  misc_feature (5172)..(5172): n is a, c, g, or t
  misc_feature (5192)..(5192): n is a, c, g, or t
ccaggctcaagtgagcctctcacctcagcctcacgagttgctgggaccacagacctctcacttgactatgcctctcagccagcaaatcttcagttccctcacataatgccccttgctgaagacatcaaaggttcttgcttccaaagtgggaataaacggaaccatgaaccttttattgctccagaaagatttggaaacagtagtgtgggctttggcagtaattcccattcccaagcaccagagaaagtgacgcttcttgtagatggcacacgttttgttgtgaatccacagattttcactgctcatccggataccatgctgggaaggatgtttggaccaggaagagagtacaacttcactcggcccaatgagaagggagagtatgagattgctgaaggcatcagtgcaactgtatttcgcacagtgctggattattacaaaaccggtatcatcaattgtcctgatggcatctctatcccagatcttagagatacttgtgattatctctgcattaattttgacttcaacactatccgatgtcaagatctgagtgctttactccatgaactgtctaatgacggtgctcataagcagtttgatcactacctcgaagagctcatcttgcccatcatggtgggctgtgccaagaaaggagaacgagagtgccacattgttgtgctgacggatgaggattctgtggactgggatgaagaccaccctccaccaatgggggaggaatattcccaaattctttatagctccaagctctacagattcttcaaatatattgagaatagggatgttgcaaaaacagtgttaaaggaacggggcctaaaaaacattcgcattggaattgaaggttaccctacctgtaaagaaaaaattaagagaaggcctggcggccggtctgaagtcatctataattatgtacaacgccccttcatccagatgtcatgggaaaaggaagaagggaagagtcgccatgtggatttccagtgtgttcgaagcaaatccctcacgaatctggtagctgctggagatgatgtcttggaggaccaggagatattaatgcatcacccaccccaagtggatgaacttgaccggctaaatgccccactttctcagatggcttctaacgactttcaggattagggccagctgtgggtctactccttgttggagcccatctcacctgggatgcctgcagccagccctccctcgtgatttgtctcaccttgagtaggagacatgcttctcccctaaccttttcctttctgccataattaacatatgtccttttcagtaagtccatgcctctggcaggggatgaagaagtactcactggtaattagctaccatctttgcagcagccctggtaacttgaaaaatttgggtctggtgctgttcattgagtctttgtgtaactgcaaaagcaggaaaggaagtcaagactcctgttgcctcgtgcttagcaaagcagtccttatcctttatactctgttcttgggttttgtttttgtcttgttttataccaggcaaattgcttagtagcaaagggaccaaactgaaaaggtgacaatctctaacttctaaaagcagacaccaatcggatgctcattagaggttaatgaagatgccattcttggtggcctctgcacccaaattgcatctggaaagaactagggtctcattcagaatgtccaaaaggaaattcttaagagcttaaattcagatttgtgtctcattaatgcagtgaacaattcaaaaccacacagattccttggcaggaaggataatggaataacagtgttgatgagacctttttagcttcaaggtttcggagtctaaacaaatggatgattcatttggaatgaaactcacaatgcaagtagaaggacctctccaaatcaggccagttgggttatcctggcttggaatctggtgtgaaaccataggtcttaacactctggagcagcacattgctgtggatatgtccaggagaccttagatatggcttaaaggctttcaagatgaggacagaaattgcttacaattgctcagtttctcaacagaaagactcataagagtgccagcatggggtacatggagtgaagctgggtgggaagcatcatctgcacagtccctgtcctagtgcaggacttttctctgtatgttttcataccatgggatttttggatatcagtgtattttggttcttgaaatagcctaatagctgctcacacattgggtaggaatattataccaatgtcatccccaaaggaagggtgagctgaatggaaattaagcccagtcattttatttgatctattagctctgttatcagtgcatgatcacccagatcaccctcctcagcccacacagtgctgaaccatcttccctcctgttctccatggctattaatagtatagctaaatttagagtgcagagccagatataagtattttggaattatctcccagtttgtggtagaagctgactggaatacaggttgagtatctcttatccaaaatgctagggaccagaaaggtttcagattttttcagattttggaatacttaacagttgagcaccccaaatctgaaaggcttctgaacgtcatgtcagcactcaaaaaagtggattttggagcacttcaaatttcggatttttggatttgggatgctcatcctgtgtaggagaggctactcgattccatttaatgactgtcctagtcataatcatccaaagataaaagccaggtagatgttgaaagctctttccagggctgaaaaagtgttcttacgttctctgcatgtgactagcatcactgtggaaattaatgctctgttcttcactagaatgtagtaagtggttaaactgagctatcccccacctgatgactattggcatccatttgcaaggccaatggcctggattaagggttaggattatttgtagctagaaggtaattttatttctgtgaaactaattggctcatatttgaggttaggtgtggccttgaccttaccagtacatttatacccactaccagttgactagcccagataattgttaaatggtgcttcttttctgcttctcagtagacttccatgccattacaaaggaaatttgaattacctagtgtttgtatattccatgataactatgtataacttctgttacacagcttatgtattgttaacatttaagtgtaaaccatgccacagctaacacttaaaaatgaaaactaattagttcttgcttagggaaaatgccaggtatgaagtatggcatatacttgacactgtcctgtgtaaccctttactttgctcaggctttcaagattgagtcttttttcccccaaattaggttaacatgcatttgaccccaacctgtggggtttgagtaagctggaaatctgtgacggtaggctttctagtgtcacgaggtggtggtgactgaaggaaaagctgggatcacaggttccttctgatggagaggaaggtttatttctatgcccctcccaccaccctccacctagagctcacccaagcctgctccagtcccaggggcaggccattctgcaaaagcaggacctcacagaaacaagggctgggttgaggtcacccccttcagagttggttcctggccagatgggtaagaggcatttgtaattttaaaaatgtgaaacttgggtttggtgttttcttctaagtgcctaaataagcaagccaggctgttgatattttagccagagaaatcggcaagccaagattaacccgaatctgaagtttagaatcttgagtttgcatctgcatcatatcatgctgttttgatgaggaaacatttgccactgaggagttggagggagggcaagacgacagtgttaagtcagatcatttaatggtttcccctaagccctggaaaaatatttgaaagaatggcagcaaaaaggttaagaaagcaagccagatttactgcacaatatgcagtacccagtactactttaaatcccaagagaacagtgtgatgtctaatatatacaggtctatgaaaatactgtggaataagcccaggaaggttagatgtgtttgcaaataagttgcccaaagggtccccctctaagtaaaacaaatattcagaccacaggctttaatgtaaactgtcaaaaagtgggatgtggaggatttttgttaagtgtcaatcgaagttaaaaagcaagggtttttggccaggcgtggtggctcacgcctgtaatcccagcactttgggaggccgaggccggcaaatcacctaaggtcaggagttcgagaccagcctggccaacatggtgaaaccccgtctctactaaaaatacaaaaaaattagcccggtgtggtggcaagtgcctgtagtcccagctacttgggaggctgaggcaggagaactgcttgaacccgggaggtagaggttgcagtgagccacgatcatgccactgcactccagcctgggcaacagagcaagactccatctcaaaaaagaaaaaaaaaaattaaaggttttggctgggtgcagtggctcatgccggtaatcccagcactttgggaggccaaggtgggaggatcacttgaggtcaggagtttcagactggcctgggcaacgtaaaaaattaaaaaaatagccaggcatggacatggtagtgcatacctgtggtcccagccactcaagaggctgagacaggatgattgcttgagcccaggaggatgaggctgcagtgagccatgatgacgctactgcactccagcctggatgacagggcaagaccctgtctcaatattttaagtcaagggtttgtagtaatgtattcagtgccacttcttgccatcactttgcaattattgaaatgggaatactgagctcagaaagcaaatatgatgctttcatgggagatggagccacatttgtgttctgggtgggatcactagtgcaggagaacattacattttcttctgaaggcaaaatgcttgtaggttttgcctctactttgtatttacttttaaaattgcacttgttcacctaccagtgtttacgaaatcctgtatttgggatgctttttctataataaaatattataatttgagaaaaaaaaaaaaaaaaaaaaaaaaaaaaaaaaaaaaaaaaaaaaaaaaaaanaaaaaaaaaaaaaaaaaaanaaaaagagaggggggggcggcgacgcaaagatatcatcctccgcaaggagagagcgaaccagagatcaggcgcgaccgccacacatatatgaaaggagaaaagagggcgcgccccacgtaggaggaggagtattcttatatatacaacgagagggggggggccggccgctaatataaaacaccacagcccagcgagggggaaaaaccgcggcacacagccgaggacactttggagaggagaagagcaaccccccacaacgggggggggagggcgaacaaagaagaggagagagaaacacccaccctcacccagcagatatattacagagatccagggggagaaaatacaacaacaatctcagagagagggtatgtagagggtggacacaccaaatgtcgatattattggtgcctagcagagaacgaaaaatttggcgacaagacgagttatcttttatcaaaaatatttttacggcggggctcccgctactctaaccggagatacacataaaaaaaaagaagagggaaaaagcaataacgagaggaaggagtaggaggaaaaagaagacaagaaaaaaaaaggagaggagggaaacagcaaaagcaaagagagaagaagaagaaaggaggcaaaaaagcagggagaagagaagagaggagaaaacaaaagagaaagaaacaaaaaaaaaaacaaaagacgacggacacaacagaaaaaaaaaaagcaaaagaaagagaacagaagcagaagaagacgaacaaacaaaacagaaaaaaagaggaacaaaaaaaaaacgaaacaaacaagagcgcaaacaacaag

SEQ ID NO: 357907 - DNA, 6271 bp, Homo sapiens
  misc_feature (5428)..(5428): n is a, c, g, or t
  misc_feature (5448)..(5448): n is a, c, g, or t
gcggcacagccggtcccggctgcggcttctggctgcgcggcctgcgcgcgcctcccgggcggattccagccccgagcgggacagcgcggcggggagcgacgagatttctctctgatcaaacggacagttcaggactcagaatctaaggatgaatgttcaccgtggcagtgacagtgacaggttattgcggcaggaggccagctgcttagtggatgatactttagctgtagcccaagaaaaagaagcaaacagcctggcttcatctggtcctcataatcttacttatcctctaggtcccaggaatgaagacctctcacttgactatgcctctcagccagcaaatcttcagttccctcacataatgccccttgctgaagacatcaaaggttcttgcttccaaagtgggaataaacggaaccatgaaccttttattgctccagaaagatttggaaacagtagtgtgggctttggcagtaattcccattcccaagcaccagagaaagtgacgcttcttgtagatggcacacgttttgttgtgaatccacagattttcactgctcatccggataccatgctgggaaggatgtttggaccaggaagagagtacaacttcactcggcccaatgagaagggagagtatgagattgctgaaggcatcagtgcaactgtatttcgcacagtgctggattattacaaaaccggtatcatcaattgtcctgatggcatctctatcccagatcttagagatacttgtgattatctctgcattaattttgacttcaacactatccgatgtcaagatctgagtgctttactccatgaactgtctaatgacggtgctcataagcagtttgatcactacctcgaagagctcatcttgcccatcatggtgggctgtgccaagaaaggagaacgagagtgccacattgttgtgctgacggatgaggattctgtggactgggatgaagaccaccctccaccaatgggggaggaatattcccaaattctttatagctccaagctctacagattcttcaaatatattgagaatagggatgttgcaaaaacagtgttaaaggaacggggcctaaaaaacattcgcattggaattgaaggttaccctacctgtaaagaaaaaattaagagaaggcctggcggccggtctgaagtcatctataattatgtacaacgccccttcatccagatgtcatgggaaaaggaagaagggaagagtcgccatgtggatttccagtgtgttcgaagcaaatccctcacgaatctggtagctgctggagatgatgtcttggaggaccaggagatattaatgcatcacccaccccaagtggatgaacttgaccggctaaatgccccactttctcagatggcttctaacgactttcaggattagggccagctgtgggtctactccttgttggagcccatctcacctgggatgcctgcagccagccctccctcgtgatttgtctcaccttgagtaggagacatgcttctcccctaaccttttcctttctgccataattaacatatgtccttttcagtaagtccatgcctctggcaggggatgaagaagtactcactggtaattagctaccatctttgcagcagccctggtaacttgaaaaatttgggtctggtgctgttcattgagtctttgtgtaactgcaaaagcaggaaaggaagtcaagactcctgttgcctcgtgcttagcaaagcagtccttatcctttatactctgttcttgggttttgtttttgtcttgttttataccaggcaaattgcttagtagcaaagggaccaaactgaaaaggtgacaatctctaacttctaaaagcagacaccaatcggatgctcattagaggttaatgaagatgccattcttggtggcctctgcacccaaattgcatctggaaagaactagggtctcattcagaatgtccaaaaggaaattcttaagagcttaaattcagatttgtgtctcattaatgcagtgaacaattcaaaaccacacagattccttggcaggaaggataatggaataacagtgttgatgagacctttttagcttcaaggtttcggagtctaaacaaatggatgattcatttggaatgaaactcacaatgcaagtagaaggacctctccaaatcaggccagttgggttatcctggcttggaatctggtgtgaaaccataggtcttaacactctggagcagcacattgctgtggatatgtccaggagaccttagatatggcttaaaggctttcaagatgaggacagaaattgcttacaattgctcagtttctcaacagaaagactcataagagtgccagcatggggtacatggagtgaagctgggtgggaagcatcatctgcacagtccctgtcctagtgcaggacttttctctgtatgttttcataccatgggatttttggatatcagtgtattttggttcttgaaatagcctaatagctgctcacacattgggtaggaatattataccaatgtcatccccaaaggaagggtgagctgaatggaaattaagcccagtcattttatttgatctattagctctgttatcagtgcatgatcacccagatcaccctcctcagcccacacagtgctgaaccatcttccctcctgttctccatggctattaatagtatagctaaatttagagtgcagagccagatataagtattttggaattatctcccagtttgtggtagaagctgactggaatacaggttgagtatctcttatccaaaatgctagggaccagaaaggtttcagattttttcagattttggaatacttaacagttgagcaccccaaatctgaaaggcttctgaacgtcatgtcagcactcaaaaaagtggattttggagcacttcaaatttcggatttttggatttgggatgctcatcctgtgtaggagaggctactcgattccatttaatgactgtcctagtcataatcatccaaagataaaagccaggtagatgttgaaagctctttccagggctgaaaaagtgttcttacgttctctgcatgtgactagcatcactgtggaaattaatgctctgttcttcactagaatgtagtaagtggttaaactgagctatcccccacctgatgactattggcatccatttgcaaggccaatggcctggattaagggttaggattatttgtagctagaaggtaattttatttctgtgaaactaattggctcatatttgaggttaggtgtggccttgaccttaccagtacatttatacccactaccagttgactagcccagataattgttaaatggtgcttcttttctgcttctcagtagacttccatgccattacaaaggaaatttgaattacctagtgtttgtatattccatgataactatgtataacttctgttacacagcttatgtattgttaacatttaagtgtaaaccatgccacagctaacacttaaaaatgaaaactaattagttcttgcttagggaaaatgccaggtatgaagtatggcatatacttgacactgtcctgtgtaaccctttactttgctcaggctttcaagattgagtcttttttcccccaaattaggttaacatgcatttgaccccaacctgtggggtttgagtaagctggaaatctgtgacggtaggctttctagtgtcacgaggtggtggtgactgaaggaaaagctgggatcacaggttccttctgatggagaggaaggtttatttctatgcccctcccaccaccctccacctagagctcacccaagcctgctccagtcccaggggcaggccattctgcaaaagcaggacctcacagaaacaagggctgggttgaggtcacccccttcagagttggttcctggccagatgggtaagaggcatttgtaattttaaaaatgtgaaacttgggtttggtgttttcttctaagtgcctaaataagcaagccaggctgttgatattttagccagagaaatcggcaagccaagattaacccgaatctgaagtttagaatcttgagtttgcatctgcatcatatcatgctgttttgatgaggaaacatttgccactgaggagttggagggagggcaagacgacagtgttaagtcagatcatttaatggtttcccctaagccctggaaaaatatttgaaagaatggcagcaaaaaggttaagaaagcaagccagatttactgcacaatatgcagtacccagtactactttaaatcccaagagaacagtgtgatgtctaatatatacaggtctatgaaaatactgtggaataagcccaggaaggttagatgtgtttgcaaataagttgcccaaagggtccccctctaagtaaaacaaatattcagaccacaggctttaatgtaaactgtcaaaaagtgggatgtggaggatttttgttaagtgtcaatcgaagttaaaaagcaagggtttttggccaggcgtggtggctcacgcctgtaatcccagcactttgggaggccgaggccggcaaatcacctaaggtcaggagttcgagaccagcctggccaacatggtgaaaccccgtctctactaaaaatacaaaaaaattagcccggtgtggtggcaagtgcctgtagtcccagctacttgggaggctgaggcaggagaactgcttgaacccgggaggtagaggttgcagtgagccacgatcatgccactgcactccagcctgggcaacagagcaagactccatctcaaaaaagaaaaaaaaaaattaaaggttttggctgggtgcagtggctcatgccggtaatcccagcactttgggaggccaaggtgggaggatcacttgaggtcaggagtttcagactggcctgggcaacgtaaaaaattaaaaaaatagccaggcatggacatggtagtgcatacctgtggtcccagccactcaagaggctgagacaggatgattgcttgagcccaggaggatgaggctgcagtgagccatgatgacgctactgcactccagcctggatgacagggcaagaccctgtctcaatattttaagtcaagggtttgtagtaatgtattcagtgccacttcttgccatcactttgcaattattgaaatgggaatactgagctcagaaagcaaatatgatgctttcatgggagatggagccacatttgtgttctgggtgggatcactagtgcaggagaacattacattttcttctgaaggcaaaatgcttgtaggttttgcctctactttgtatttacttttaaaattgcacttgttcacctaccagtgtttacgaaatcctgtatttgggatgctttttctataataaaatattataatttgagaaaaaaaaaaaaaaaaaaaaaaaaaaaaaaaaaaaaaaaaaaaaaaaaaaanaaaaaaaaaaaaaaaaaaanaaaaagagaggggggggcggcgacgcaaagatatcatcctccgcaaggagagagcgaaccagagatcaggcgcgaccgccacacatatatgaaaggagaaaagagggcgcgccccacgtaggaggaggagtattcttatatatacaacgagagggggggggccggccgctaatataaaacaccacagcccagcgagggggaaaaaccgcggcacacagccgaggacactttggagaggagaagagcaaccccccacaacgggggggggagggcgaacaaagaagaggagagagaaacacccaccctcacccagcagatatattacagagatccagggggagaaaatacaacaacaatctcagagagagggtatgtagagggtggacacaccaaatgtcgatattattggtgcctagcagagaacgaaaaatttggcgacaagacgagttatcttttatcaaaaatatttttacggcggggctcccgctactctaaccggagatacacataaaaaaaaagaagagggaaaaagcaataacgagaggaaggagtaggaggaaaaagaagacaagaaaaaaaaaggagaggagggaaacagcaaaagcaaagagagaagaagaagaaaggaggcaaaaaagcagggagaagagaagagaggagaaaacaaaagagaaagaaacaaaaaaaaaaacaaaagacgacggacacaacagaaaaaaaaaaagcaaaagaaagagaacagaagcagaagaagacgaacaaacaaaacagaaaaaaagaggaacaaaaaaaaaacgaaacaaacaagagcgcaaacaacaag

SEQ ID NO: 357908 - DNA, 6139 bp, Homo sapiens
  misc_feature (5296)..(5296): n is a, c, g, or t
  misc_feature (5316)..(5316): n is a, c, g, or t
gcggcacagccggtcccggctgcggcttctggctgcgcggcctgcgcgcgcctcccgggcggattccagccccgagcgggacagcgcggcggggagcgacgagatttctctctgatcaaacggacagttcaggactcagaatctaaggatgaatgttcaccgtggcagtgacagtgacaggttattgcggcaggaggccagctgcttagtggatgatactttagctgtagcccaagaaaaagaagcaaacagcctggcttcatctggtcctcataatcttacttatcctctaggtcccaggaatgaagaaagatttggaaacagtagtgtgggctttggcagtaattcccattcccaagcaccagagaaagtgacgcttcttgtagatggcacacgttttgttgtgaatccacagattttcactgctcatccggataccatgctgggaaggatgtttggaccaggaagagagtacaacttcactcggcccaatgagaagggagagtatgagattgctgaaggcatcagtgcaactgtatttcgcacagtgctggattattacaaaaccggtatcatcaattgtcctgatggcatctctatcccagatcttagagatacttgtgattatctctgcattaattttgacttcaacactatccgatgtcaagatctgagtgctttactccatgaactgtctaatgacggtgctcataagcagtttgatcactacctcgaagagctcatcttgcccatcatggtgggctgtgccaagaaaggagaacgagagtgccacattgttgtgctgacggatgaggattctgtggactgggatgaagaccaccctccaccaatgggggaggaatattcccaaattctttatagctccaagctctacagattcttcaaatatattgagaatagggatgttgcaaaaacagtgttaaaggaacggggcctaaaaaacattcgcattggaattgaaggttaccctacctgtaaagaaaaaattaagagaaggcctggcggccggtctgaagtcatctataattatgtacaacgccccttcatccagatgtcatgggaaaaggaagaagggaagagtcgccatgtggatttccagtgtgttcgaagcaaatccctcacgaatctggtagctgctggagatgatgtcttggaggaccaggagatattaatgcatcacccaccccaagtggatgaacttgaccggctaaatgccccactttctcagatggcttctaacgactttcaggattagggccagctgtgggtctactccttgttggagcccatctcacctgggatgcctgcagccagccctccctcgtgatttgtctcaccttgagtaggagacatgcttctcccctaaccttttcctttctgccataattaacatatgtccttttcagtaagtccatgcctctggcaggggatgaagaagtactcactggtaattagctaccatctttgcagcagccctggtaacttgaaaaatttgggtctggtgctgttcattgagtctttgtgtaactgcaaaagcaggaaaggaagtcaagactcctgttgcctcgtgcttagcaaagcagtccttatcctttatactctgttcttgggttttgtttttgtcttgttttataccaggcaaattgcttagtagcaaagggaccaaactgaaaaggtgacaatctctaacttctaaaagcagacaccaatcggatgctcattagaggttaatgaagatgccattcttggtggcctctgcacccaaattgcatctggaaagaactagggtctcattcagaatgtccaaaaggaaattcttaagagcttaaattcagatttgtgtctcattaatgcagtgaacaattcaaaaccacacagattccttggcaggaaggataatggaataacagtgttgatgagacctttttagcttcaaggtttcggagtctaaacaaatggatgattcatttggaatgaaactcacaatgcaagtagaaggacctctccaaatcaggccagttgggttatcctggcttggaatctggtgtgaaaccataggtcttaacactctggagcagcacattgctgtggatatgtccaggagaccttagatatggcttaaaggctttcaagatgaggacagaaattgcttacaattgctcagtttctcaacagaaagactcataagagtgccagcatggggtacatggagtgaagctgggtgggaagcatcatctgcacagtccctgtcctagtgcaggacttttctctgtatgttttcataccatgggatttttggatatcagtgtattttggttcttgaaatagcctaatagctgctcacacattgggtaggaatattataccaatgtcatccccaaaggaagggtgagctgaatggaaattaagcccagtcattttatttgatctattagctctgttatcagtgcatgatcacccagatcaccctcctcagcccacacagtgctgaaccatcttccctcctgttctccatggctattaatagtatagctaaatttagagtgcagagccagatataagtattttggaattatctcccagtttgtggtagaagctgactggaatacaggttgagtatctcttatccaaaatgctagggaccagaaaggtttcagattttttcagattttggaatacttaacagttgagcaccccaaatctgaaaggcttctgaacgtcatgtcagcactcaaaaaagtggattttggagcacttcaaatttcggatttttggatttgggatgctcatcctgtgtaggagaggctactcgattccatttaatgactgtcctagtcataatcatccaaagataaaagccaggtagatgttgaaagctctttccagggctgaaaaagtgttcttacgttctctgcatgtgactagcatcactgtggaaattaatgctctgttcttcactagaatgtagtaagtggttaaactgagctatcccccacctgatgactattggcatccatttgcaaggccaatggcctggattaagggttaggattatttgtagctagaaggtaattttatttctgtgaaactaattggctcatatttgaggttaggtgtggccttgaccttaccagtacatttatacccactaccagttgactagcccagataattgttaaatggtgcttcttttctgcttctcagtagacttccatgccattacaaaggaaatttgaattacctagtgtttgtatattccatgataactatgtataacttctgttacacagcttatgtattgttaacatttaagtgtaaaccatgccacagctaacacttaaaaatgaaaactaattagttcttgcttagggaaaatgccaggtatgaagtatggcatatacttgacactgtcctgtgtaaccctttactttgctcaggctttcaagattgagtcttttttcccccaaattaggttaacatgcatttgaccccaacctgtggggtttgagtaagctggaaatctgtgacggtaggctttctagtgtcacgaggtggtggtgactgaaggaaaagctgggatcacaggttccttctgatggagaggaaggtttatttctatgcccctcccaccaccctccacctagagctcacccaagcctgctccagtcccaggggcaggccattctgcaaaagcaggacctcacagaaacaagggctgggttgaggtcacccccttcagagttggttcctggccagatgggtaagaggcatttgtaattttaaaaatgtgaaacttgggtttggtgttttcttctaagtgcctaaataagcaagccaggctgttgatattttagccagagaaatcggcaagccaagattaacccgaatctgaagtttagaatcttgagtttgcatctgcatcatatcatgctgttttgatgaggaaacatttgccactgaggagttggagggagggcaagacgacagtgttaagtcagatcatttaatggtttcccctaagccctggaaaaatatttgaaagaatggcagcaaaaaggttaagaaagcaagccagatttactgcacaatatgcagtacccagtactactttaaatcccaagagaacagtgtgatgtctaatatatacaggtctatgaaaatactgtggaataagcccaggaaggttagatgtgtttgcaaataagttgcccaaagggtccccctctaagtaaaacaaatattcagaccacaggctttaatgtaaactgtcaaaaagtgggatgtggaggatttttgttaagtgtcaatcgaagttaaaaagcaagggtttttggccaggcgtggtggctcacgcctgtaatcccagcactttgggaggccgaggccggcaaatcacctaaggtcaggagttcgagaccagcctggccaacatggtgaaaccccgtctctactaaaaatacaaaaaaattagcccggtgtggtggcaagtgcctgtagtcccagctacttgggaggctgaggcaggagaactgcttgaacccgggaggtagaggttgcagtgagccacgatcatgccactgcactccagcctgggcaacagagcaagactccatctcaaaaaagaaaaaaaaaaattaaaggttttggctgggtgcagtggctcatgccggtaatcccagcactttgggaggccaaggtgggaggatcacttgaggtcaggagtttcagactggcctgggcaacgtaaaaaattaaaaaaatagccaggcatggacatggtagtgcatacctgtggtcccagccactcaagaggctgagacaggatgattgcttgagcccaggaggatgaggctgcagtgagccatgatgacgctactgcactccagcctggatgacagggcaagaccctgtctcaatattttaagtcaagggtttgtagtaatgtattcagtgccacttcttgccatcactttgcaattattgaaatgggaatactgagctcagaaagcaaatatgatgctttcatgggagatggagccacatttgtgttctgggtgggatcactagtgcaggagaacattacattttcttctgaaggcaaaatgcttgtaggttttgcctctactttgtatttacttttaaaattgcacttgttcacctaccagtgtttacgaaatcctgtatttgggatgctttttctataataaaatattataatttgagaaaaaaaaaaaaaaaaaaaaaaaaaaaaaaaaaaaaaaaaaaaaaaaaaaanaaaaaaaaaaaaaaaaaaanaaaaagagaggggggggcggcgacgcaaagatatcatcctccgcaaggagagagcgaaccagagatcaggcgcgaccgccacacatatatgaaaggagaaaagagggcgcgccccacgtaggaggaggagtattcttatatatacaacgagagggggggggccggccgctaatataaaacaccacagcccagcgagggggaaaaaccgcggcacacagccgaggacactttggagaggagaagagcaaccccccacaacgggggggggagggcgaacaaagaagaggagagagaaacacccaccctcacccagcagatatattacagagatccagggggagaaaatacaacaacaatctcagagagagggtatgtagagggtggacacaccaaatgtcgatattattggtgcctagcagagaacgaaaaatttggcgacaagacgagttatcttttatcaaaaatatttttacggcggggctcccgctactctaaccggagatacacataaaaaaaaagaagagggaaaaagcaataacgagaggaaggagtaggaggaaaaagaagacaagaaaaaaaaaggagaggagggaaacagcaaaagcaaagagagaagaagaagaaaggaggcaaaaaagcagggagaagagaagagaggagaaaacaaaagagaaagaaacaaaaaaaaaaacaaaagacgacggacacaacagaaaaaaaaaaagcaaaagaaagagaacagaagcagaagaagacgaacaaacaaaacagaaaaaaagaggaacaaaaaaaaaacgaaacaaacaagagcgcaaacaacaag

SEQ ID NO: 357909 - DNA, 5773 bp, Homo sapiens
  misc_feature (4930)..(4930): n is a, c, g, or t
  misc_feature (4950)..(4950): n is a, c, g, or t
gcggcacagccggtcccggctgcggcttctggctgcgcggcctgcgcgcgcctcccgggcggattccagccccgagcgggacagcgcggcggggagcgacgagatttctctctgatcaaacggacagttcaggactcagaatctaaggatgaatgttcaccgtggcagtgacagtgacaggttattgcggcaggaggccagctgcttagtggatgatactttagctgtagcccaagaaaaagaagcaaacagcctggcttcatctggtcctcataatcttacttatcctctaggtcccaggaatgaaggtgctttactccatgaactgtctaatgacggtgctcataagcagtttgatcactacctcgaagagctcatcttgcccatcatggtgggctgtgccaagaaaggagaacgagagtgccacattgttgtgctgacggatgaggattctgtggactgggatgaagaccaccctccaccaatgggggaggaatattcccaaattctttatagctccaagctctacagattcttcaaatatattgagaatagggatgttgcaaaaacagtgttaaaggaacggggcctaaaaaacattcgcattggaattgaaggttaccctacctgtaaagaaaaaattaagagaaggcctggcggccggtctgaagtcatctataattatgtacaacgccccttcatccagatgtcatgggaaaaggaagaagggaagagtcgccatgtggatttccagtgtgttcgaagcaaatccctcacgaatctggtagctgctggagatgatgtcttggaggaccaggagatattaatgcatcacccaccccaagtggatgaacttgaccggctaaatgccccactttctcagatggcttctaacgactttcaggattagggccagctgtgggtctactccttgttggagcccatctcacctgggatgcctgcagccagccctccctcgtgatttgtctcaccttgagtaggagacatgcttctcccctaaccttttcctttctgccataattaacatatgtccttttcagtaagtccatgcctctggcaggggatgaagaagtactcactggtaattagctaccatctttgcagcagccctggtaacttgaaaaatttgggtctggtgctgttcattgagtctttgtgtaactgcaaaagcaggaaaggaagtcaagactcctgttgcctcgtgcttagcaaagcagtccttatcctttatactctgttcttgggttttgtttttgtcttgttttataccaggcaaattgcttagtagcaaagggaccaaactgaaaaggtgacaatctctaacttctaaaagcagacaccaatcggatgctcattagaggttaatgaagatgccattcttggtggcctctgcacccaaattgcatctggaaagaactagggtctcattcagaatgtccaaaaggaaattcttaagagcttaaattcagatttgtgtctcattaatgcagtgaacaattcaaaaccacacagattccttggcaggaaggataatggaataacagtgttgatgagacctttttagcttcaaggtttcggagtctaaacaaatggatgattcatttggaatgaaactcacaatgcaagtagaaggacctctccaaatcaggccagttgggttatcctggcttggaatctggtgtgaaaccataggtcttaacactctggagcagcacattgctgtggatatgtccaggagaccttagatatggcttaaaggctttcaagatgaggacagaaattgcttacaattgctcagtttctcaacagaaagactcataagagtgccagcatggggtacatggagtgaagctgggtgggaagcatcatctgcacagtccctgtcctagtgcaggacttttctctgtatgttttcataccatgggatttttggatatcagtgtattttggttcttgaaatagcctaatagctgctcacacattgggtaggaatattataccaatgtcatccccaaaggaagggtgagctgaatggaaattaagcccagtcattttatttgatctattagctctgttatcagtgcatgatcacccagatcaccctcctcagcccacacagtgctgaaccatcttccctcctgttctccatggctattaatagtatagctaaatttagagtgcagagccagatataagtattttggaattatctcccagtttgtggtagaagctgactggaatacaggttgagtatctcttatccaaaatgctagggaccagaaaggtttcagattttttcagattttggaatacttaacagttgagcaccccaaatctgaaaggcttctgaacgtcatgtcagcactcaaaaaagtggattttggagcacttcaaatttcggatttttggatttgggatgctcatcctgtgtaggagaggctactcgattccatttaatgactgtcctagtcataatcatccaaagataaaagccaggtagatgttgaaagctctttccagggctgaaaaagtgttcttacgttctctgcatgtgactagcatcactgtggaaattaatgctctgttcttcactagaatgtagtaagtggttaaactgagctatcccccacctgatgactattggcatccatttgcaaggccaatggcctggattaagggttaggattatttgtagctagaaggtaattttatttctgtgaaactaattggctcatatttgaggttaggtgtggccttgaccttaccagtacatttatacccactaccagttgactagcccagataattgttaaatggtgcttcttttctgcttctcagtagacttccatgccattacaaaggaaatttgaattacctagtgtttgtatattccatgataactatgtataacttctgttacacagcttatgtattgttaacatttaagtgtaaaccatgccacagctaacacttaaaaatgaaaactaattagttcttgcttagggaaaatgccaggtatgaagtatggcatatacttgacactgtcctgtgtaaccctttactttgctcaggctttcaagattgagtcttttttcccccaaattaggttaacatgcatttgaccccaacctgtggggtttgagtaagctggaaatctgtgacggtaggctttctagtgtcacgaggtggtggtgactgaaggaaaagctgggatcacaggttccttctgatggagaggaaggtttatttctatgcccctcccaccaccctccacctagagctcacccaagcctgctccagtcccaggggcaggccattctgcaaaagcaggacctcacagaaacaagggctgggttgaggtcacccccttcagagttggttcctggccagatgggtaagaggcatttgtaattttaaaaatgtgaaacttgggtttggtgttttcttctaagtgcctaaataagcaagccaggctgttgatattttagccagagaaatcggcaagccaagattaacccgaatctgaagtttagaatcttgagtttgcatctgcatcatatcatgctgttttgatgaggaaacatttgccactgaggagttggagggagggcaagacgacagtgttaagtcagatcatttaatggtttcccctaagccctggaaaaatatttgaaagaatggcagcaaaaaggttaagaaagcaagccagatttactgcacaatatgcagtacccagtactactttaaatcccaagagaacagtgtgatgtctaatatatacaggtctatgaaaatactgtggaataagcccaggaaggttagatgtgtttgcaaataagttgcccaaagggtccccctctaagtaaaacaaatattcagaccacaggctttaatgtaaactgtcaaaaagtgggatgtggaggatttttgttaagtgtcaatcgaagttaaaaagcaagggtttttggccaggcgtggtggctcacgcctgtaatcccagcactttgggaggccgaggccggcaaatcacctaaggtcaggagttcgagaccagcctggccaacatggtgaaaccccgtctctactaaaaatacaaaaaaattagcccggtgtggtggcaagtgcctgtagtcccagctacttgggaggctgaggcaggagaactgcttgaacccgggaggtagaggttgcagtgagccacgatcatgccactgcactccagcctgggcaacagagcaagactccatctcaaaaaagaaaaaaaaaaattaaaggttttggctgggtgcagtggctcatgccggtaatcccagcactttgggaggccaaggtgggaggatcacttgaggtcaggagtttcagactggcctgggcaacgtaaaaaattaaaaaaatagccaggcatggacatggtagtgcatacctgtggtcccagccactcaagaggctgagacaggatgattgcttgagcccaggaggatgaggctgcagtgagccatgatgacgctactgcactccagcctggatgacagggcaagaccctgtctcaatattttaagtcaagggtttgtagtaatgtattcagtgccacttcttgccatcactttgcaattattgaaatgggaatactgagctcagaaagcaaatatgatgctttcatgggagatggagccacatttgtgttctgggtgggatcactagtgcaggagaacattacattttcttctgaaggcaaaatgcttgtaggttttgcctctactttgtatttacttttaaaattgcacttgttcacctaccagtgtttacgaaatcctgtatttgggatgctttttctataataaaatattataatttgagaaaaaaaaaaaaaaaaaaaaaaaaaaaaaaaaaaaaaaaaaaaaaaaaaaanaaaaaaaaaaaaaaaaaaanaaaaagagaggggggggcggcgacgcaaagatatcatcctccgcaaggagagagcgaaccagagatcaggcgcgaccgccacacatatatgaaaggagaaaagagggcgcgccccacgtaggaggaggagtattcttatatatacaacgagagggggggggccggccgctaatataaaacaccacagcccagcgagggggaaaaaccgcggcacacagccgaggacactttggagaggagaagagcaaccccccacaacgggggggggagggcgaacaaagaagaggagagagaaacacccaccctcacccagcagatatattacagagatccagggggagaaaatacaacaacaatctcagagagagggtatgtagagggtggacacaccaaatgtcgatattattggtgcctagcagagaacgaaaaatttggcgacaagacgagttatcttttatcaaaaatatttttacggcggggctcccgctactctaaccggagatacacataaaaaaaaagaagagggaaaaagcaataacgagaggaaggagtaggaggaaaaagaagacaagaaaaaaaaaggagaggagggaaacagcaaaagcaaagagagaagaagaagaaaggaggcaaaaaagcagggagaagagaagagaggagaaaacaaaagagaaagaaacaaaaaaaaaaacaaaagacgacggacacaacagaaaaaaaaaaagcaaaagaaagagaacagaagcagaagaagacgaacaaacaaaacagaaaaaaagaggaacaaaaaaaaaacgaaacaaacaagagcgcaaacaacaag

SEQ ID NO: 357910 - DNA, 5952 bp, Homo sapiens
  misc_feature (5109)..(5109): n is a, c, g, or t
  misc_feature (5129)..(5129): n is a, c, g, or t
tccagggttcaagtgcttctcctgcctcagcctcccgagtagctgggattacaggcacccaccactatgcctaatttttctatttttagtagagacggggtttcaccatgttagtcaggctggtctccaactcccaacctcaactgatctgcctgcctcggcctcccaaagtgctgggttacaggtgtgagccaccacacccagccaaaacctttttagttttcaagagccattgtaatttccttttttgttaatagtgtttgtgccttttgcccattacaaaatcagattgttagttttttacttagtgatttgtgaaagctctatttgtggcagctctttctaattaaggaaattaaccttttatgagttgcaaatattttcttattcagtgtctttttagctttggtaaacggtttaggctatgcagagatgttgtatttctaaaatcatcagtttttcttttatggcttctaggtttaatgttgtacccagaaagtccccaccctgagactataaaaatttctcttacggtttatgtattatttaacatttaatctttgatccatctggattatttgggattaggagtcaagtatatccttcattagtttgattttgttagcttctctctttcctcttaggtctttactccatggctaaccctatattttttctttttcagttctttatagctccaagctctacagattcttcaaatatattgagaatagggatgttgcaaaaacagtgttaaaggaacggggcctaaaaaacattcgcattggaattgaaggttaccctacctgtaaagaaaaaattaagagaaggcctggcggccggtctgaagtcatctataattatgtacaacgccccttcatccagatgtcatgggaaaaggaagaagggaagagtcgccatgtggatttccagtgtgttcgaagcaaatccctcacgaatctggtagctgctggagatgatgtcttggaggaccaggagatattaatgcatcacccaccccaagtggatgaacttgaccggctaaatgccccactttctcagatggcttctaacgactttcaggattagggccagctgtgggtctactccttgttggagcccatctcacctgggatgcctgcagccagccctccctcgtgatttgtctcaccttgagtaggagacatgcttctcccctaaccttttcctttctgccataattaacatatgtccttttcagtaagtccatgcctctggcaggggatgaagaagtactcactggtaattagctaccatctttgcagcagccctggtaacttgaaaaatttgggtctggtgctgttcattgagtctttgtgtaactgcaaaagcaggaaaggaagtcaagactcctgttgcctcgtgcttagcaaagcagtccttatcctttatactctgttcttgggttttgtttttgtcttgttttataccaggcaaattgcttagtagcaaagggaccaaactgaaaaggtgacaatctctaacttctaaaagcagacaccaatcggatgctcattagaggttaatgaagatgccattcttggtggcctctgcacccaaattgcatctggaaagaactagggtctcattcagaatgtccaaaaggaaattcttaagagcttaaattcagatttgtgtctcattaatgcagtgaacaattcaaaaccacacagattccttggcaggaaggataatggaataacagtgttgatgagacctttttagcttcaaggtttcggagtctaaacaaatggatgattcatttggaatgaaactcacaatgcaagtagaaggacctctccaaatcaggccagttgggttatcctggcttggaatctggtgtgaaaccataggtcttaacactctggagcagcacattgctgtggatatgtccaggagaccttagatatggcttaaaggctttcaagatgaggacagaaattgcttacaattgctcagtttctcaacagaaagactcataagagtgccagcatggggtacatggagtgaagctgggtgggaagcatcatctgcacagtccctgtcctagtgcaggacttttctctgtatgttttcataccatgggatttttggatatcagtgtattttggttcttgaaatagcctaatagctgctcacacattgggtaggaatattataccaatgtcatccccaaaggaagggtgagctgaatggaaattaagcccagtcattttatttgatctattagctctgttatcagtgcatgatcacccagatcaccctcctcagcccacacagtgctgaaccatcttccctcctgttctccatggctattaatagtatagctaaatttagagtgcagagccagatataagtattttggaattatctcccagtttgtggtagaagctgactggaatacaggttgagtatctcttatccaaaatgctagggaccagaaaggtttcagattttttcagattttggaatacttaacagttgagcaccccaaatctgaaaggcttctgaacgtcatgtcagcactcaaaaaagtggattttggagcacttcaaatttcggatttttggatttgggatgctcatcctgtgtaggagaggctactcgattccatttaatgactgtcctagtcataatcatccaaagataaaagccaggtagatgttgaaagctctttccagggctgaaaaagtgttcttacgttctctgcatgtgactagcatcactgtggaaattaatgctctgttcttcactagaatgtagtaagtggttaaactgagctatcccccacctgatgactattggcatccatttgcaaggccaatggcctggattaagggttaggattatttgtagctagaaggtaattttatttctgtgaaactaattggctcatatttgaggttaggtgtggccttgaccttaccagtacatttatacccactaccagttgactagcccagataattgttaaatggtgcttcttttctgcttctcagtagacttccatgccattacaaaggaaatttgaattacctagtgtttgtatattccatgataactatgtataacttctgttacacagcttatgtattgttaacatttaagtgtaaaccatgccacagctaacacttaaaaatgaaaactaattagttcttgcttagggaaaatgccaggtatgaagtatggcatatacttgacactgtcctgtgtaaccctttactttgctcaggctttcaagattgagtcttttttcccccaaattaggttaacatgcatttgaccccaacctgtggggtttgagtaagctggaaatctgtgacggtaggctttctagtgtcacgaggtggtggtgactgaaggaaaagctgggatcacaggttccttctgatggagaggaaggtttatttctatgcccctcccaccaccctccacctagagctcacccaagcctgctccagtcccaggggcaggccattctgcaaaagcaggacctcacagaaacaagggctgggttgaggtcacccccttcagagttggttcctggccagatgggtaagaggcatttgtaattttaaaaatgtgaaacttgggtttggtgttttcttctaagtgcctaaataagcaagccaggctgttgatattttagccagagaaatcggcaagccaagattaacccgaatctgaagtttagaatcttgagtttgcatctgcatcatatcatgctgttttgatgaggaaacatttgccactgaggagttggagggagggcaagacgacagtgttaagtcagatcatttaatggtttcccctaagccctggaaaaatatttgaaagaatggcagcaaaaaggttaagaaagcaagccagatttactgcacaatatgcagtacccagtactactttaaatcccaagagaacagtgtgatgtctaatatatacaggtctatgaaaatactgtggaataagcccaggaaggttagatgtgtttgcaaataagttgcccaaagggtccccctctaagtaaaacaaatattcagaccacaggctttaatgtaaactgtcaaaaagtgggatgtggaggatttttgttaagtgtcaatcgaagttaaaaagcaagggtttttggccaggcgtggtggctcacgcctgtaatcccagcactttgggaggccgaggccggcaaatcacctaaggtcaggagttcgagaccagcctggccaacatggtgaaaccccgtctctactaaaaatacaaaaaaattagcccggtgtggtggcaagtgcctgtagtcccagctacttgggaggctgaggcaggagaactgcttgaacccgggaggtagaggttgcagtgagccacgatcatgccactgcactccagcctgggcaacagagcaagactccatctcaaaaaagaaaaaaaaaaattaaaggttttggctgggtgcagtggctcatgccggtaatcccagcactttgggaggccaaggtgggaggatcacttgaggtcaggagtttcagactggcctgggcaacgtaaaaaattaaaaaaatagccaggcatggacatggtagtgcatacctgtggtcccagccactcaagaggctgagacaggatgattgcttgagcccaggaggatgaggctgcagtgagccatgatgacgctactgcactccagcctggatgacagggcaagaccctgtctcaatattttaagtcaagggtttgtagtaatgtattcagtgccacttcttgccatcactttgcaattattgaaatgggaatactgagctcagaaagcaaatatgatgctttcatgggagatggagccacatttgtgttctgggtgggatcactagtgcaggagaacattacattttcttctgaaggcaaaatgcttgtaggttttgcctctactttgtatttacttttaaaattgcacttgttcacctaccagtgtttacgaaatcctgtatttgggatgctttttctataataaaatattataatttgagaaaaaaaaaaaaaaaaaaaaaaaaaaaaaaaaaaaaaaaaaaaaaaaaaaanaaaaaaaaaaaaaaaaaaanaaaaagagaggggggggcggcgacgcaaagatatcatcctccgcaaggagagagcgaaccagagatcaggcgcgaccgccacacatatatgaaaggagaaaagagggcgcgccccacgtaggaggaggagtattcttatatatacaacgagagggggggggccggccgctaatataaaacaccacagcccagcgagggggaaaaaccgcggcacacagccgaggacactttggagaggagaagagcaaccccccacaacgggggggggagggcgaacaaagaagaggagagagaaacacccaccctcacccagcagatatattacagagatccagggggagaaaatacaacaacaatctcagagagagggtatgtagagggtggacacaccaaatgtcgatattattggtgcctagcagagaacgaaaaatttggcgacaagacgagttatcttttatcaaaaatatttttacggcggggctcccgctactctaaccggagatacacataaaaaaaaagaagagggaaaaagcaataacgagaggaaggagtaggaggaaaaagaagacaagaaaaaaaaaggagaggagggaaacagcaaaagcaaagagagaagaagaagaaaggaggcaaaaaagcagggagaagagaagagaggagaaaacaaaagagaaagaaacaaaaaaaaaaacaaaagacgacggacacaacagaaaaaaaaaaagcaaaagaaagagaacagaagcagaagaagacgaacaaacaaaacagaaaaaaagaggaacaaaaaaaaaacgaaacaaacaagagcgcaaacaacaag

SEQ ID NO: 357911 - DNA, 2899 bp, Homo sapiens
  misc_feature (2056)..(2056): n is a, c, g, or t
  misc_feature (2076)..(2076): n is a, c, g, or t
ccaggctcaagtgagcctctcacctcagcctcacgagttgctgggaccacagacctctcacttgactatgcctctcagccagcaaatcttcagttccctcacataatgccccttgctgaagacatcaaaggttcttgcttccaaagtgggaataaacggaaccatgaaccttttattgctccagaaagatttggaaacagtagtgtgggctttggcagtaattcccattcccaagcaccagagaaagtgacgcttcttgtagatggcacacgttttgttgtgaatccacagattttcactgctcatccggataccatgctgggaaggatgtttggaccaggaagagagtacaacttcactcggcccaatgagaagggagagtatgagattgctgaaggcatcagtgcaactgtatttcgcacagtgctggattattacaaaaccggtatcatcaattgtcctgatggcatctctatcccagatcttagagatacttgtgattatctctgcattaattttgacttcaacactatccgatgtcaagatctgagtgctttactccatgaactgtctaatgacggtgctcataagcagtttgatcactacctcgaagagctcatcttgcccatcatggtgggctgtgccaagaaaggagaacgagagtgccacattgttgtgctgacggatgaggattctgtggactgggatgaagaccaccctccaccaatgggggaggaatattcccaaattctttatagctccaagctctacagattcttcaaatatattgagaatagggatgttgcaaaaacagtgttaaaggaacggggcctaaaaaacattcgcattggaattgaaggttaccctacctgtaaagaaaaaattaagagaaggcctggcggccggtctgaagtcatctataattatgtacaacgccccttcatccagatgtcatgggaaaaggaagaagggaagagtcgccatgtggatttccagtgtgttcgaagcaaatccctcacgaatctggtagctgctggagatgatgtcttggaggaccaggagatattaatgcatcacccaccccaagtggatgaacttgaccggctaaatgccccactttctcagatggcttctaacgactttcaggattagggccagctgtgggtctactccttgttggagcccatctcacctgggatgcctgcagccagccctccctcgtgatttgtctcaccttgagtaggagacatgcttctcccctaaccttttcctttctgccataattaacatatgtccttttcagtaagtccatgcctctggcaggggatgaagaagtactcactggtaattagctaccatctttgcagcagccctggtaacttgaaaaatttgggtctggtgctgttcattgagtctttgtgtaactgcaaaagcaggaaaggaagtcaagactcctgttgcctcgtgcttagcaaagcagtccttatcctttatactctgttcttgggttttgtttttgtcttgttttataccaggcaaattgcttagtagcaaagggaccaaactgaaaaggtgacaatctctaacttctaaaagcagacaccaatcggatgctcattagaggttaatgaagatgccattcttggtggcctctgcacccaaattgcatctggaaagaactagggtctcattcagaatgtccaaaaggaaattcttaagagcttaaattcagtgccacttcttgccatcactttgcaattattgaaatgggaatactgagctcagaaagcaaatatgatgctttcatgggagatggagccacatttgtgttctgggtgggatcactagtgcaggagaacattacattttcttctgaaggcaaaatgcttgtaggttttgcctctactttgtatttacttttaaaattgcacttgttcacctaccagtgtttacgaaatcctgtatttgggatgctttttctataataaaatattataatttgagaaaaaaaaaaaaaaaaaaaaaaaaaaaaaaaaaaaaaaaaaaaaaaaaaaanaaaaaaaaaaaaaaaaaaanaaaaagagaggggggggcggcgacgcaaagatatcatcctccgcaaggagagagcgaaccagagatcaggcgcgaccgccacacatatatgaaaggagaaaagagggcgcgccccacgtaggaggaggagtattcttatatatacaacgagagggggggggccggccgctaatataaaacaccacagcccagcgagggggaaaaaccgcggcacacagccgaggacactttggagaggagaagagcaaccccccacaacgggggggggagggcgaacaaagaagaggagagagaaacacccaccctcacccagcagatatattacagagatccagggggagaaaatacaacaacaatctcagagagagggtatgtagagggtggacacaccaaatgtcgatattattggtgcctagcagagaacgaaaaatttggcgacaagacgagttatcttttatcaaaaatatttttacggcggggctcccgctactctaaccggagatacacataaaaaaaaagaagagggaaaaagcaataacgagaggaaggagtaggaggaaaaagaagacaagaaaaaaaaaggagaggagggaaacagcaaaagcaaagagagaagaagaagaaaggaggcaaaaaagcagggagaagagaagagaggagaaaacaaaagagaaagaaacaaaaaaaaaaacaaaagacgacggacacaacagaaaaaaaaaaagcaaaagaaagagaacagaagcagaagaagacgaacaaacaaaacagaaaaaaagaggaacaaaaaaaaaacgaaacaaacaagagcgcaaacaacaag

SEQ ID NO: 357912 - DNA, 5821 bp, Homo sapiens
  misc_feature (5172)..(5172): n is a, c, g, or t
  misc_feature (5192)..(5192): n is a, c, g, or t
  misc_feature (5212)..(5212): n is a, c, g, or t
ccaggctcaagtgagcctctcacctcagcctcacgagttgctgggaccacagacctctcacttgactatgcctctcagccagcaaatcttcagttccctcacataatgccccttgctgaagacatcaaaggttcttgcttccaaagtgggaataaacggaaccatgaaccttttattgctccagaaagatttggaaacagtagtgtgggctttggcagtaattcccattcccaagcaccagagaaagtgacgcttcttgtagatggcacacgttttgttgtgaatccacagattttcactgctcatccggataccatgctgggaaggatgtttggaccaggaagagagtacaacttcactcggcccaatgagaagggagagtatgagattgctgaaggcatcagtgcaactgtatttcgcacagtgctggattattacaaaaccggtatcatcaattgtcctgatggcatctctatcccagatcttagagatacttgtgattatctctgcattaattttgacttcaacactatccgatgtcaagatctgagtgctttactccatgaactgtctaatgacggtgctcataagcagtttgatcactacctcgaagagctcatcttgcccatcatggtgggctgtgccaagaaaggagaacgagagtgccacattgttgtgctgacggatgaggattctgtggactgggatgaagaccaccctccaccaatgggggaggaatattcccaaattctttatagctccaagctctacagattcttcaaatatattgagaatagggatgttgcaaaaacagtgttaaaggaacggggcctaaaaaacattcgcattggaattgaaggttaccctacctgtaaagaaaaaattaagagaaggcctggcggccggtctgaagtcatctataattatgtacaacgccccttcatccagatgtcatgggaaaaggaagaagggaagagtcgccatgtggatttccagtgtgttcgaagcaaatccctcacgaatctggtagctgctggagatgatgtcttggaggaccaggagatattaatgcatcacccaccccaagtggatgaacttgaccggctaaatgccccactttctcagatggcttctaacgactttcaggattagggccagctgtgggtctactccttgttggagcccatctcacctgggatgcctgcagccagccctccctcgtgatttgtctcaccttgagtaggagacatgcttctcccctaaccttttcctttctgccataattaacatatgtccttttcagtaagtccatgcctctggcaggggatgaagaagtactcactggtaattagctaccatctttgcagcagccctggtaacttgaaaaatttgggtctggtgctgttcattgagtctttgtgtaactgcaaaagcaggaaaggaagtcaagactcctgttgcctcgtgcttagcaaagcagtccttatcctttatactctgttcttgggttttgtttttgtcttgttttataccaggcaaattgcttagtagcaaagggaccaaactgaaaaggtgacaatctctaacttctaaaagcagacaccaatcggatgctcattagaggttaatgaagatgccattcttggtggcctctgcacccaaattgcatctggaaagaactagggtctcattcagaatgtccaaaaggaaattcttaagagcttaaattcagatttgtgtctcattaatgcagtgaacaattcaaaaccacacagattccttggcaggaaggataatggaataacagtgttgatgagacctttttagcttcaaggtttcggagtctaaacaaatggatgattcatttggaatgaaactcacaatgcaagtagaaggacctctccaaatcaggccagttgggttatcctggcttggaatctggtgtgaaaccataggtcttaacactctggagcagcacattgctgtggatatgtccaggagaccttagatatggcttaaaggctttcaagatgaggacagaaattgcttacaattgctcagtttctcaacagaaagactcataagagtgccagcatggggtacatggagtgaagctgggtgggaagcatcatctgcacagtccctgtcctagtgcaggacttttctctgtatgttttcataccatgggatttttggatatcagtgtattttggttcttgaaatagcctaatagctgctcacacattgggtaggaatattataccaatgtcatccccaaaggaagggtgagctgaatggaaattaagcccagtcattttatttgatctattagctctgttatcagtgcatgatcacccagatcaccctcctcagcccacacagtgctgaaccatcttccctcctgttctccatggctattaatagtatagctaaatttagagtgcagagccagatataagtattttggaattatctcccagtttgtggtagaagctgactggaatacaggttgagtatctcttatccaaaatgctagggaccagaaaggtttcagattttttcagattttggaatacttaacagttgagcaccccaaatctgaaaggcttctgaacgtcatgtcagcactcaaaaaagtggattttggagcacttcaaatttcggatttttggatttgggatgctcatcctgtgtaggagaggctactcgattccatttaatgactgtcctagtcataatcatccaaagataaaagccaggtagatgttgaaagctctttccagggctgaaaaagtgttcttacgttctctgcatgtgactagcatcactgtggaaattaatgctctgttcttcactagaatgtagtaagtggttaaactgagctatcccccacctgatgactattggcatccatttgcaaggccaatggcctggattaagggttaggattatttgtagctagaaggtaattttatttctgtgaaactaattggctcatatttgaggttaggtgtggccttgaccttaccagtacatttatacccactaccagttgactagcccagataattgttaaatggtgcttcttttctgcttctcagtagacttccatgccattacaaaggaaatttgaattacctagtgtttgtatattccatgataactatgtataacttctgttacacagcttatgtattgttaacatttaagtgtaaaccatgccacagctaacacttaaaaatgaaaactaattagttcttgcttagggaaaatgccaggtatgaagtatggcatatacttgacactgtcctgtgtaaccctttactttgctcaggctttcaagattgagtcttttttcccccaaattaggttaacatgcatttgaccccaacctgtggggtttgagtaagctggaaatctgtgacggtaggctttctagtgtcacgaggtggtggtgactgaaggaaaagctgggatcacaggttccttctgatggagaggaaggtttatttctatgcccctcccaccaccctccacctagagctcacccaagcctgctccagtcccaggggcaggccattctgcaaaagcaggacctcacagaaacaagggctgggttgaggtcacccccttcagagttggttcctggccagatgggtaagaggcatttgtaattttaaaaatgtgaaacttgggtttggtgttttcttctaagtgcctaaataagcaagccaggctgttgatattttagccagagaaatcggcaagccaagattaacccgaatctgaagtttagaatcttgagtttgcatctgcatcatatcatgctgttttgatgaggaaacatttgccactgaggagttggagggagggcaagacgacagtgttaagtcagatcatttaatggtttcccctaagccctggaaaaatatttgaaagaatggcagcaaaaaggttaagaaagcaagccagatttactgcacaatatgcagtacccagtactactttaaatcccaagagaacagtgtgatgtctaatatatacaggtctatgaaaatactgtggaataagcccaggaaggttagatgtgtttgcaaataagttgcccaaagggtccccctctaagtaaaacaaatattcagaccacaggctttaatgtaaactgtcaaaaagtgggatgtggaggatttttgttaagtgtcaatcgaagttaaaaagcaagggtttttggccaggcgtggtggctcacgcctgtaatcccagcactttgggaggccgaggccggcaaatcacctaaggtcaggagttcgagaccagcctggccaacatggtgaaaccccgtctctactaaaaatacaaaaaaattagcccggtgtggtggcaagtgcctgtagtcccagctacttgggaggctgaggcaggagaactgcttgaacccgggaggtagaggttgcagtgagccacgatcatgccactgcactccagcctgggcaacagagcaagactccatctcaaaaaagaaaaaaaaaaattaaaggttttggctgggtgcagtggctcatgccggtaatcccagcactttgggaggccaaggtgggaggatcacttgaggtcaggagtttcagactggcctgggcaacgtaaaaaattaaaaaaatagccaggcatggacatggtagtgcatacctgtggtcccagccactcaagaggctgagacaggatgattgcttgagcccaggaggatgaggctgcagtgagccatgatgacgctactgcactccagcctggatgacagggcaagaccctgtctcaatattttaagtcaagggtttgtagtaatgtattcagtgccacttcttgccatcactttgcaattattgaaatgggaatactgagctcagaaagcaaatatgatgctttcatgggagatggagccacatttgtgttctgggtgggatcactagtgcaggagaacattacattttcttctgaaggcaaaatgcttgtaggttttgcctctactttgtatttacttttaaaattgcacttgttcacctaccagtgtttacgaaatcctgtatttgggatgctttttctataataaaatattataatttgagaaaaaaaaaaaaaaaaaaaaaaaaaaaaaaaaaaaaaaaaaaaaaaaaaaanaaaaaaaaaaaaaaaaaaanaaaaaaaaaaaaaaaaaaanaaaaaaaaaaaaaaaaaaaaacaaaacgacaggcgggggcggcggccccccctccccccccgcggcccccgcagaaccacgcatgagggaggaggaacaaagacacgcgcacaaccagaggatagtggaccacttaacaaccacagaagggacgaggcgaagaacaaacacacccgtgacagaggggcccaacacacgagtcgtggcgcggttgacagagggaagacaacacctaccccggcagggccgaataggaagcagcacaaccacacaacgaccatgacacgacagcgaggccagcaaacaacaaaccaaacaacagaacgcgaacgaatggatggtaagcaacgcagacggttacctactcaagcacacacaggaacgcacgaactgacctctagtcgatgatcagatagacttgatcatacaatatacgccgagggtaggcggatcgaacaaccagcgcacagcaccaacacgtcccgccccccgccgtcgcccacatacgcagacaccacacgaacccgcccgaccccccgaacccacgctcgtccgtctcccacaacgccaccacaccaccaccaagcggcgcccacccacaccacccgc

SEQ ID NO: 357913 - DNA, 5694 bp, Homo sapiens
  misc_feature (4851)..(4851): n is a, c, g, or t
  misc_feature (4871)..(4871): n is a, c, g, or t
gaatgctcaaggattattaaacaaagtaacttgaagagtggtagaataggagacataccttaacaaagcttaattatcaccctggagcaggaaacaatctctttgcctttaaatgtgccacttctctgaacctcatcaatgataacagccattccctcatagtctttttcactccagtaatatgtgcatttaggcagaaagcatgttcacctacattttctctctgcaggtgctttactccatgaactgtctaatgacggtgctcataagcagtttgatcactacctcgaagagctcatcttgcccatcatggtgggctgtgccaagaaaggagaacgagagtgccacattgttgtgctgacggatgaggattctgtggactgggatgaagaccaccctccaccaatgggggaggaatattcccaaattctttatagctccaagctctacagattcttcaaatatattgagaatagggatgttgcaaaaacagtgttaaaggaacggggcctaaaaaacattcgcattggaattgaaggttaccctacctgtaaagaaaaaattaagagaaggcctggcggccggtctgaagtcatctataattatgtacaacgccccttcatccagatgtcatgggaaaaggaagaagggaagagtcgccatgtggatttccagtgtgttcgaagcaaatccctcacgaatctggtagctgctggagatgatgtcttggaggaccaggagatattaatgcatcacccaccccaagtggatgaacttgaccggctaaatgccccactttctcagatggcttctaacgactttcaggattagggccagctgtgggtctactccttgttggagcccatctcacctgggatgcctgcagccagccctccctcgtgatttgtctcaccttgagtaggagacatgcttctcccctaaccttttcctttctgccataattaacatatgtccttttcagtaagtccatgcctctggcaggggatgaagaagtactcactggtaattagctaccatctttgcagcagccctggtaacttgaaaaatttgggtctggtgctgttcattgagtctttgtgtaactgcaaaagcaggaaaggaagtcaagactcctgttgcctcgtgcttagcaaagcagtccttatcctttatactctgttcttgggttttgtttttgtcttgttttataccaggcaaattgcttagtagcaaagggaccaaactgaaaaggtgacaatctctaacttctaaaagcagacaccaatcggatgctcattagaggttaatgaagatgccattcttggtggcctctgcacccaaattgcatctggaaagaactagggtctcattcagaatgtccaaaaggaaattcttaagagcttaaattcagatttgtgtctcattaatgcagtgaacaattcaaaaccacacagattccttggcaggaaggataatggaataacagtgttgatgagacctttttagcttcaaggtttcggagtctaaacaaatggatgattcatttggaatgaaactcacaatgcaagtagaaggacctctccaaatcaggccagttgggttatcctggcttggaatctggtgtgaaaccataggtcttaacactctggagcagcacattgctgtggatatgtccaggagaccttagatatggcttaaaggctttcaagatgaggacagaaattgcttacaattgctcagtttctcaacagaaagactcataagagtgccagcatggggtacatggagtgaagctgggtgggaagcatcatctgcacagtccctgtcctagtgcaggacttttctctgtatgttttcataccatgggatttttggatatcagtgtattttggttcttgaaatagcctaatagctgctcacacattgggtaggaatattataccaatgtcatccccaaaggaagggtgagctgaatggaaattaagcccagtcattttatttgatctattagctctgttatcagtgcatgatcacccagatcaccctcctcagcccacacagtgctgaaccatcttccctcctgttctccatggctattaatagtatagctaaatttagagtgcagagccagatataagtattttggaattatctcccagtttgtggtagaagctgactggaatacaggttgagtatctcttatccaaaatgctagggaccagaaaggtttcagattttttcagattttggaatacttaacagttgagcaccccaaatctgaaaggcttctgaacgtcatgtcagcactcaaaaaagtggattttggagcacttcaaatttcggatttttggatttgggatgctcatcctgtgtaggagaggctactcgattccatttaatgactgtcctagtcataatcatccaaagataaaagccaggtagatgttgaaagctctttccagggctgaaaaagtgttcttacgttctctgcatgtgactagcatcactgtggaaattaatgctctgttcttcactagaatgtagtaagtggttaaactgagctatcccccacctgatgactattggcatccatttgcaaggccaatggcctggattaagggttaggattatttgtagctagaaggtaattttatttctgtgaaactaattggctcatatttgaggttaggtgtggccttgaccttaccagtacatttatacccactaccagttgactagcccagataattgttaaatggtgcttcttttctgcttctcagtagacttccatgccattacaaaggaaatttgaattacctagtgtttgtatattccatgataactatgtataacttctgttacacagcttatgtattgttaacatttaagtgtaaaccatgccacagctaacacttaaaaatgaaaactaattagttcttgcttagggaaaatgccaggtatgaagtatggcatatacttgacactgtcctgtgtaaccctttactttgctcaggctttcaagattgagtcttttttcccccaaattaggttaacatgcatttgaccccaacctgtggggtttgagtaagctggaaatctgtgacggtaggctttctagtgtcacgaggtggtggtgactgaaggaaaagctgggatcacaggttccttctgatggagaggaaggtttatttctatgcccctcccaccaccctccacctagagctcacccaagcctgctccagtcccaggggcaggccattctgcaaaagcaggacctcacagaaacaagggctgggttgaggtcacccccttcagagttggttcctggccagatgggtaagaggcatttgtaattttaaaaatgtgaaacttgggtttggtgttttcttctaagtgcctaaataagcaagccaggctgttgatattttagccagagaaatcggcaagccaagattaacccgaatctgaagtttagaatcttgagtttgcatctgcatcatatcatgctgttttgatgaggaaacatttgccactgaggagttggagggagggcaagacgacagtgttaagtcagatcatttaatggtttcccctaagccctggaaaaatatttgaaagaatggcagcaaaaaggttaagaaagcaagccagatttactgcacaatatgcagtacccagtactactttaaatcccaagagaacagtgtgatgtctaatatatacaggtctatgaaaatactgtggaataagcccaggaaggttagatgtgtttgcaaataagttgcccaaagggtccccctctaagtaaaacaaatattcagaccacaggctttaatgtaaactgtcaaaaagtgggatgtggaggatttttgttaagtgtcaatcgaagttaaaaagcaagggtttttggccaggcgtggtggctcacgcctgtaatcccagcactttgggaggccgaggccggcaaatcacctaaggtcaggagttcgagaccagcctggccaacatggtgaaaccccgtctctactaaaaatacaaaaaaattagcccggtgtggtggcaagtgcctgtagtcccagctacttgggaggctgaggcaggagaactgcttgaacccgggaggtagaggttgcagtgagccacgatcatgccactgcactccagcctgggcaacagagcaagactccatctcaaaaaagaaaaaaaaaaattaaaggttttggctgggtgcagtggctcatgccggtaatcccagcactttgggaggccaaggtgggaggatcacttgaggtcaggagtttcagactggcctgggcaacgtaaaaaattaaaaaaatagccaggcatggacatggtagtgcatacctgtggtcccagccactcaagaggctgagacaggatgattgcttgagcccaggaggatgaggctgcagtgagccatgatgacgctactgcactccagcctggatgacagggcaagaccctgtctcaatattttaagtcaagggtttgtagtaatgtattcagtgccacttcttgccatcactttgcaattattgaaatgggaatactgagctcagaaagcaaatatgatgctttcatgggagatggagccacatttgtgttctgggtgggatcactagtgcaggagaacattacattttcttctgaaggcaaaatgcttgtaggttttgcctctactttgtatttacttttaaaattgcacttgttcacctaccagtgtttacgaaatcctgtatttgggatgctttttctataataaaatattataatttgagaaaaaaaaaaaaaaaaaaaaaaaaaaaaaaaaaaaaaaaaaaaaaaaaaaanaaaaaaaaaaaaaaaaaaanaaaaagagaggggggggcggcgacgcaaagatatcatcctccgcaaggagagagcgaaccagagatcaggcgcgaccgccacacatatatgaaaggagaaaagagggcgcgccccacgtaggaggaggagtattcttatatatacaacgagagggggggggccggccgctaatataaaacaccacagcccagcgagggggaaaaaccgcggcacacagccgaggacactttggagaggagaagagcaaccccccacaacgggggggggagggcgaacaaagaagaggagagagaaacacccaccctcacccagcagatatattacagagatccagggggagaaaatacaacaacaatctcagagagagggtatgtagagggtggacacaccaaatgtcgatattattggtgcctagcagagaacgaaaaatttggcgacaagacgagttatcttttatcaaaaatatttttacggcggggctcccgctactctaaccggagatacacataaaaaaaaagaagagggaaaaagcaataacgagaggaaggagtaggaggaaaaagaagacaagaaaaaaaaaggagaggagggaaacagcaaaagcaaagagagaagaagaagaaaggaggcaaaaaagcagggagaagagaagagaggagaaaacaaaagagaaagaaacaaaaaaaaaaacaaaagacgacggacacaacagaaaaaaaaaaagcaaaagaaagagaacagaagcagaagaagacgaacaaacaaaacagaaaaaaagaggaacaaaaaaaaaacgaaacaaacaagagcgcaaacaacaag

SEQ ID NO: 357914 - DNA, 5962 bp, Homo sapiens
  misc_feature (5119)..(5119): n is a, c, g, or t
  misc_feature (5139)..(5139): n is a, c, g, or t
ccaggctcaagtgagcctctcacctcagcctcacgagttgctgggaccacagacctctcacttgactatgcctctcagccagcaaatcttcagttccctcacataatgccccttgctgaagacatcaaaggttcttgcttccaaagtgggaataaacggaaccatgaaccttttattgctccagaaagatttggaaacagtagtgtgggctttggcagtaattcccattcccaagcaccagagaaagtgacgcttcttgtagatggcacacgttttgttgtgaatccacagattttcactgctcatccggataccatgctgggaaggatgtttggaccaggaagagagtacaacttcactcggcccaatgagaagggagagtatgagattgctgaaggcatcagtgcaactgtatttcgcacagtgctggattattacaaaaccggtatcatcaattgtcctgatggcatctctatcccagatcttagagatacttgtgattatctctgcattaattttgacttcaacactatccgatgtcaagatctgagtgctttactccatgaactgtctaatgacggtgctcataagcagtttgatcactacctcgaagagctcatcttgcccatcatggtgggctgtgccaagaaaggagaacgagagtgccacattgttgtgctgacggatgaggattctgtggactgggatgaagaccaccctccaccaatgggggaggaatattcccaaattctttatagctccaagctctacagattcttcaaatatattgagaatagggatgttgcaaaaacagtgttaaaggaacggggcctaaaaaacattcgcattggaattgaaggttaccctacctgtaaagaaaaaattaagagaaggcctggcggccggtctgaagtcatctataattatgtacaacgccccttcatccagatgtcatgggaaaaggaagaagggaagagtcgccatgtggatttccagtgtgttcgaagcaaatccctcacgaatctggtagctgctggagatgatgtcttggaggaccaggagatattaatgcatcacccaccccaagtggatgaacttgaccggctaaatgccccactttctcagatggcttctaacgactttcaggattagggccagctgtgggtctactccttgttggagcccatctcacctgggatgcctgcagccagccctccctcgtgatttgtctcaccttgagtaggagacatgcttctcccctaaccttttcctttctgccataattaacatatgtccttttcagtaagtccatgcctctggcaggggatgaagaagtactcactggtaattagctaccatctttgcagcagccctggtaacttgaaaaatttgggtctggtgctgttcattgagtctttgtgtaactgcaaaagcaggaaaggaagtcaagactcctgttgcctcgtgcttagcaaagcagtccttatcctttatactctgttcttgggttttgtttttgtcttgttttataccaggcaaattgcttagtagcaaagggaccaaactgaaaaggtgacaatctctaacttctaaaagcagacaccaatcggatgctcattagaggttaatgaagatgccattcttggtggcctctgcacccaaattgcatctggaaagaactagggtctcattcagaatgtccaaaaggaaattcttaagagcttaaattcagatttgtgtctcattaatgcagtgaacaattcaaaaccacacagattccttggcaggaaggataatggaataacagtgttgatgagacctttttagcttcaaggtttcggagtctaaacaaatggatgattcatttggaatgaaactcacaatgcaagtagaaggacctctccaaatcaggccagttgggttatcctggcttggaatctggtgtgaaaccataggtcttaacactctggagcagcacattgctgtggatatgtccaggagaccttagatatggcttaaaggctttcaagatgaggacagaaattgcttacaattgctcagtttctcaacagaaagactcataagagtgccagcatggggtacatggagtgaagctgggtgggaagcatcatctgcacagtccctgtcctagtgcaggacttttctctgtatgttttcataccatgggatttttggatatcagtgtattttggttcttgaaatagcctaatagctgctcacacattgggtaggaatattataccaatgtcatccccaaaggaagggtgagctgaatggaaattaagcccagtcattttatttgatctattagctctgttatcagtgcatgatcacccagatcaccctcctcagcccacacagtgctgaaccatcttccctcctgttctccatggctattaatagtatagctaaatttagagtgcagagccagatataagtattttggaattatctcccagtttgtggtagaagctgactggaatacaggttgagtatctcttatccaaaatgctagggaccagaaaggtttcagattttttcagattttggaatacttaacagttgagcaccccaaatctgaaaggcttctgaacgtcatgtcagcactcaaaaaagtggattttggagcacttcaaatttcggatttttggatttgggatgctcatcctgtgtaggagaggctactcgattccatttaatgactgtcctagtcataatcatccaaagataaaagccaggtagatgttgaaagctctttccagggctgaatctgttcttcactagaatgtagtaagtggttaaactgagctatcccccacctgatgactattggcatccatttgcaaggccaatggcctggattaagggttaggattatttgtagctagaaggtaattttatttctgtgaaactaattggctcatatttgaggttaggtgtggccttgaccttaccagtacatttatacccactaccagttgactagcccagataattgttaaatggtgcttcttttctgcttctcagtagacttccatgccattacaaaggaaatttgaattacctagtgtttgtatattccatgataactatgtataacttctgttacacagcttatgtattgttaacatttaagtgtaaaccatgccacagctaacacttaaaaatgaaaactaattagttcttgcttagggaaaatgccaggtatgaagtatggcatatacttgacactgtcctgtgtaaccctttactttgctcaggctttcaagattgagtcttttttcccccaaattaggttaacatgcatttgaccccaacctgtggggtttgagtaagctggaaatctgtgacggtaggctttctagtgtcacgaggtggtggtgactgaaggaaaagctgggatcacaggttccttctgatggagaggaaggtttatttctatgcccctcccaccaccctccacctagagctcacccaagcctgctccagtcccaggggcaggccattctgcaaaagcaggacctcacagaaacaagggctgggttgaggtcacccccttcagagttggttcctggccagatgggtaagaggcatttgtaattttaaaaatgtgaaacttgggtttggtgttttcttctaagtgcctaaataagcaagccaggctgttgatattttagccagagaaatcggcaagccaagattaacccgaatctgaagtttagaatcttgagtttgcatctgcatcatatcatgctgttttgatgaggaaacatttgccactgaggagttggagggagggcaagacgacagtgttaagtcagatcatttaatggtttcccctaagccctggaaaaatatttgaaagaatggcagcaaaaaggttaagaaagcaagccagatttactgcacaatatgcagtacccagtactactttaaatcccaagagaacagtgtgatgtctaatatatacaggtctatgaaaatactgtggaataagcccaggaaggttagatgtgtttgcaaataagttgcccaaagggtccccctctaagtaaaacaaatattcagaccacaggctttaatgtaaactgtcaaaaagtgggatgtggaggatttttgttaagtgtcaatcgaagttaaaaagcaagggtttttggccaggcgtggtggctcacgcctgtaatcccagcactttgggaggccgaggccggcaaatcacctaaggtcaggagttcgagaccagcctggccaacatggtgaaaccccgtctctactaaaaatacaaaaaaattagcccggtgtggtggcaagtgcctgtagtcccagctacttgggaggctgaggcaggagaactgcttgaacccgggaggtagaggttgcagtgagccacgatcatgccactgcactccagcctgggcaacagagcaagactccatctcaaaaaagaaaaaaaaaaattaaaggttttggctgggtgcagtggctcatgccggtaatcccagcactttgggaggccaaggtgggaggatcacttgaggtcaggagtttcagactggcctgggcaacgtaaaaaattaaaaaaatagccaggcatggacatggtagtgcatacctgtggtcccagccactcaagaggctgagacaggatgattgcttgagcccaggaggatgaggctgcagtgagccatgatgacgctactgcactccagcctggatgacagggcaagaccctgtctcaatattttaagtcaagggtttgtagtaatgtattcagtgccacttcttgccatcactttgcaattattgaaatgggaatactgagctcagaaagcaaatatgatgctttcatgggagatggagccacatttgtgttctgggtgggatcactagtgcaggagaacattacattttcttctgaaggcaaaatgcttgtaggttttgcctctactttgtatttacttttaaaattgcacttgttcacctaccagtgtttacgaaatcctgtatttgggatgctttttctataataaaatattataatttgagaaaaaaaaaaaaaaaaaaaaaaaaaaaaaaaaaaaaaaaaaaaaaaaaaaanaaaaaaaaaaaaaaaaaaanaaaaagagaggggggggcggcgacgcaaagatatcatcctccgcaaggagagagcgaaccagagatcaggcgcgaccgccacacatatatgaaaggagaaaagagggcgcgccccacgtaggaggaggagtattcttatatatacaacgagagggggggggccggccgctaatataaaacaccacagcccagcgagggggaaaaaccgcggcacacagccgaggacactttggagaggagaagagcaaccccccacaacgggggggggagggcgaacaaagaagaggagagagaaacacccaccctcacccagcagatatattacagagatccagggggagaaaatacaacaacaatctcagagagagggtatgtagagggtggacacaccaaatgtcgatattattggtgcctagcagagaacgaaaaatttggcgacaagacgagttatcttttatcaaaaatatttttacggcggggctcccgctactctaaccggagatacacataaaaaaaaagaagagggaaaaagcaataacgagaggaaggagtaggaggaaaaagaagacaagaaaaaaaaaggagaggagggaaacagcaaaagcaaagagagaagaagaagaaaggaggcaaaaaagcagggagaagagaagagaggagaaaacaaaagagaaagaaacaaaaaaaaaaacaaaagacgacggacacaacagaaaaaaaaaaagcaaaagaaagagaacagaagcagaagaagacgaacaaacaaaacagaaaaaaagaggaacaaaaaaaaaacgaaacaaacaagagcgcaaacaacaag

SEQ ID NO: 357915 - DNA, 807 bp, Homo sapiens
gcggcacagccggtcccggctgcggcttctggctgcgcggcctgcgcgcgcctcccgggcggattccagccccgagcgggacagcgcggcggggagcgacgagatttctctctgatcaaacggacagttcaggactcagaatctaaggatgaatgttcaccgtggcagtgacagtgacaggttattgcggcaggaggccagctgcttagtggatgatactttagctgtagcccaagaaaaagaagcaaacagcctggcttcatctggtcctcataatcttacttatcctctaggtcccaggaatgaagacctctcacttgactatgcctctcagccagcaaatcttcagttccctcacataatgccccttgctgaagacatcaaaggttcttgcttccaaagtgggaataaacggaaccatgaaccttttattgctccagaaagatttggaaacagtagtgtgggctttggcagtaattcccattcccaagcaccagagaaagtgacgcttcttgtagatggcacacgttttgttgtgaatccacagattttcactgctcatccggataccatgctgggaaggatgtttggaccaggaagagagtacaacttcactcggcccaatgagaagggagagtatgagattgctgaaggcatcagtgcaactgtatttcgcacagtgctggtgtgtggtagccttttttgttacattctcttcctcaggggcatgtgtgatcaatagccttgagagttccatcaactatgttattgactttagggtctctggtttccagttgtttcctttct

SEQ ID NO: 357916 - DNA, 1674 bp, Homo sapiens
ggaggcggggctggcggcaggaagctgccctgagcggcgctctgagcggcctgagcccggcggagccctgcagaacccggccgacctccatgggctgcggggggctgcacccggacccctggggcgcggcgcgcccctgaatgcaccgtgggacgcaggagggtgccatggcctcccggctcctgcaccggctgcggcacgccttggccggcgacggccccggggaggcggcggccagtccagaggccgagcagtttccggagagctcagagctggaggacgacgacgccgagggcctgtcctcccgactcagcggcaccctcagcttcaccagcgccgaggacgacgaggacgacgaggacgaggacgacgaggaggctggccctgaccagctgcccctcggggatgggacgtcaggagaagacgcagaacggagccccccacctgatgggcagtggggcagtcagctcctggcgcggcagctgcaggatttctggaagaagtcccggaacaccttggcaccccagcggctgctcttcgaagtgaccagcgctaacgttgtcaaggacccgccctccaagtacgtgtgctctacaccctcaccgtgatcggcccaggaccgccagattgccagccagcccagatctctcgccgttactcggactttgagcggctgcaccgaaacctgcagcggcaattccggggcccaatggctgccatctccttcccccgtaagcggctgcgccggaattttactgcagagaccattgcccgccgtagccgggcctttgagcagtttttgggtcacctgcaggcagtgcctgagctgcgccatgccccggacctgcaggacttcttcgtgctgccggagctgcggcgggcacagagcctcacctgtactggcctctatcgtgaggctctggcactctgggccaatgcctggcagctgcaagcccagctgggcaccccctctggcccagaccgccccctgctgaccctggctgggctggccgtgtgccaccaggagctggaagaccctggagaggcccgggcatgctgtgagaaggccctgcagctgcttggggacaagagcctccaccctttgctggcaccctttctggaggcccatgtccggctctcctggcgcctgggcctggacaaacgtcaatcagaggctcggctccaagccctgcaggaggcaggccttacccccacaccaccccccagtctcaaagaattgctcatcaaggaggtgctggactaacccttgcctagatttaaggccactgtgaggagaggggttgccccagaaggcaggggaaggacctgatgagaacagaatagctgggaggctgcagagggtgctgggagcccctagaagttccaaaagagaatgtgaagcagatcaaggaaacttctgttgagctaggctcagggtgagctttggctggggttgcccttgtgtagtacagggaagtctgacacagcctctccagcctataaacagccggggggctgtggcacaggttggggcaatgttcccttgttggtgggcccccaagctggcaaggcctcttggctgaaggccagggactctgcccctggagtcctggagttaagggatgaaggcaaggctgcaggtctggcccaggggaattaaaagccagccactcc

SEQ ID NO: 357917 - DNA, 3311 bp, Homo sapiens
ggaggcggggctggcggcaggaagctgccctgagcggcgctctgagcggcctgagcccggcggagccctgcagaacccggccgacctccatgggctgcggggggctgcacccggacccctggggcgcggcgcgcccctgaatgcaccgtgggacgcaggagggtgccatggcctcccggctcctgcaccggctgcggcacgccttggccggcgacggccccggggaggcggcggccagtccagaggccgagcagtttccggagagctcagagctggaggacgacgacgccgagggcctgtcctcccgactcagcggcaccctcagcttcaccagcgccgaggacgacgaggacgacgaggacgaggacgacgaggaggctggccctgaccagctgcccctcggggatgggacgtcaggagaagacgcagaacggagccccccacctgatgggcagtggggcagtcagctcctggcgcggcagctgcaggatttctggaagaagtcccggaacaccttggcaccccagcggctgctcttcgaagtgaccagcgctaacgttgtcaaggacccgccctccaagtacgtgtgctctacaccctcaccgtgatcggcccaggaccgccagattgccagccagcccagatctctcgccgttactcggactttgagcggctgcaccgaaacctgcagcggcaattccggggcccaatggctgccatctccttcccccgtaagcggctgcgccggaattttactgcagagaccattgcccgccgtagccgggcctttgagcagtttttgggtcacctgcaggcagtgcctgagctgcgccatgccccggacctgcaggacttcttcgtgctgccggagctgcggcgggcacagagcctcacctgtactggcctctatcgtgaggctctggcactctgggccaatgcctggcagctgcaagcccagctgggcaccccctctggcccagaccgccccctgctgaccctggctgggctggccgtgtgccaccaggagctggaagaccctggagaggcccgggcatgctgtgagaaggccctgcagctgcttggggacaagagcctccaccctttgctggcaccctttctggaggcccatgtccggctctcctggcgcctgggcctggacaaacgtcaatcagaggctcggctccaagccctgcaggaggcaggccttacccccacaccaccccccagtctcaaagaattgctcatcaaggaggtgctggactaacccttgcctagatttaaggccactgtgaggagaggggttgccccagaaggcaggggaaggacctgatgagaacagaatagctgggaggctgcagagggtgctgggagcccctagaagttccaaaagagaatgtgaagcagatcaaggaaacttctgttgagctaggctcagggtgagctttggctggggttgcccttgtgtagtacagggaagtctgacacagcctctccagcctataaacagccggggggctgtggcacaggttggggcaatgttcccttgttggtgggcccccaagctggcaaggcctcttggctgaaggccagggactctgcccctggagtcctggagttaagggatgaaggcaaggctgcaggtctggcccaggggaattaaaagccagccactccagtggtatcagtctctttattggatgtgagggccaaaagggactgtaactcctgtctcaggaatggggatagatgggaggttcttgaagccccaggcgaagctggtacctctggctacagcttgctctctgagacctggggcttcactcggatcacgccctcctgggcacaggtcacagctaggactccatcctgacgccacagccgcccatggaccagcccccgagagccacctgtgggtgaggtgaagggtgatgatggcctgcttcagaacagccaaatacacttttttttttttttcctgaaacagagtctcactaagttgccaggctggtctcaagcgcctgggttcaagggatcctcccgcctcagcctcctgagcagctgggattacaggcgcacatcaccatgcccaacctccaagtggacttcttgcaaagggtctggcccagggcagggctgccccacacaagggtgcactgagtgtcgtggctgctccaaatgccccttcatgagcttattatggaccgtcattgaggggtaactcctcccacaggaaccccagttgacagtttaaaagcactttcacacctctcctcgcttcctcaaaaagatcacagagggaggagctctgagaacagtctccttcaacagctcggccaagcagaactgctgtacctctgaccacttgtgttaggaaaactatcggctccctgtataataaatcaagccaggtcctccaagtggtaattcatgaaaaatatccccactaccaccaccaaggggaagaaaggactcagaagagaggacttgaggccatgaggtctggcctcttccctccccatctggagactctttctcccttgctggctttgggcccaagtttgatgtttatgaggatgattgctggtttcccttacacatagcagagctcactcagttctcacagtagccaaatgaagcagttatgtgttgtccagttttccagaccaggactgaaatccagagagggtcaggaatttggccccatgatgaagccaaatctgaacccatgtcctcacttcaaggttatcaatcttggattgtgatgctattggtacttgagaataccccttatctgagtataaagaatccttgagttttgtccttggtttatcaagcaaagcttttcttcatttgaaatgtactcccttggaaaggaggtcagggttctgaagctagacattgatgaacgagtcttgtttctctcccctgcaaggaaggtccaagcaggcccttagggaccactgaatgccccgatcccaatcaggttaatcagaatcacttagagaacttaaaaatacagtttcctggaccttatccaagacctactgagtgagaatcttgagggtggaatcagaatctattttgaaaaggcatccccaaatggcagtctgatggactgcgggtttggataccactgctgtaatgtaaccctctttgtttagatgaggaaactgaggttcagatggaagatatgatttgcctattgtaatacaaagaatctgaactggttttgggactagaactgggtccctgggagaaggtgaatcacatttccagcacattctagaaatttagagcagagcaggtgtccc

SEQ ID NO: 357918 - DNA, 3389 bp, Homo sapiens
ggaggcggggctggcggcaggaagctgccctgagcggcgctctgagcggcctgagcccggcggagccctgcagaacccggccgacctccatgggctgcggggggctgcacccggacccctggggcgcggcgcgcccctgaatgcaccgtgggacgcaggaggtagaggcgcacgaggcggcgcaagagacatcgggagggtcctgagcccctccggggaggaacgcggtcctaggctgaggtgccatggcctcccggctcctgcaccggctgcggcacgccttggccggcgacggccccggggaggcggcggccagtccagaggccgagcagtttccggagagctcagagctggaggacgacgacgccgagggcctgtcctcccgactcagcggcaccctcagcttcaccagcgccgaggacgacgaggacgacgaggacgaggacgacgaggaggctggccctgaccagctgcccctcggggatgggacgtcaggagaagacgcagaacggagccccccacctgatgggcagtggggcagtcagctcctggcgcggcagctgcaggatttctggaagaagtcccggaacaccttggcaccccagcggctgctcttcgaagtgaccagcgctaacgttgtcaaggacccgccctccaagtacgtgtgctctacaccctcaccgtgatcggcccaggaccgccagattgccagccagcccagatctctcgccgttactcggactttgagcggctgcaccgaaacctgcagcggcaattccggggcccaatggctgccatctccttcccccgtaagcggctgcgccggaattttactgcagagaccattgcccgccgtagccgggcctttgagcagtttttgggtcacctgcaggcagtgcctgagctgcgccatgccccggacctgcaggacttcttcgtgctgccggagctgcggcgggcacagagcctcacctgtactggcctctatcgtgaggctctggcactctgggccaatgcctggcagctgcaagcccagctgggcaccccctctggcccagaccgccccctgctgaccctggctgggctggccgtgtgccaccaggagctggaagaccctggagaggcccgggcatgctgtgagaaggccctgcagctgcttggggacaagagcctccaccctttgctggcaccctttctggaggcccatgtccggctctcctggcgcctgggcctggacaaacgtcaatcagaggctcggctccaagccctgcaggaggcaggccttacccccacaccaccccccagtctcaaagaattgctcatcaaggaggtgctggactaacccttgcctagatttaaggccactgtgaggagaggggttgccccagaaggcaggggaaggacctgatgagaacagaatagctgggaggctgcagagggtgctgggagcccctagaagttccaaaagagaatgtgaagcagatcaaggaaacttctgttgagctaggctcagggtgagctttggctggggttgcccttgtgtagtacagggaagtctgacacagcctctccagcctataaacagccggggggctgtggcacaggttggggcaatgttcccttgttggtgggcccccaagctggcaaggcctcttggctgaaggccagggactctgcccctggagtcctggagttaagggatgaaggcaaggctgcaggtctggcccaggggaattaaaagccagccactccagtggtatcagtctctttattggatgtgagggccaaaagggactgtaactcctgtctcaggaatggggatagatgggaggttcttgaagccccaggcgaagctggtacctctggctacagcttgctctctgagacctggggcttcactcggatcacgccctcctgggcacaggtcacagctaggactccatcctgacgccacagccgcccatggaccagcccccgagagccacctgtgggtgaggtgaagggtgatgatggcctgcttcagaacagccaaatacacttttttttttttttcctgaaacagagtctcactaagttgccaggctggtctcaagcgcctgggttcaagggatcctcccgcctcagcctcctgagcagctgggattacaggcgcacatcaccatgcccaacctccaagtggacttcttgcaaagggtctggcccagggcagggctgccccacacaagggtgcactgagtgtcgtggctgctccaaatgccccttcatgagcttattatggaccgtcattgaggggtaactcctcccacaggaaccccagttgacagtttaaaagcactttcacacctctcctcgcttcctcaaaaagatcacagagggaggagctctgagaacagtctccttcaacagctcggccaagcagaactgctgtacctctgaccacttgtgttaggaaaactatcggctccctgtataataaatcaagccaggtcctccaagtggtaattcatgaaaaatatccccactaccaccaccaaggggaagaaaggactcagaagagaggacttgaggccatgaggtctggcctcttccctccccatctggagactctttctcccttgctggctttgggcccaagtttgatgtttatgaggatgattgctggtttcccttacacatagcagagctcactcagttctcacagtagccaaatgaagcagttatgtgttgtccagttttccagaccaggactgaaatccagagagggtcaggaatttggccccatgatgaagccaaatctgaacccatgtcctcacttcaaggttatcaatcttggattgtgatgctattggtacttgagaataccccttatctgagtataaagaatccttgagttttgtccttggtttatcaagcaaagcttttcttcatttgaaatgtactcccttggaaaggaggtcagggttctgaagctagacattgatgaacgagtcttgtttctctcccctgcaaggaaggtccaagcaggcccttagggaccactgaatgccccgatcccaatcaggttaatcagaatcacttagagaacttaaaaatacagtttcctggaccttatccaagacctactgagtgagaatcttgagggtggaatcagaatctattttgaaaaggcatccccaaatggcagtctgatggactgcgggtttggataccactgctgtaatgtaaccctctttgtttagatgaggaaactgaggttcagatggaagatatgatttgcctattgtaatacaaagaatctgaactggttttgggactagaactgggtccctgggagaaggtgaatcacatttccagcacattctagaaatttagagcagagcaggtgtccc

SEQ ID NO: 357919 - DNA, 3283 bp, Homo sapiens
  misc_feature (29)..(29): n is a, c, g, or t
  misc_feature (38)..(38): n is a, c, g, or t
  misc_feature (48)..(48): n is a, c, g, or t
tttctttccatgcattttggcgtaactanatgaacagntgggttatanaaagcaggctgtcgccgatccggatcctcgaaccggcgactcatgctggggggctgcccgacctggggcgcgcgcctatcccgggaccaggaggtgcatggctccgctctgacggctgcggcacgccttggccggcgacggccccggggaggcggcggccagtccagaggccgagcagtttccggagagctcagagctggaggacgacgacgccgagggcctgtcctcccgactcagcggcaccctcagcttcaccagcgccgaggacgacgaggacgacgaggacgaggacgacgaggaggctggccctgaccagctgcccctcggggatgggacgtcaggagaagacgcagaacggagccccccacctgatgggcagtggggcagtcagctcctggcgcggcagctgcaggatttctggaagaagtcccggaacaccttggcaccccagcggctgctcttcgaagtgaccagcgctaacgttgtcaaggacccgccctccaagtacgtgtgctctacaccctcaccgtgatcggcccaggaccgccagattgccagccagcccagatctctcgccgttactcggactttgagcggctgcaccgaaacctgcagcggcaattccggggcccaatggctgccatctccttcccccgtaagcggctgcgccggaattttactgcagagaccattgcccgccgtagccgggcctttgagcagtttttgggtcacctgcaggcagtgcctgagctgcgccatgccccggacctgcaggacttcttcgtgctgccggagctgcggcgggcacagagcctcacctgtactggcctctatcgtgaggctctggcactctgggccaatgcctggcagctgcaagcccagctgggcaccccctctggcccagaccgccccctgctgaccctggctgggctggccgtgtgccaccaggagctggaagaccctggagaggcccgggcatgctgtgagaaggccctgcagctgcttggggacaagagcctccaccctttgctggcaccctttctggaggcccatgtccggctctcctggcgcctgggcctggacaaacgtcaatcagaggctcggctccaagccctgcaggaggcaggccttacccccacaccaccccccagtctcaaagaattgctcatcaaggaggtgctggactaacccttgcctagatttaaggccactgtgaggagaggggttgccccagaaggcaggggaaggacctgatgagaacagaatagctgggaggctgcagagggtgctgggagcccctagaagttccaaaagagaatgtgaagcagatcaaggaaacttctgttgagctaggctcagggtgagctttggctggggttgcccttgtgtagtacagggaagtctgacacagcctctccagcctataaacagccggggggctgtggcacaggttggggcaatgttcccttgttggtgggcccccaagctggcaaggcctcttggctgaaggccagggactctgcccctggagtcctggagttaagggatgaaggcaaggctgcaggtctggcccaggggaattaaaagccagccactccagtggtatcagtctctttattggatgtgagggccaaaagggactgtaactcctgtctcaggaatggggatagatgggaggttcttgaagccccaggcgaagctggtacctctggctacagcttgctctctgagacctggggcttcactcggatcacgccctcctgggcacaggtcacagctaggactccatcctgacgccacagccgcccatggaccagcccccgagagccacctgtgggtgaggtgaagggtgatgatggcctgcttcagaacagccaaatacacttttttttttttttcctgaaacagagtctcactaagttgccaggctggtctcaagcgcctgggttcaagggatcctcccgcctcagcctcctgagcagctgggattacaggcgcacatcaccatgcccaacctccaagtggacttcttgcaaagggtctggcccagggcagggctgccccacacaagggtgcactgagtgtcgtggctgctccaaatgccccttcatgagcttattatggaccgtcattgaggggtaactcctcccacaggaaccccagttgacagtttaaaagcactttcacacctctcctcgcttcctcaaaaagatcacagagggaggagctctgagaacagtctccttcaacagctcggccaagcagaactgctgtacctctgaccacttgtgttaggaaaactatcggctccctgtataataaatcaagccaggtcctccaagtggtaattcatgaaaaatatccccactaccaccaccaaggggaagaaaggactcagaagagaggacttgaggccatgaggtctggcctcttccctccccatctggagactctttctcccttgctggctttgggcccaagtttgatgtttatgaggatgattgctggtttcccttacacatagcagagctcactcagttctcacagtagccaaatgaagcagttatgtgttgtccagttttccagaccaggactgaaatccagagagggtcaggaatttggccccatgatgaagccaaatctgaacccatgtcctcacttcaaggttatcaatcttggattgtgatgctattggtacttgagaataccccttatctgagtataaagaatccttgagttttgtccttggtttatcaagcaaagcttttcttcatttgaaatgtactcccttggaaaggaggtcagggttctgaagctagacattgatgaacgagtcttgtttctctcccctgcaaggaaggtccaagcaggcccttagggaccactgaatgccccgatcccaatcaggttaatcagaatcacttagagaacttaaaaatacagtttcctggaccttatccaagacctactgagtgagaatcttgagggtggaatcagaatctattttgaaaaggcatccccaaatggcagtctgatggactgcgggtttggataccactgctgtaatgtaaccctctttgtttagatgaggaaactgaggttcagatggaagatatgatttgcctattgtaatacaaagaatctgaactggttttgggactagaactgggtccctgggagaaggtgaatcacatttccagcacattctagaaatttagagcagagcaggtgtccc

SEQ ID NO: 357920 - DNA, 3083 bp, Homo sapiens
gtccggccgaggctgcggccggtgaagctcaggaggtttggatagaatggctgttactacgagggctatgtggctgattgaggagtacaaaaaaaggggcagcagccccgggcactgaagctcatctctgtctttctctcttcttgctgccttgggcctgggtcatttcagacaaacctcaggtaagatgggactgggcttccccgccactgcgcagcagctcccgccctcctgggtgctgtcccaggggtgaaaggaagaggtggggaggtacagctgggagtgtgggggatggggaaggatggggagggaacgggcccgtggacaacttgcatttgccctgacacccaccctccctgtgctctacaccctcaccgtgatcggcccaggaccgccagattgccagccagcccagatctctcgccgttactcggactttgagcggctgcaccgaaacctgcagcggcaattccggggcccaatggctgccatctccttcccccgtaagcggctgcgccggaattttactgcagagaccattgcccgccgtagccgggcctttgagcagtttttgggtcacctgcaggcagtgcctgagctgcgccatgccccggacctgcaggacttcttcgtgctgccggagctgcggcgggcacagagcctcacctgtactggcctctatcgtgaggctctggcactctgggccaatgcctggcagctgcaagcccagctgggcaccccctctggcccagaccgccccctgctgaccctggctgggctggccgtgtgccaccaggagctggaagaccctggagaggcccgggcatgctgtgagaaggccctgcagctgcttggggacaagagcctccaccctttgctggcaccctttctggaggcccatgtccggctctcctggcgcctgggcctggacaaacgtcaatcagaggctcggctccaagccctgcaggaggcaggccttacccccacaccaccccccagtctcaaagaattgctcatcaaggaggtgctggactaacccttgcctagatttaaggccactgtgaggagaggggttgccccagaaggcaggggaaggacctgatgagaacagaatagctgggaggctgcagagggtgctgggagcccctagaagttccaaaagagaatgtgaagcagatcaaggaaacttctgttgagctaggctcagggtgagctttggctggggttgcccttgtgtagtacagggaagtctgacacagcctctccagcctataaacagccggggggctgtggcacaggttggggcaatgttcccttgttggtgggcccccaagctggcaaggcctcttggctgaaggccagggactctgcccctggagtcctggagttaagggatgaaggcaaggctgcaggtctggcccaggggaattaaaagccagccactccagtggtatcagtctctttattggatgtgagggccaaaagggactgtaactcctgtctcaggaatggggatagatgggaggttcttgaagccccaggcgaagctggtacctctggctacagcttgctctctgagacctggggcttcactcggatcacgccctcctgggcacaggtcacagctaggactccatcctgacgccacagccgcccatggaccagcccccgagagccacctgtgggtgaggtgaagggtgatgatggcctgcttcagaacagccaaatacacttttttttttttttcctgaaacagagtctcactaagttgccaggctggtctcaagcgcctgggttcaagggatcctcccgcctcagcctcctgagcagctgggattacaggcgcacatcaccatgcccaacctccaagtggacttcttgcaaagggtctggcccagggcagggctgccccacacaagggtgcactgagtgtcgtggctgctccaaatgccccttcatgagcttattatggaccgtcattgaggggtaactcctcccacaggaaccccagttgacagtttaaaagcactttcacacctctcctcgcttcctcaaaaagatcacagagggaggagctctgagaacagtctccttcaacagctcggccaagcagaactgctgtacctctgaccacttgtgttaggaaaactatcggctccctgtataataaatcaagccaggtcctccaagtggtaattcatgaaaaatatccccactaccaccaccaaggggaagaaaggactcagaagagaggacttgaggccatgaggtctggcctcttccctccccatctggagactctttctcccttgctggctttgggcccaagtttgatgtttatgaggatgattgctggtttcccttacacatagcagagctcactcagttctcacagtagccaaatgaagcagttatgtgttgtccagttttccagaccaggactgaaatccagagagggtcaggaatttggccccatgatgaagccaaatctgaacccatgtcctcacttcaaggttatcaatcttggattgtgatgctattggtacttgagaataccccttatctgagtataaagaatccttgagttttgtccttggtttatcaagcaaagcttttcttcatttgaaatgtactcccttggaaaggaggtcagggttctgaagctagacattgatgaacgagtcttgtttctctcccctgcaaggaaggtccaagcaggcccttagggaccactgaatgccccgatcccaatcaggttaatcagaatcacttagagaacttaaaaatacagtttcctggaccttatccaagacctactgagtgagaatcttgagggtggaatcagaatctattttgaaaaggcatccccaaatggcagtctgatggactgcgggtttggataccactgctgtaatgtaaccctctttgtttagatgaggaaactgaggttcagatggaagatatgatttgcctattgtaatacaaagaatctgaactggttttgggactagaactgggtccctgggagaaggtgaatcacatttccagcacattctagaaatttagagcagagcaggtgtccc

SEQ ID NO: 357921 - DNA, 1200 bp, Homo sapiens
  misc_feature (1130)..(1130): n is a, c, g, or t
  misc_feature (1132)..(1132): n is a, c, g, or t
ggaggcggggctggcggcaggaagctgccctgagcggcgctctgagcggcctgagcccggcggagccctgcagaacccggccgacctccatgggctgcggggggctgcacccggacccctggggcgcggcgcgcccctgaatgcaccgtgggacgcaggaggtagaggcgcacgaggcggcgcaagagacatcgggagggtcctgagcccctccggggaggaacgcggtcctaggctgaggtgccatggcctcccggctcctgcaccggctgcggcacgccttggccggcgacggccccggggaggcggcggccagtccagaggccgagcagtttccggagagctcagagctggaggacgacgacgccgagggcctgtcctcccgactcagcggcaccctcagcttcaccagcgccgaggacgacgaggacgacgaggacgaggacgacgaggaggctggccctgaccagctgcccctcggggatgggacgtcaggagaagacgcagaacggagccccccacctgatgggcagtggggcagtcagctcctggcgcggcagctgcaggatttctggaagaagtcccggaacaccttggcaccccagcggctgctcttcgaagtgaccagcgctaacgttgtcaaggacccgccctccaagtacgtgtgctctacaccctcaccgtgatcggcccaggaccgccagattgccagccagcccagatctctcgccgttactcggactttgagcggctgcaccgaaacctgcagcggcaattccggggcccaatggctgccatctccttcccccgtaagcggctgcgccggaattttactgcagagaccattgcccgccgtagccgggcctttgagcagtttttgggtcacctgcaggcagtgcctgagctgcgccatgccccggacctgcaggacttcttcgtgctgccggagctgcggcgggcacagagcctcacctgtactggcctctatcgtgaggctctggcactctgggccaatgcctggcagctgcaagcccagctgggcaccccctctggcccagaccgccccctgctgaccctggctgggctggccgtgtgccaccaggagctggaagaccctggagaggccggtntngagaagctcttttggggaagcccttgggggctttgggcatgggttgggggcgcaaacagaggcactgg

SEQ ID NO: 357922 - DNA, 1399 bp, Homo sapiens
ggaggcggggctggcggcaggaagctgccctgagcggcgctctgagcggcctgagcccggcggagccctgcagaacccggccgacctccatgggctgcggggggctgcacccggacccctggggcgcggcgcgcccctgaatgcaccgtgggacgcaggagggtgccatggcctcccggctcctgcaccggctgcggcacgccttggccggcgacggccccggggaggcggcggccagtccagaggccgagcagtttccggagagctcagagctggaggacgacgacgccgagggcctgtcctcccgactcagcggcaccctcagcttcaccagcgccgaggacgacgaggacgacgaggacgaggacgacgaggaggctggccctgaccagctgcccctcggggatgggacgtcaggagaagacgcaggcgagtgcaggaggacggaggcgggaaccctggggctcgattaggcctccatcccagccgcgttcccagagcatccagggcgctaagttgatccagctgaaactcccacacttcttaaagcgcctgggccacctcttggctgtgtgaccttgagagagtcttaacccccctctgagccaagttttcccttgtgtcaagtgggagaactcactctcatctcagaattgctgcaggcattaaatgtacagggcttgggatccgaatggaaatgatgtattaacgatattttgagggtggagctattaatttagcccctactgtctgccaggcacggtgtttggctcctcggtgcctctctgtccctcagtttccatttctgtaaaaagggggtaagtcctgcctcacactgggaggatgagtgaggccacgtcagtggttgatgtcgaccctggccctaggcccattgatatgactggtcatgtgtctgcagaacggagccccccacctgatgggcagtggggcagtcagctcctggcgcggcagctgcaggatttctggaagaagtcccggaacaccttggcaccccagcggctgctcttcgaagtgaccagcgctaacgttgtcaaggacccgccctccaagtacgtgtggtgagtgagggtctagaacccctgggctgtgagtccagaagtatggctaggagcaagtagggaagaccccaacttcctgaggggtctatgtagttataaatggttaccttgtttacaaatggggaaactgaggtcagaaaggggatgtaacttgagcaaatcctcacacaagacttagtttccttgagactgactgaagtggggattaaggaccttcctcttaacctggttttgagactaagagaactggtgtgtgcacttccccacccagcccacaaggtttttgcaaattgtagcaagatgtgagatacagagagaca

SEQ ID NO: 357923 - DNA, 1904 bp, Homo sapiens
  misc_feature (667)..(667): n is a, c, g, or t
ggaggcggggctggcggcaggaagctgccctgagcggcgctctgagcggcctgagcccggcggagccctgcagaacccggccgacctccatgggctgcggggggctgcacccggacccctggggcgcggcgcgcccctgaatgcaccgtgggacgcaggagggtgccatggcctcccggctcctgcaccggctgcggcacgccttggccggcgacggccccggggaggcggcggccagtccagaggccgagcagtttccggagagctcagagctggaggacgacgacgccgagggcctgtcctcccgactcagcggcaccctcagcttcaccagcgccgaggacgacgaggacgacgaggacgaggacgacgaggaggctggccctgaccagctgcccctcggggatgggacgtcaggagaagacgcagaacggagccccccacctgatgggcagtggggcagtcagctcctggcgcggcagctgcaggatttctggaagaagtcccggaacaccttggcaccccagcggctgctcttcgaagtgaccagcgctaacgttgtcaaggacccgccctccaagtacgtgagacagggtcttgccatgttgcccaggctggtctcgaactcctggccttaagctgttctcctgcctcagcctcccaaagnactgggattacagagggggctgtcagaagaactaatgctctatgggaagggagtacaaaaaaaggggcagcagccccgggcactgaagctcatctctgtctttctctcttcttgctgccttgggcctgggtcatttcagacaaacctcagtgctctacaccctcaccgtgatcggcccaggaccgccagattgccagccagcccagatctctcgccgttactcggactttgagcggctgcaccgaaacctgcagcggcaattccggggcccaatggctgccatctccttcccccgtaagcggctgcgccggaattttactgcagagaccattgcccgccgtagccgggcctttgagcagtttttgggtcacctgcaggcagtgcctgagctgcgccatgccccggacctgcaggacttcttcgtgctgccggagctgcggcgggcacagagcctcacctgtactggcctctatcgtgaggctctggcactctgggccaatgcctggcagctgcaagcccagctgggcaccccctctggcccagaccgccccctgctgaccctggctgggctggccgtgtgccaccaggagctggaagaccctggagaggcccgggcatgctgtgagaaggccctgcagctgcttggggacaagagcctccaccctttgctggcaccctttctggaggcccatgtccggctctcctggcgcctgggcctggacaaacgtcaatcagaggctcggctccaagccctgcaggaggcaggccttacccccacaccaccccccagtctcaaagaattgctcatcaaggaggtgctggactaacccttgcctagatttaaggccactgtgaggagaggggttgccccagaaggcaggggaaggacctgatgagaacagaatagctgggaggctgcagagggtgctgggagcccctagaagttccaaaagagaatgtgaagcagatcaaggaaacttctgttgagctaggctcagggtgagctttggctggggttgcccttgtgtagtacagggaagtctgacacagcctctccagcctataaacagccggggggctgtggcacaggttggggcaatgttcccttgttggtgggcccccaagctggcaaggcctcttggctgaaggccagggactctgcccctggagtcctggagttaagggatgaaggcaaggctgcaggtctggcccaggggaattaaaagccagccactcc

SEQ ID NO: 357924 - DNA, 2058 bp, Homo sapiens
ggaggcggggctggcggcaggaagctgccctgagcggcgctctgagcggcctgagcccggcggagccctgcagaacccggccgacctccatgggctgcggggggctgcacccggacccctggggcgcggcgcgcccctgaatgcaccgtgggacgcaggagggtgccatggcctcccggctcctgcaccggctgcggcacgccttggccggcgacggccccggggaggcggcggccagtccagaggccgagcagtttccggagagctcagagctggaggacgacgacgccgagggcctgtcctcccgactcagcggcaccctcagcttcaccagcgccgaggacgacgaggacgacgaggacgaggacgacgaggaggctggccctgaccagctgcccctcggggatgggacgtcaggagaagacgcagaacggagccccccacctgatgggcagtggggcagtcagctcctggcgcggcagctgcaggatttctggaagaagtcccggaacaccttggcaccccagcggctgctcttcgaagtgaccagcgctaacgttgtcaaggacccgccctccaagtacgtgtgctctacaccctcaccgtgatcggcccaggaccgccagattgccagccagcccagatctctcgccgttactcggactttgagcggctgcaccgaaacctgcagcggcaattccggggcccaatggctgccatctccttcccccagtctcactaagttgccaggctggtctcaagcgcctgggttcaagggatcctcccgcctcagcctcctgagcagctgggattacaggcgcacatcaccatgcccaacctccaagtggacttcttgcaaagggtctggcccagggcagggctgccccacacaagggtgcactgagtgtcgtggctgctccaaatgccccttcatgagcttattatggaccgtcattgaggggtaactcctcccacaggaaccccagttgacagtttaaaagcactttcacacctctcctcgcttcctcaaaaagatcacagagggaggagctctgagaacagtctccttcaacagctcggccaagcagaactgctgtacctctgaccacttgtgttaggaaaactatcggctccctgtataataaatcaagccaggtcctccaagtggtaattcatgaaaaatatccccactaccaccaccaaggggaagaaaggactcagaagagaggacttgaggccatgaggtctggcctcttccctccccatctggagactctttctcccttgctggctttgggcccaagtttgatgtttatgaggatgattgctggtttcccttacacatagcagagctcactcagttctcacagtagccaaatgaagcagttatgtgttgtccagttttccagaccaggactgaaatccagagagggtcaggaatttggccccatgatgaagccaaatctgaacccatgtcctcacttcaaggttatcaatcttggattgtgatgctattggtacttgagaataccccttatctgagtataaagaatccttgagttttgtccttggtttatcaagcaaagcttttcttcatttgaaatgtactcccttggaaaggaggtcagggttctgaagctagacattgatgaacgagtcttgtttctctcccctgcaaggaaggtccaagcaggcccttagggaccactgaatgccccgatcccaatcaggttaatcagaatcacttagagaacttaaaaatacagtttcctggaccttatccaagacctactgagtgagaatcttgagggtggaatcagaatctattttgaaaaggcatccccaaatggcagtctgatggactgcgggtttggataccactgctgtaatgtaaccctctttgtttagatgaggaaactgaggttcagatggaagatatgatttgcctattgtaatacaaagaatctgaactggttttgggactagaactgggtccctgggagaaggtgaatcacatttccagcacattctagaaatttagagcagagcaggtgtccc

SEQ ID NO: 357925 - DNA, 3571 bp, Homo sapiens
ggaggcggggctggcggcaggaagctgccctgagcggcgctctgagcggcctgagcccggcggagccctgcagaacccggccgacctccatgggctgcggggggctgcacccggacccctggggcgcggcgcgcccctgaatgcaccgtgggacgcaggaggtagaggcgcacgaggcggcgcaagagacatcgggagggtcctgagcccctccggggaggaacgcggtcctaggctgagtgggttggggggaaagcgatgctggctgggtcccctggttcgcaagacctcggactgccagggggtggggcctcaccgcgcccctccctctccggttcgggccccgcccctcctcctcctgcgccgggctggggtacccctcctccgggatccggtacacagcgtcgcgcgctccccccagggtgccatggcctcccggctcctgcaccggctgcggcacgccttggccggcgacggccccggggaggcggcggccagtccagaggccgagcagtttccggagagctcagagctggaggacgacgacgccgagggcctgtcctcccgactcagcggcaccctcagcttcaccagcgccgaggacgacgaggacgacgaggacgaggacgacgaggaggctggccctgaccagctgcccctcggggatgggacgtcaggagaagacgcagaacggagccccccacctgatgggcagtggggcagtcagctcctggcgcggcagctgcaggatttctggaagaagtcccggaacaccttggcaccccagcggctgctcttcgaagtgaccagcgctaacgttgtcaaggacccgccctccaagtacgtgtgctctacaccctcaccgtgatcggcccaggaccgccagattgccagccagcccagatctctcgccgttactcggactttgagcggctgcaccgaaacctgcagcggcaattccggggcccaatggctgccatctccttcccccgtaagcggctgcgccggaattttactgcagagaccattgcccgccgtagccgggcctttgagcagtttttgggtcacctgcaggcagtgcctgagctgcgccatgccccggacctgcaggacttcttcgtgctgccggagctgcggcgggcacagagcctcacctgtactggcctctatcgtgaggctctggcactctgggccaatgcctggcagctgcaagcccagctgggcaccccctctggcccagaccgccccctgctgaccctggctgggctggccgtgtgccaccaggagctggaagaccctggagaggcccgggcatgctgtgagaaggccctgcagctgcttggggacaagagcctccaccctttgctggcaccctttctggaggcccatgtccggctctcctggcgcctgggcctggacaaacgtcaatcagaggctcggctccaagccctgcaggaggcaggccttacccccacaccaccccccagtctcaaagaattgctcatcaaggaggtgctggactaacccttgcctagatttaaggccactgtgaggagaggggttgccccagaaggcaggggaaggacctgatgagaacagaatagctgggaggctgcagagggtgctgggagcccctagaagttccaaaagagaatgtgaagcagatcaaggaaacttctgttgagctaggctcagggtgagctttggctggggttgcccttgtgtagtacagggaagtctgacacagcctctccagcctataaacagccggggggctgtggcacaggttggggcaatgttcccttgttggtgggcccccaagctggcaaggcctcttggctgaaggccagggactctgcccctggagtcctggagttaagggatgaaggcaaggctgcaggtctggcccaggggaattaaaagccagccactccagtggtatcagtctctttattggatgtgagggccaaaagggactgtaactcctgtctcaggaatggggatagatgggaggttcttgaagccccaggcgaagctggtacctctggctacagcttgctctctgagacctggggcttcactcggatcacgccctcctgggcacaggtcacagctaggactccatcctgacgccacagccgcccatggaccagcccccgagagccacctgtgggtgaggtgaagggtgatgatggcctgcttcagaacagccaaatacacttttttttttttttcctgaaacagagtctcactaagttgccaggctggtctcaagcgcctgggttcaagggatcctcccgcctcagcctcctgagcagctgggattacaggcgcacatcaccatgcccaacctccaagtggacttcttgcaaagggtctggcccagggcagggctgccccacacaagggtgcactgagtgtcgtggctgctccaaatgccccttcatgagcttattatggaccgtcattgaggggtaactcctcccacaggaaccccagttgacagtttaaaagcactttcacacctctcctcgcttcctcaaaaagatcacagagggaggagctctgagaacagtctccttcaacagctcggccaagcagaactgctgtacctctgaccacttgtgttaggaaaactatcggctccctgtataataaatcaagccaggtcctccaagtggtaattcatgaaaaatatccccactaccaccaccaaggggaagaaaggactcagaagagaggacttgaggccatgaggtctggcctcttccctccccatctggagactctttctcccttgctggctttgggcccaagtttgatgtttatgaggatgattgctggtttcccttacacatagcagagctcactcagttctcacagtagccaaatgaagcagttatgtgttgtccagttttccagaccaggactgaaatccagagagggtcaggaatttggccccatgatgaagccaaatctgaacccatgtcctcacttcaaggttatcaatcttggattgtgatgctattggtacttgagaataccccttatctgagtataaagaatccttgagttttgtccttggtttatcaagcaaagcttttcttcatttgaaatgtactcccttggaaaggaggtcagggttctgaagctagacattgatgaacgagtcttgtttctctcccctgcaaggaaggtccaagcaggcccttagggaccactgaatgccccgatcccaatcaggttaatcagaatcacttagagaacttaaaaatacagtttcctggaccttatccaagacctactgagtgagaatcttgagggtggaatcagaatctattttgaaaaggcatccccaaatggcagtctgatggactgcgggtttggataccactgctgtaatgtaaccctctttgtttagatgaggaaactgaggttcagatggaagatatgatttgcctattgtaatacaaagaatctgaactggttttgggactagaactgggtccctgggagaaggtgaatcacatttccagcacattctagaaatttagagcagagcaggtgtccc

SEQ ID NO: 357926 - DNA, 3801 bp, Homo sapiens
ggaggcggggctggcggcaggaagctgccctgagcggcgctctgagcggcctgagcccggcggagccctgcagaacccggccgacctccatgggctgcggggggctgcacccggacccctggggcgcggcgcgcccctgaatgcaccgtgggacgcaggagggtgccatggcctcccggctcctgcaccggctgcggcacgccttggccggcgacggccccggggaggcggcggccagtccagaggccgagcagtttccggagagctcagagctggaggacgacgacgccgagggcctgtcctcccgactcagcggcaccctcagcttcaccagcgccgaggacgacgaggacgacgaggacgaggacgacgaggaggctggccctgaccagctgcccctcggggatgggacgtcaggagaagacgcaggcgagtgcaggaggacggaggcgggaaccctggggctcgattaggcctccatcccagccgcgttcccagagcatccagggcgctaagttgatccagctgaaactcccacacttcttaaagcgcctgggccacctcttggctgtgtgaccttgagagagtcttaacccccctctgagccaagttttcccttgtgtcaagtgggagaactcactctcatctcagaattgctgcaggcattaaatgtacagggcttgggatccgaatggaaatgatgtattaacgatattttgagggtggagctattaatttagcccctactgtctgccaggcacggtgtttggctcctcggtgcctctctgtccctcagtttccatttctgtaaaaagggggtaagtcctgcctcacactgggaggatgagtgaggccacgtcagtggttgatgtcgaccctggccctaggcccattgatatgactggtcatgtgtctgcagaacggagccccccacctgatgggcagtggggcagtcagctcctggcgcggcagctgcaggatttctggaagaagtcccggaacaccttggcaccccagcggctgctcttcgaagtgaccagcgctaacgttgtcaaggacccgccctccaagtacgtgtgctctacaccctcaccgtgatcggcccaggaccgccagattgccagccagcccagatctctcgccgttactcggactttgagcggctgcaccgaaacctgcagcggcaattccggggcccaatggctgccatctccttcccccgtaagcggctgcgccggaattttactgcagagaccattgcccgccgtagccgggcctttgagcagtttttgggtcacctgcaggcagtgcctgagctgcgccatgccccggacctgcaggacttcttcgtgctgccggagctgcggcgggcacagagcctcacctgtactggcctctatcgtgaggctctggcactctgggccaatgcctggcagctgcaagcccagctgggcaccccctctggcccagaccgccccctgctgaccctggctgggctggccgtgtgccaccaggagctggaagaccctggagaggcccgggcatgctgtgagaaggccctgcagctgcttggggacaagagcctccaccctttgctggcaccctttctggaggcccatgtccggctctcctggcgcctgggcctggacaaacgtcaatcagaggctcggctccaagccctgcaggaggcaggccttacccccacaccaccccccagtctcaaagaattgctcatcaaggaggtgctggactaacccttgcctagatttaaggccactgtgaggagaggggttgccccagaaggcaggggaaggacctgatgagaacagaatagctgggaggctgcagagggtgctgggagcccctagaagttccaaaagagaatgtgaagcagatcaaggaaacttctgttgagctaggctcagggtgagctttggctggggttgcccttgtgtagtacagggaagtctgacacagcctctccagcctataaacagccggggggctgtggcacaggttggggcaatgttcccttgttggtgggcccccaagctggcaaggcctcttggctgaaggccagggactctgcccctggagtcctggagttaagggatgaaggcaaggctgcaggtctggcccaggggaattaaaagccagccactccagtggtatcagtctctttattggatgtgagggccaaaagggactgtaactcctgtctcaggaatggggatagatgggaggttcttgaagccccaggcgaagctggtacctctggctacagcttgctctctgagacctggggcttcactcggatcacgccctcctgggcacaggtcacagctaggactccatcctgacgccacagccgcccatggaccagcccccgagagccacctgtgggtgaggtgaagggtgatgatggcctgcttcagaacagccaaatacacttttttttttttttcctgaaacagagtctcactaagttgccaggctggtctcaagcgcctgggttcaagggatcctcccgcctcagcctcctgagcagctgggattacaggcgcacatcaccatgcccaacctccaagtggacttcttgcaaagggtctggcccagggcagggctgccccacacaagggtgcactgagtgtcgtggctgctccaaatgccccttcatgagcttattatggaccgtcattgaggggtaactcctcccacaggaaccccagttgacagtttaaaagcactttcacacctctcctcgcttcctcaaaaagatcacagagggaggagctctgagaacagtctccttcaacagctcggccaagcagaactgctgtacctctgaccacttgtgttaggaaaactatcggctccctgtataataaatcaagccaggtcctccaagtggtaattcatgaaaaatatccccactaccaccaccaaggggaagaaaggactcagaagagaggacttgaggccatgaggtctggcctcttccctccccatctggagactctttctcccttgctggctttgggcccaagtttgatgtttatgaggatgattgctggtttcccttacacatagcagagctcactcagttctcacagtagccaaatgaagcagttatgtgttgtccagttttccagaccaggactgaaatccagagagggtcaggaatttggccccatgatgaagccaaatctgaacccatgtcctcacttcaaggttatcaatcttggattgtgatgctattggtacttgagaataccccttatctgagtataaagaatccttgagttttgtccttggtttatcaagcaaagcttttcttcatttgaaatgtactcccttggaaaggaggtcagggttctgaagctagacattgatgaacgagtcttgtttctctcccctgcaaggaaggtccaagcaggcccttagggaccactgaatgccccgatcccaatcaggttaatcagaatcacttagagaacttaaaaatacagtttcctggaccttatccaagacctactgagtgagaatcttgagggtggaatcagaatctattttgaaaaggcatccccaaatggcagtctgatggactgcgggtttggataccactgctgtaatgtaaccctctttgtttagatgaggaaactgaggttcagatggaagatatgatttgcctattgtaatacaaagaatctgaactggttttgggactagaactgggtccctgggagaaggtgaatcacatttccagcacattctagaaatttagagcagagcaggtgtccc

SEQ ID NO: 357927 - DNA, 1122 bp, Homo sapiens
  misc_feature (1052)..(1052): n is a, c, g, or t
  misc_feature (1054)..(1054): n is a, c, g, or t
ggaggcggggctggcggcaggaagctgccctgagcggcgctctgagcggcctgagcccggcggagccctgcagaacccggccgacctccatgggctgcggggggctgcacccggacccctggggcgcggcgcgcccctgaatgcaccgtgggacgcaggagggtgccatggcctcccggctcctgcaccggctgcggcacgccttggccggcgacggccccggggaggcggcggccagtccagaggccgagcagtttccggagagctcagagctggaggacgacgacgccgagggcctgtcctcccgactcagcggcaccctcagcttcaccagcgccgaggacgacgaggacgacgaggacgaggacgacgaggaggctggccctgaccagctgcccctcggggatgggacgtcaggagaagacgcagaacggagccccccacctgatgggcagtggggcagtcagctcctggcgcggcagctgcaggatttctggaagaagtcccggaacaccttggcaccccagcggctgctcttcgaagtgaccagcgctaacgttgtcaaggacccgccctccaagtacgtgtgctctacaccctcaccgtgatcggcccaggaccgccagattgccagccagcccagatctctcgccgttactcggactttgagcggctgcaccgaaacctgcagcggcaattccggggcccaatggctgccatctccttcccccgtaagcggctgcgccggaattttactgcagagaccattgcccgccgtagccgggcctttgagcagtttttgggtcacctgcaggcagtgcctgagctgcgccatgccccggacctgcaggacttcttcgtgctgccggagctgcggcgggcacagagcctcacctgtactggcctctatcgtgaggctctggcactctgggccaatgcctggcagctgcaagcccagctgggcaccccctctggcccagaccgccccctgctgaccctggctgggctggccgtgtgccaccaggagctggaagaccctggagaggccggtntngagaagctcttttggggaagcccttgggggctttgggcatgggttgggggcgcaaacagaggcactgg

SEQ ID NO: 357928 - DNA, 1095 bp, Homo sapiens
accgcgctcagcgccttcactgccatccccgctgtccttgccgcccccgccatgggcctagagctgtttcttgacctggtgtcccagcccagccgcgccgtctacatcttcgccaagaagaatggcatccccttagagctgcgcaccgtggatttggtcaaagggcagcacaagagcaaggagttcttgcagatcaacagcctggggaaactgccgacgctcaaggatggtgatttcatcttgaccgaaagctcggccatcctgatttacctgagctgtaagtaccagacgccggaccactggtatccatctgacctgcaggctcgtgcccgtgttcatgagtacctgggctggcatgccgactgcatccgtggcacctttggtatacccctgtgggtccaggtgttggggccactcattggggtccaggtgcccgaggagaaggtggaacgcaacaggactgccatggaccaggccctgcaatggctggaggacaagttcctgggggacaggcccttcctcgctggccagcaggtgacactggctgatctcatggccctggaggagctgatgcagccggtggctctcggctacgaactgtttgagggacggccacgactggcagcatggcgtggacgagtggaggctttcctgggtgctgagctatgccaggaggcccacagcatcatcttgagcatcctggaacaggcggccaagaaaaccctcccaacaccctcaccagaggcctatcaggctatgctgcttcgaatcgccaggatcccctgaagggtctgggatgggggccaggagattagcaacaaggattcattctgttacttacttgcccctttttatctttccctcttgccccagtcccttctctccagcttcatgtgaagctctgcacagacaagacactcagtgtccttggcagtgctgctactcctcaggtgcagcatacataaccagtaagagactaaatctgcaatatataaagagctcctacaaatcagtaacatgaagaacactcaaaaattggcaaatgtcatcagtgttttaaacagaataaagattccaaacactttgaatagagaa

SEQ ID NO: 357929 - DNA, 1276 bp, Homo sapiens
accgcgctcagcgccttcactgccatccccgctgtccttgccgcccccgccatgggcctagagctgtttcttgacctggtgtcccagcccagccgcgccgtctacatcttcgccaagaagaatggcatccccttagagctgcgcaccgtggatttggtcaaagggatggaaagaaaatactgaatggagttgacagagttcttgcgtggaatgcacgcatataaattcacaaagcccagaagacctcgggaagaaggacatactgttggcagcacaagagcaaggagttcttgcagatcaacagcctggggaaactgccgacgctcaaggatggtgatttcatcttgaccgaaagggcggctgctggcatatcacagagatgaggttctcaaaatgcaaagcagaaggtccagccaagagtcggtgcccaagctcggccatcctgatttacctgagctgtaagtaccagacgccggaccactggtatccatctgacctgcaggctcgtgcccgtgttcatgagtacctgggctggcatgccgactgcatccgtggcacctttggtatacccctgtgggtccaggtgttggggccactcattggggtccaggtgcccgaggagaaggtggaacgcaacaggactgccatggaccaggccctgcaatggctggaggacaagttcctgggggacaggcccttcctcgctggccagcaggtgacactggctgatctcatggccctggaggagctgatgcagccggtggctctcggctacgaactgtttgagggacggccacgactggcagcatggcgtggacgagtggaggctttcctgggtgctgagctatgccaggaggcccacagcatcatcttgagcatcctggaacaggcggccaagaaaaccctcccaacaccctcaccagaggcctatcaggctatgctgcttcgaatcgccaggatcccctgaagggtctgggatgggggccaggagattagcaacaaggattcattctgttacttacttgcccctttttatctttccctcttgccccagtcccttctctccagcttcatgtgaagctctgcacagacaagacactcagtgtccttggcagtgctgctactcctcaggtgcagcatacataaccagtaagagactaaatctgcaatatataaagagctcctacaaatcagtaacatgaagaacactcaaaaattggcaaatgtcatcagtgttttaaacagaataaagattccaaacactttgaatagagaa

SEQ ID NO: 357930 - DNA, 1197 bp, Homo sapiens
accgcgctcagcgccttcactgccatccccgctgtccttgccgcccccgccatgggcctagagctgtttcttgacctggtgtcccagcccagccgcgccgtctacatcttcgccaagaagaatggcatccccttagagctgcgcaccgtggatttggtcaaagggcagcacaagagcaaggagttcttgcagatcaacagcctggggaaactgccgacgctcaaggatggtgatttcatcttgaccgaaaggctaacaggagtgtctacctcacagggcggctgctggcatatcacagagatgaggttctcaaaatgcaaagcagaaggtccagccaagagtcggtgcccaagctcggccatcctgatttacctgagctgtaagtaccagacgccggaccactggtatccatctgacctgcaggctcgtgcccgtgttcatgagtacctgggctggcatgccgactgcatccgtggcacctttggtatacccctgtgggtccaggtgttggggccactcattggggtccaggtgcccgaggagaaggtggaacgcaacaggactgccatggaccaggccctgcaatggctggaggacaagttcctgggggacaggcccttcctcgctggccagcaggtgacactggctgatctcatggccctggaggagctgatgcagccggtggctctcggctacgaactgtttgagggacggccacgactggcagcatggcgtggacgagtggaggctttcctgggtgctgagctatgccaggaggcccacagcatcatcttgagcatcctggaacaggcggccaagaaaaccctcccaacaccctcaccagaggcctatcaggctatgctgcttcgaatcgccaggatcccctgaagggtctgggatgggggccaggagattagcaacaaggattcattctgttacttacttgcccctttttatctttccctcttgccccagtcccttctctccagcttcatgtgaagctctgcacagacaagacactcagtgtccttggcagtgctgctactcctcaggtgcagcatacataaccagtaagagactaaatctgcaatatataaagagctcctacaaatcagtaacatgaagaacactcaaaaattggcaaatgtcatcagtgttttaaacagaataaagattccaaacactttgaatagagaa

SEQ ID NO: 357931 - DNA, 1490 bp, Homo sapiens
accgcgctcagcgccttcactgccatccccgctgtccttgccgcccccgccatgggcctagagctgtttcttgacctggtgtcccagcccagccgcgccgtctacatcttcgccaagaagaatggcatccccttagagctgcgcaccgtggatttggtcaaagggcagcacaagagcaaggagttcttgcagatcaacagcctggggaaactgccgacgctcaaggatggtgatttcatcttgaccgaaagctcggccatcctgatttacctgagctgtaagtaccagacgccggaccactggtatccatctgacctgcaggctcgtgcccgtgttcatgagtacctgggctggcatgccgactgcatccgtggcacctttggtatacccctgtgggtccaggtgttggggccactcattggggtccaggtgcccgaggagaaggtggaacgcaacaggactgccatggaccaggccctgcaatggctggaggacaagttcctgggggacaggcccttcctcgctggccagcaggtgacactggctgatctcatggccctggaggagctgatgcagccggtggctctcggctacgaactgtttgagggacggccacgactggcagcatggcgtggacgagtggaggctttcctgggtgctgagctatgccaggaggcccacagcatcatcttgagcatcctggaacaggcggccaagaaaaccctcccaacaccctcaccagaggcctatcaggctatgctgcttcgaatcgccaggatcccctgaagggtctgggatgggggccaggagattagcaacaaggattcattctgttacttacttgcccctttttatctttccctcttgccccagtcccttctctccagcttcatgtgaagctctgcacagacaagacactcagtgtccttggcagtgctgctactcctcaggtgcagcatacataaccagtaagagactaaatctgcaatatataaagagctcctacaaatcagtaacatgaagaacactcaaaaattggcaaatgtcatcagtgttttaaacagaataaagattccaaacactttgaatagagaaaaaaaaaaaaaaaaaaaacacaaacaaaaaacaaaaaataaactaacaaaaaaaaaaataaaataaacaatacataaaaacaaatgtcccaatcaataaatatgagaatgtataattaacatttcctgcactgtgtgtataattatcgggggagaacaagcaacaaaatggaatttacttaaccaacaacaacaataatgatcatacaaacaacaagacaccaacatgaattctggagacaagacagatttaaatccaggtcacaatttacttgtgtgtgacccttgggcaagctactcctaagtcttagttctcgaacgataatcatatctattctcacaggattaaataagatagtatacagaattgccagtcaggtaatagacactattatg

SEQ ID NO: 357932 - DNA, 1043 bp, Homo sapiens
accgcgctcagcgccttcactgccatccccgctgtccttgccgcccccgccatgggcctagagctgtttcttgacctggtgtcccagcccagccgcgccgtctacatcttcgccaagaagaatggcatccccttagagctgcgcaccgtggatttggtcaaagggcagcacaagagcaaggagttcttgcagatcaacagcctggggaaactgccgacgctcaaggatggtgatttcatcttgaccgaaagctcggccatcctgatttacctgagctgtaagtaccagacgccggaccactggtatccatctgacctgcaggctcgtgcccgtgttcatgagtacctgggctggcatgccgactgcatccgtggcacctttggtatacccctgtgggtccaggtgttggggccactcattggggtccaggtgcccgaggagaaggtggaacgcaacaggactgccatggaccaggccctgcaatggctggaggacaagttcctgggggacaggcccttcctcgctggccagcaggtgacactggctgatctcatggccctggaggagctgatgcagccggtggctctcggctacgaactgtttgagggacggccacgactggcagcatggcgtggacgagtggaggctttcctgggtgctgagctatgccaggaggcccacagcatcatcttgagcatcctggaacaggcggccaagaagccaggatcccctgaagggtctgggatgggggccaggagattagcaacaaggattcattctgttacttacttgcccctttttatctttccctcttgccccagtcccttctctccagcttcatgtgaagctctgcacagacaagacactcagtgtccttggcagtgctgctactcctcaggtgcagcatacataaccagtaagagactaaatctgcaatatataaagagctcctacaaatcagtaacatgaagaacactcaaaaattggcaaatgtcatcagtgttttaaacagaataaagattccaaacactttgaatagagaa

SEQ ID NO: 357933 - DNA, 534 bp, Homo sapiens
accgcgctcagcgccttcactgccatccccgctgtccttgccgcccccgccatgggcctagagctgtttcttgacctggtgtcccagcccagccgcgccgtctacatcttcgccaagaagaatggcatccccttagagctgcgcaccgtggatttggtcaaagggcagcacaagagcaaggagttcttgcagatcaacagcctggggaaactgccgacgctcaaggatggtgatttcatcttgaccgaaaggtgccctccttccctcacccctcaccgcatccggagcccatgtgaccttggctctccccactggccccgggccccagtggccctcccataccccatggggcagcgagggaggggaaaggcgagggatctggccgggcgcggtggctcacgcctgtcatcccggcacttcgggaggccaaggcgggcggatcacgaggtcaggagaccgagaccatcctggctaacaccgtgaaaccctgtctctactaaaaatggaaaaaaaagttaaccgggcgtggtggcg

SEQ ID NO: 357934 - DNA, 548 bp, Homo sapiens
  misc_feature (129)..(129): n is a, c, g, or t
  misc_feature (159)..(160): n is a, c, g, or t
atcccccccctttggggggggggggttttgggcctctttggtaaaaaaaagacctttaaaattggggcccccccccaagggggggaaaaggggggcccccccaaaccaaagggccaatttcccaattantcctctggggaagggcccaaaattcccccnnccttggaaacccaaccctcccaacaccctcaccagaggcctatcaggctatgctgcttcgaatcgccaggatcccctgaagggtctgggatgggggccaggagattagcaacaaggattcattctgttacttacttgcccctttttatctttccctcttgccccagtcccttctctccagcttcatgtgaagctctgcacagacaagacactcagtgtccttggcagtgctgctactcctcaggtgcagcatacataaccagtaagagactaaatctgcaatatataaagagctcctacaaatcagtaacatgaagaacactcaaaaattggcaaatgtcatcagtgttttaaacagaataaagattccaaacactttgaatagagaa

SEQ ID NO: 357935 - DNA, 1204 bp, Homo sapiens
accgcgctcagcgccttcactgccatccccgctgtccttgccgcccccgccatgggcctagagctgtttcttgacctggtgtcccagcccagccgcgccgtctacatcttcgccaagaagaatggcatccccttagagctgcgcaccgtggatttggtcaaagggcagcacaagagcaaggagttcttgcagatcaacagcctggggaaactgccgacgctcaaggatggtgatttcatcttgaccgaaagggcggctgctggcatatcacagagatgaggttctcaaaatgcaaagcagaaggtccagccaagagtcggtgcccaaggcaacaaagacaggaggagactcgtaggaggactcggccatcctgatttacctgagctgtaagtaccagacgccggaccactggtatccatctgacctgcaggctcgtgcccgtgttcatgagtacctgggctggcatgccgactgcatccgtggcacctttggtatacccctgtgggtccaggtgttggggccactcattggggtccaggtgcccgaggagaaggtggaacgcaacaggactgccatggaccaggccctgcaatggctggaggacaagttcctgggggacaggcccttcctcgctggccagcaggtgacactggctgatctcatggccctggaggagctgatgcagccggtggctctcggctacgaactgtttgagggacggccacgactggcagcatggcgtggacgagtggaggctttcctgggtgctgagctatgccaggaggcccacagcatcatcttgagcatcctggaacaggcggccaagaaaaccctcccaacaccctcaccagaggcctatcaggctatgctgcttcgaatcgccaggatcccctgaagggtctgggatgggggccaggagattagcaacaaggattcattctgttacttacttgcccctttttatctttccctcttgccccagtcccttctctccagcttcatgtgaagctctgcacagacaagacactcagtgtccttggcagtgctgctactcctcaggtgcagcatacataaccagtaagagactaaatctgcaatatataaagagctcctacaaatcagtaacatgaagaacactcaaaaattggcaaatgtcatcagtgttttaaacagaataaagattccaaacactttgaatagagaa

SEQ ID NO: 357936 - DNA, 458 bp, Homo sapiens
agcatcctggaacaggcggccaagaaaaccctcccaacaccctcaccagaggcctatcaggctatgctgcttcgaatcgccaggatcccctgaagggtctgggatgggggccaggagattagcaacaaggattcattctgttacttacttgcccctttttatctttccctcttgccccagtcccttctctccagcttcatgtgaagctctgcacagacaagacactcagtgtccttggcagtgctgctactcctcaggtgcagcatacataaccagtaagagactaaatctgcaatatataaagagctcctacaaatcagtaacatgaagaacactcaaaaattggcaaatgtcatcagtgttttaaacagaataaagattccaaacactttgaatagagaaccaagagttattggttttactacattgttgtgttatacatatggagtaaaagtatg

SEQ ID NO: 357937 - DNA, 1660 bp, Homo sapiens
actggcgggcgggatccctccgctctggggaggcagcgctggcggcggggctggggccactgaggaaatccatccgcgccgccgccgccgccgccgccgccgccgccgcctccgccgcggaggaagacagcgccgcccgcgcaccgccagcgacccccgccgcagagtcccaccgccacaggcctcgggccagcggccaggagctgcctcccccagcccccgtcccgcggcccccagccgcccccaaccctgccccacgggcccggcgccatgagtgagctggagcaactgagacaggaggccgagcagctccggaaccagatccgggatgcccgaaaagcatgtggggactcaacactgacccagatcacagctgggctggacccagtggggagaatccagatgaggacccggaggaccctccgtgggcacctggcaaagatctatgccatgcactgggggaccgactcaaggctgctggtcagcgcctcccaggatgggaagctcatcatctgggacagctacaccaccaacaaggtccacgccatcccgctgcgctcctcctgggtaatgacctgtgcctacgcgccctcagggaactttgtggcctgtggggggttggacaacatctgctccatctacagcctcaagacccgcgagggcaacgtcagggtcagccgggagctgcctggccacactgggtacctgtcgtgttgccgcttcctggatgacaaccaaatcatcaccagctctggggataccacctgtgccctgtgggacattgagacaggccagcagacagtgggttttgctggacacagtggggatgtgatgtccctgtccctggcccccgatggccgcacgtttgtgtcaggcgcctgtgatgcctctatcaagctgtgggacgtgcgggattccatgtgccgacagaccttcatcggccatgaatccgacatcaatgcagtggctttcttccccaacggctacgccttcaccaccggctctgacgacgccacgtgccgcctcttcgacctgcgggccgatcaggagctcctcatgtactcccatgacaacatcatctgtggcatcacctctgttgccttctcgcgcagcggacggctgctgctcgctggctacgacgacttcaactgcaacatctgggatgccatgaagggcgaccgtgcaggagtcctcgctggccacgacaaccgcgtgagctgcctcggggtcaccgacgatggcatggctgtggccacgggctcctgggactccttcctcaagatctggaactaatggccccacccccactgggcccaggccaggaggggccctgcccatgcccacactacaggccagggctgcggggctggcgcaatcccagcccccttccccgggccacggggccttgggtccctgccctcccacccaggtttggttcctcccggggcccccactgtggagataagaaggggatggaatgggggaagaggaggagcaggaggccctcatccttctgctgccctggggttggggcctcacccctctggagggccggaggcaggaggtggaaaccccaggggctggcttttttaaaactggttttattttaatttttattatattttcagtttttccataaaggagccaattccaactctgt

SEQ ID NO: 357938 - DNA, 330 bp, Homo sapiens
actggcgggcgggatccctccgctctggggaggcagcgctggcggcggggctggggccactgaggaaatccatccgcgccgccgccgccgccgccgccgccgccgccgcctccgccgcggaggaagacagcgccgcccgcgcaccgccagcgacccccgccgcagagtcccaccgccacaggcctcgggccagcggccaggagctgcctccccagggcggcgggcgcggtgcggaattggccacgcaggcgccgcaagaataaggacctgttatagttaccgggggtgcgactgaggagaggaagcagctgtagggagagaaggaggaat

SEQ ID NO: 357939 - DNA, 1718 bp, Homo sapiens
  misc_feature (1367)..(1367): n is a, c, g, or t
  misc_feature (1378)..(1378): n is a, c, g, or t
  misc_feature (1383)..(1384): n is a, c, g, or t
  misc_feature (1401)..(1401): n is a, c, g, or t
  misc_feature (1403)..(1403): n is a, c, g, or t
  misc_feature (1416)..(1416): n is a, c, g, or t
  misc_feature (1418)..(1418): n is a, c, g, or t
  misc_feature (1438)..(1438): n is a, c, g, or t
  misc_feature (1446)..(1446): n is a, c, g, or t
  misc_feature (1458)..(1459): n is a, c, g, or t
  misc_feature (1466)..(1466): n is a, c, g, or t
actggcgggcgggatccctccgctctggggaggcagcgctggcggcggggctggggccactgaggaaatccatccgcgccgccgccgccgccgccgccgccgccgccgcctccgccgcggaggaagacagcgccgcccgcgcaccgccagcgacccccgccgcagagtcccaccgccacaggcctcgggccagcggccaggagctgcctcccccagcccccgtcccgcggcccccagccgcccccaaccctgccccacgggcccggcgccatgagtgagctggagcaactgagacaggaggccgagcagctccggaaccagatccgggatgcccgaaaagcatgtggggactcaacactgacccagatcacagctgggctggacccagtggggagaatccagatgaggacccggaggaccctccgtgggcacctggcaaagatctatgccatgcactgggggaccgactcaaggctgctggtcagcgcctcccaggatgggaagctcatcatctgggacagctacaccaccaacaaggtccacgccatcccgctgcgctcctcctgggtaatgacctgtgcctacgcgccctcagggaactttgtggcctgtggggggttggacaacatctgctccatctacagcctcaagacccgcgagggcaacgtcagggtcagccgggagctgcctggccacactgggtacctgtcgtgttgccgcttcctggatgacaaccaaatcatcaccagctctggggataccacctgtgccctgtgggacattgagacaggtggtatcccctagagctggtgatgccacctgtgccctgtgggacattgagacaggccagcagacagtgggttttgctggacacagtggggatgtgatgtccctgtccctggcccccgatggccgcacgtttgtgtcaggcgcctgtgatgcctctatcaagctgtgggacgtgcgggattccatgtgccgacagaccttcatcggccatgaatccgacatcaatgcagtggctttcttccccaacggctacgccttcaccaccggctctgacgacgccacgtgccgcctcttcgacctgcgggccgatcaggagctcctcatgtactcccatgacaacatcatctgtggcatcacctctgttgccttctcgcgcagcggacggctgctgctcgctggctacgacgacttcaactgcaacatctgggatgccatgaagggcgaccgtgcaggagtcctcgctggccacgacaaccgcgtgagctgcctcggggtcaccgacgatggcatggctgtggccacgggctcctgggactccttcctcaagatctggaactaatggccccacccccacctcnccccaccccanccacnnccccccccccacccccncnccacaccccagcncncccccccccccccaaccccncccccccncccccccccccnnccccccncctccctgccctcccacccaggtttggttcctcccggggcccccactgtggagataagaaggggatggaatgggggaagaggaggagcaggaggccctcatccttctgctgccctggggttggggcctcacccctctggagggccggaggcaggaggtggaaaccccaggggctggcttttttaaaactggttttattttaatttttattatattttcagtttttccataaaggagccaattccaactctgt

SEQ ID NO: 357940 - DNA, 317 bp, Homo sapiens
cgccgccgcctccgccgcggaggaagacagcgccgcccgcgcaccgccagcgacccccgccgcagagtcccaccgccacaggtaccttcgctggcaaaaggagtcctctcgccccccagccccaatttcccccaggggaacctctcttccttcggtctcccggggctggcctcctgggagcggacgtaactccccagacctccgctcccttcccctcttgcccggtcgctcccaaacccggaaggggaactggggaaccctcgccccccaccgtgcgtgcgcttccccgcaccatcagcgaagtttttgcccgaccc

SEQ ID NO: 357941 - DNA, 1663 bp, Homo sapiens
  misc_feature (1312)..(1312): n is a, c, g, or t
  misc_feature (1323)..(1323): n is a, c, g, or t
  misc_feature (1328)..(1329): n is a, c, g, or t
  misc_feature (1346)..(1346): n is a, c, g, or t
  misc_feature (1348)..(1348): n is a, c, g, or t
  misc_feature (1361)..(1361): n is a, c, g, or t
  misc_feature (1363)..(1363): n is a, c, g, or t
  misc_feature (1383)..(1383): n is a, c, g, or t
  misc_feature (1391)..(1391): n is a, c, g, or t
  misc_feature (1403)..(1404): n is a, c, g, or t
  misc_feature (1411)..(1411): n is a, c, g, or t
actggcgggcgggatccctccgctctggggaggcagcgctggcggcggggctggggccactgaggaaatccatccgcgccgccgccgccgccgccgccgccgccgccgcctccgccgcggaggaagacagcgccgcccgcgcaccgccagcgacccccgccgcagagtcccaccgccacaggcctcgggccagcggccaggagctgcctcccccagcccccgtcccgcggcccccagccgcccccaaccctgccccacgggcccggcgccatgagtgagctggagcaactgagacaggaggccgagcagctccggaaccagatccgggatgcccgaaaagcatgtggggactcaacactgacccagatcacagctgggctggacccagtggggagaatccagatgaggacccggaggaccctccgtgggcacctggcaaagatctatgccatgcactgggggaccgactcaaggctgctggtcagcgcctcccaggatgggaagctcatcatctgggacagctacaccaccaacaaggtccacgccatcccgctgcgctcctcctgggtaatgacctgtgcctacgcgccctcagggaactttgtggcctgtggggggttggacaacatctgctccatctacagcctcaagacccgcgagggcaacgtcagggtcagccgggagctgcctggccacactgggtacctgtcgtgttgccgcttcctggatgacaaccaaatcatcaccagctctggggataccacctgtgccctgtgggacattgagacaggccagcagacagtgggttttgctggacacagtggggatgtgatgtccctgtccctggcccccgatggccgcacgtttgtgtcaggcgcctgtgatgcctctatcaagctgtgggacgtgcgggattccatgtgccgacagaccttcatcggccatgaatccgacatcaatgcagtggctttcttccccaacggctacgccttcaccaccggctctgacgacgccacgtgccgcctcttcgacctgcgggccgatcaggagctcctcatgtactcccatgacaacatcatctgtggcatcacctctgttgccttctcgcgcagcggacggctgctgctcgctggctacgacgacttcaactgcaacatctgggatgccatgaagggcgaccgtgcaggagtcctcgctggccacgacaaccgcgtgagctgcctcggggtcaccgacgatggcatggctgtggccacgggctcctgggactccttcctcaagatctggaactaatggccccacccccacctcnccccaccccanccacnnccccccccccacccccncnccacaccccagcncncccccccccccccaaccccncccccccncccccccccccnnccccccncctccctgccctcccacccaggtttggttcctcccggggcccccactgtggagataagaaggggatggaatgggggaagaggaggagcaggaggccctcatccttctgctgccctggggttggggcctcacccctctggagggccggaggcaggaggtggaaaccccaggggctggcttttttaaaactggttttattttaatttttattatattttcagtttttccataaaggagccaattccaactctgt

SEQ ID NO: 357942 - DNA, 1067 bp, Homo sapiens
  misc_feature (1020)..(1020): n is a, c, g, or t
  misc_feature (1043)..(1043): n is a, c, g, or t
actggcgggcgggatccctccgctctggggaggcagcgctggcggcggggctggggccactgaggaaatccatccgcgccgccgccgccgccgccgccgccgccgccgcctccgccgcggaggaagacagcgccgcccgcgcaccgccagcgacccccgccgcagagtcccaccgccacaggcctcgggccagcggccaggagctgcctcccccagcccccgtcccgcggcccccagccgcccccaaccctgccccacgggcccggcgccatgagtgagctggagcaactgagacaggaggccgagcagctccggaaccagatccgggatgcccgaaaagcatgtggggactcaacactgacccagatcacagctgggctggacccagtggggagaatccagatgaggacccggaggaccctccgtgggcacctggcaaagatctatgccatgcactgggggaccgactcaaggctgctggtcagcgcctcccaggatgggaagctcatcatctgggacagctacaccaccaacaaggtccacgccatcccgctgcgctcctcctgggtaatgacctgtgcctacgcgccctcagggaactttgtggcctgtggggggttggacaacatctgctccatctacagcctcaagacccgcgagggcaacgtcagggtcagccgggagctgcctggccacactgggtacctgtcgtgttgccgcttcctggatgacaaccaaatcatcaccagctctggggataccacctgtgccctgtgggacattgagacaggccagcagacagtgggttttgctggacacagtggggatgtgatgtccctgtccctggcccccgatggccgcacgtttgtgtcaggcgcctgtgatgcctctatcaagctgtgggacgtgcgggattccatgtgccgacagaccttcatcggccaattgaaatcccgaacatcaaatgccaagttggctttccttcccccaacgggctaacgcccttcaaccaaccgggcntcctgaaccgaacgccaacgttntcccgccctcctttccgaacccct

SEQ ID NO: 357943 - DNA, 788 bp, Homo sapiens
actggcgggcgggatccctccgctctggggaggcagcgctggcggcggggctggggccactgaggaaatccatccgcgccgccgccgccgccgccgccgccgccgccgcctccgccgcggaggaagacagcgccgcccgcgcaccgccagcgacccccgccgcagagtcccaccgccacaggcctcgggccagcggccaggagctgcctcccccagcccccgtcccgcggcccccagccgcccccaaccctgccccacgggcccggcgccatgagtgagctggagcaactgagacaggaggccgagcagctccggaaccagatccgggatgcccgaaaagcatgtggggactcaacactgacccagatcacagctgggctggacccagtggggagaatccagatgaggacccggaggaccctccgtgggcacctggcaaagatctatgccatgcactgggggaccgactcaaggctgctggtcagcgcctcccaggatgggaagctcatcatctgggacagctacaccaccaacaaggtccacgccatcccgctgcgctcctcctgggtaatgacctgtgcctacgcgccctcagggaactttgtggcctgtggggggttggacaacatctgctccatctacagcctcaagacccgcgagggcaacgtcagggtcagccgggagctgcctggccacactgggtacctgtcgtttccgcttcctggatgacaccaaatcaccagctctgggtcagatgtgccgggatcctctagatcaccgcagcacca

SEQ ID NO: 357944 - DNA, 417 bp, Homo sapiens
tctctgcatgaccctgttacttttctaagacttagttccctaatttttaaaagggtggtaatattatatctacattgtagaagtaagtgtaaacaggaaatattggttagctctttagaacagtatctggcactttgaacacacttaacaactgttagctattgttaaagctgctactattattaatgttaaattatataggattagttcatatccccctattatacccctctttatgtcaaaagcttttactgacactgaaatgagctgggtgaacttagaattgctgatagttgctgatagttacattattgtatatgtgtagaaggaaccggaagacctgggcttttattctgatcccttcgcttttcaactgtgttaccttgcacacgtttcttcacatctctgaacttcatt

SEQ ID NO: 357945 - DNA, 244 bp, Homo sapiens
gtaccaccacgcccagctaattattgtaatttttttagagcgggggttttgtcatattggccaggctagtctcaaactcctggcctcatgtgatccaccgtcggcctactaaagtgctgggattacaggcaatgagccactgtgcctggccaaaaattccgttttctgattgttgctggtacatggtcacattattggttttacatattgatcttacactcagcaactcttttttgaactcttt

SEQ ID NO: 357946 - DNA, 2424 bp, Homo sapiens
tgctttatagcgtgcaaacctcgccgcgccagggccaagggacaggttggagctgttgatctgttgcgcaattgctattttccccagagcggctttgtctttggatttagcgtttcagaattgcaattccaaaatgtgtaagacgggatattctcttctgtgctgtcaagggacatggatttgattgacatactttggaggcaagatatagatcttggagtaagtcgagaagtatttgacttcagtcagcgacggaaagagtatgagctggaaaaacagaaaaaacttgaaaaggaaagacaagaacaactccaaaaggagcaagagaaagcctttttcgctcagttacaactagatgaagagacaggtgaatttctcccaattcagccagcccagcacatccagtcagaaaccagtggatctgccaactactcccaggttgcccacattcccaaatcagatgctttgtactttgatgactgcatgcagcttttggcgcagacattcccgtttgtagatgacaatgaggtttcttcggctacgtttcagtcacttgttcctgatattcccggtcacatcgagagcccagtcttcattgctactaatcaggctcagtcacctgaaacttctgttgctcaggtagcccctgttgatttagacggtatgcaacaggacattgagcaagtttgggaggagctattatccattcctgagttacagtgtcttaatattgaaaatgacaagctggttgagactaccatggttccaagtccagaagccaaactgacagaagttgacaattatcatttttactcatctataccctcaatggaaaaagaagtaggtaactgtagtccacattttcttaatgcttttgaggattccttcagcagcatcctctccacagaagaccccaaccagttgacagtgaactcattaaattcagatgccacagtcaacacagattttggtgatgaattttattctgctttcatagctgagcccagtatcagcaacagcatgccctcacctgctactttaagccattcactctctgaacttctaaatgggcccattgatgtttctgatctatcactttgcaaagctttcaaccaaaaccaccctgaaagcacagcagaattcaatgattctgactccggcatttcactaaacacaagtcccagtgtggcatcaccagaacactcagtggaatcttccagctatggagacacactacttggcctcagtgattctgaagtggaagagctagatagtgcccctggaagtgtcaaacagaatggtcctaaaacaccagtacattcttctggggatatggtacaacccttgtcaccatctcaggggcagagcactcacgtgcatgatgcccaatgtgagaacacaccagagaaagaattgcctgtaagtcctggtcatcggaaaaccccattcacaaaagacaaacattcaagccgcttggaggctcatctcacaagagatgaacttagggcaaaagctctccatatcccattccctgtagaaaaaatcattaacctccctgttgttgacttcaacgaaatgatgtccaaagagcagttcaatgaagctcaacttgcattaattcgggatatacgtaggaggggtaagaataaagtggctgctcagaattgcagaaaaagaaaactggaaaatatagtagaactagagcaagatttagatcatttgaaagatgaaaaagaaaaattgctcaaagaaaaaggagaaaatgacaaaagccttcacctactgaaaaaacaactcagcaccttatatctcgaagttttcagcatgctacgtgatgaagatggaaaaccttattctcctagtgaatactccctgcagcaaacaagagatggcaatgttttccttgttcccaaaagtaagaagccagatgttaagaaaaactagatttaggaggatttgaccttttctgagctagtttttttgtactattatactaaaagctcctactgtgatgtgaaatgctcatactttataagtaattctatgcaaaatcatagccaaaactagtatagaaaataatacgaaactttaaaaagcattggagtgtcagtatgttgaatcagtagtttcactttaactgtaaacaatttcttaggacaccatttgggctagtttctgtgtaagtgtaaatactacaaaaacttatttatactgttcttatgtcatttgttatattcatagatttatatgatgatatgacatctggctaaaaagaaattattgcaaaactaaccactatgtacttttttataaatactgtatggacaaaaaatggcattttttatattaaattgtttagctctggcaaaaaaaaaaaattttaagagctggtactaataaaggattattatgactgttaaatta

SEQ ID NO: 357947 - DNA, 2666 bp, Homo sapiens
agttttttaagcacaatagcaaaaccatcagctctgtattttctcctgttatttcattacagtagctgcttgtgggaactaggaaaaattcttccaacatattttaaggcctaaaatcttagttccccattctcctaccttatagattcacaggcctttctcgcctaggcatcatagataaacgtaattgtttggggagttgaatttaatgaacttatctaactttgtaacccatcttggctttagtaactttatcaaggtggtggctttagtgaatataatggtaaactttagaggacgctaaagcctccttttatagcgctcctcaacggtagggagagctgaagggaaaacattctgactgtgtggcagggtgattttcttccttatgaccacttacagtggatatttattgtcaacacacggtccacagctcatcatgatggacttggagctgccgccgccgggactcccgtcccagcaggacatggatttgattgacatactttggaggcaagatatagatcttggagtaagtcgagaagtatttgacttcagtcagcgacggaaagagtatgagctggaaaaacagaaaaaacttgaaaaggaaagacaagaacaactccaaaaggagcaagagaaagcctttttcgctcagttacaactagatgaagagacaggttgcccacattcccaaatcagatgctttgtactttgatgactgcatgcagcttttggcgcagacattcccgtttgtagatgacaatgaggtttcttcggctacgtttcagtcacttgttcctgatattcccggtcacatcgagagcccagtcttcattgctactaatcaggctcagtcacctgaaacttctgttgctcaggtagcccctgttgatttagacggtatgcaacaggacattgagcaagtttgggaggagctattatccattcctgagttacagtgtcttaatattgaaaatgacaagctggttgagactaccatggttccaagtccagaagccaaactgacagaagttgacaattatcatttttactcatctataccctcaatggaaaaagaagtaggtaactgtagtccacattttcttaatgcttttgaggattccttcagcagcatcctctccacagaagaccccaaccagttgacagtgaactcattaaattcagatgccacagtcaacacagattttggtgatgaattttattctgctttcatagctgagcccagtatcagcaacagcatgccctcacctgctactttaagccattcactctctgaacttctaaatgggcccattgatgtttctgatctatcactttgcaaagctttcaaccaaaaccaccctgaaagcacagcagaattcaatgattctgactccggcatttcactaaacacaagtcccagtgtggcatcaccagaacactcagtggaatcttccagctatggagacacactacttggcctcagtgattctgaagtggaagagctagatagtgcccctggaagtgtcaaacagaatggtcctaaaacaccagtacattcttctggggatatggtacaacccttgtcaccatctcaggggcagagcactcacgtgcatgatgcccaatgtgagaacacaccagagaaagaattgcctgtaagtcctggtcatcggaaaaccccattcacaaaagacaaacattcaagccgcttggaggctcatctcacaagagatgaacttagggcaaaagctctccatatcccattccctgtagaaaaaatcattaacctccctgttgttgacttcaacgaaatgatgtccaaagagcagttcaatgaagctcaacttgcattaattcgggatatacgtaggaggggtaagaataaagtggctgctcagaattgcagaaaaagaaaactggaaaatatagtagaactagagcaagatttagatcatttgaaagatgaaaaagaaaaattgctcaaagaaaaaggagaaaatgacaaaagccttcacctactgaaaaaacaactcagcaccttatatctcgaagttttcagcatgctacgtgatgaagatggaaaaccttattctcctagtgaatactccctgcagcaaacaagagatggcaatgttttccttgttcccaaaagtaagaagccagatgttaagaaaaactagatttaggaggatttgaccttttctgagctagtttttttgtactattatactaaaagctcctactgtgatgtgaaatgctcatactttataagtaattctatgcaaaatcatagccaaaactagtatagaaaataatacgaaactttaaaaagcattggagtgtcagtatgttgaatcagtagtttcactttaactgtaaacaatttcttaggacaccatttgggctagtttctgtgtaagtgtaaatactacaaaaacttatttatactgttcttatgtcatttgttatattcatagatttatatgatgatatgacatctggctaaaaagaaattattgcaaaactaaccactatgtacttttttataaatactgtatggacaaaaaatggcattttttatattaaattgtttagctctggcaaaaaaaaaaaattttaagagctggtactaataaaggattattatgactgttaaatta

SEQ ID NO: 357948 - DNA, 2472 bp, Homo sapiens
agcggaggggccggactcttgccccgcccttgtggggcgggaggcggagcggggcaggggcccgccggcgtgtagccgattaccgagtgccggggagcccggaggagccgccgacgcagccgccaccgccgccgccgccgccaccagagccgccctgtccgcgccgcgcctcggcagccggaacagggccgccgtcggggagccccaacacacggtccacagctcatcatgatggacttggagctgccgccgccgggactcccgtcccagcaggacatggatttgattgacatactttggaggcaagatatagatcttggagtaagtcgagaagtatttgacttcagtcagcgacggaaagagtatgagctggaaaaacagaaaaaacttgaaaaggaaagacaagaacaactccgtgaatttctcccaattcagccagcccagcacatccagtcagaaaccagtggatctgccaactactcccaggttgcccacattcccaaatcagatgctttgtactttgatgactgcatgcagcttttggcgcagacattcccgtttgtagatgacaatgaggtttcttcggctacgtttcagtcacttgttcctgatattcccggtcacatcgagagcccagtcttcattgctactaatcaggctcagtcacctgaaacttctgttgctcaggtagcccctgttgatttagacggtatgcaacaggacattgagcaagtttgggaggagctattatccattcctgagttacagtgtcttaatattgaaaatgacaagctggttgagactaccatggttccaagtccagaagccaaactgacagaagttgacaattatcatttttactcatctataccctcaatggaaaaagaagtaggtaactgtagtccacattttcttaatgcttttgaggattccttcagcagcatcctctccacagaagaccccaaccagttgacagtgaactcattaaattcagatgccacagtcaacacagattttggtgatgaattttattctgctttcatagctgagcccagtatcagcaacagcatgccctcacctgctactttaagccattcactctctgaacttctaaatgggcccattgatgtttctgatctatcactttgcaaagctttcaaccaaaaccaccctgaaagcacagcagaattcaatgattctgactccggcatttcactaaacacaagtcccagtgtggcatcaccagaacactcagtggaatcttccagctatggagacacactacttggcctcagtgattctgaagtggaagagctagatagtgcccctggaagtgtcaaacagaatggtcctaaaacaccagtacattcttctggggatatggtacaacccttgtcaccatctcaggggcagagcactcacgtgcatgatgcccaatgtgagaacacaccagagaaagaattgcctgtaagtcctggtcatcggaaaaccccattcacaaaagacaaacattcaagccgcttggaggctcatctcacaagagatgaacttagggcaaaagctctccatatcccattccctgtagaaaaaatcattaacctccctgttgttgacttcaacgaaatgatgtccaaagagcagttcaatgaagctcaacttgcattaattcgggatatacgtaggaggggtaagaataaagtggctgctcagaattgcagaaaaagaaaactggaaaatatagtagaactagagcaagatttagatcatttgaaagatgaaaaagaaaaattgctcaaagaaaaaggagaaaatgacaaaagccttcacctactgaaaaaacaactcagcaccttatatctcgaagttttcagcatgctacgtgatgaagatggaaaaccttattctcctagtgaatactccctgcagcaaacaagagatggcaatgttttccttgttcccaaaagtaagaagccagatgttaagaaaaactagatttaggaggatttgaccttttctgagctagtttttttgtactattatactaaaagctcctactgtgatgtgaaatgctcatactttataagtaattctatgcaaaatcatagccaaaactagtatagaaaataatacgaaactttaaaaagcattggagtgtcagtatgttgaatcagtagtttcactttaactgtaaacaatttcttaggacaccatttgggctagtttctgtgtaagtgtaaatactacaaaaacttatttatactgttcttatgtcatttgttatattcatagatttatatgatgatatgacatctggctaaaaagaaattattgcaaaactaaccactatgtacttttttataaatactgtatggacaaaaaatggcattttttatattaaattgtttagctctggcaaaaaaaaaaaattttaagagctggtactaataaaggattattatgactgttaaatta

SEQ ID NO: 357949 - DNA, 3403 bp, Homo sapiens
agttttttaagcacaatagcaaaaccatcagctctgtattttctcctgttatttcattacagtagctgcttgtgggaactaggaaaaattcttccaacatattttaaggcctaaaatcttagttccccattctcctaccttatagattcacaggcctttctcgcctaggcatcatagataaacgtaattgtttggggagttgaatttaatgaacttatctaactttgtaacccatcttggctttagtaactttatcaaggtggtggctttagtgaatataatggtaaactttagaggacgctaaagcctccttttatagcgctcctcaacggtagggagagctgaagggaaaacattctgactgtgtggcagggtgattttcttccttatgaccacttacagtggatatttattgtcaacacacggtccacagctcatcatgatggacttggagctgccgccgccgggactcccgtcccagcaggacatggatttgattgacatactttggaggcaagatatagatcttggagtaagtcgagaagtatttgacttcagtcagcgacggaaagagtatgagctggaaaaacagaaaaaacttgaaaaggaaagacaagaacaactccaaaaggagcaagagaaagcctttttcgctcagttacaactagatgaagagacaggtgaatttctcccaattcagccagcccagcacatccagtcagaaaccagtggatctgccaactactcccaggttgcccacattcccaaatcagatgctttgtactttgatgactgcatgcagcttttggcgcagacattcccgtttgtagatgacaatgaggtgaggtataaaataacctggttaatagaaaaactccatcataactataaaataacaatctattctatgtaagtcccgtcaatgaatctccatttaaaagaataaaaacatttttaggaggaaattttttaaccaaggaaatactcttgtcaaggaaaccttagcctataaataactttacaattaagaaaaaaaaaaacccttcacacaatacaaaaccaaaaccattgactattgcatagccagaaacatggacagcataaccatggaaacaaataacccatttgctgcaagtatctaagaggtttggtgagtaaagagccagctgggcaataaacgaagacttgttcagttaacaattttaataaatctgttttatctagtaccactgtgctagatattatataaactaaatcctaaagattgtacttacgcattttaaagtttactttcaaatgcttaagctgaaacagaccagcaaattataaatttgagtcagtggggtaggaaaaaaagatttgttatttacaaacggggtcatgactggttagtaagtagagagacacagaactgcagctgattccattttgttttgtagtggtgccttagagcttactcatcccctgttggtggaagactcataaatcaatgccttatcaattttaggtttcttcggctacgtttcagtcacttgttcctgatattcccggtcacatcgagagcccagtcttcattgctactaatcaggctcagtcacctgaaacttctgttgctcaggtagcccctgttgatttagacggtatgcaacaggacattgagcaagtttgggaggagctattatccattcctgagttacagtgtcttaatattgaaaatgacaagctggttgagactaccatggttccaagtccagaagccaaactgacagaagttgacaattatcatttttactcatctataccctcaatggaaaaagaagtaggtaactgtagtccacattttcttaatgcttttgaggattccttcagcagcatcctctccacagaagaccccaaccagttgacagtgaactcattaaattcagatgccacagtcaacacagattttggtgatgaattttattctgctttcatagctgagcccagtatcagcaacagcatgccctcacctgctactttaagccattcactctctgaacttctaaatgggcccattgatgtttctgatctatcactttgcaaagctttcaaccaaaaccaccctgaaagcacagcagaattcaatgattctgactccggcatttcactaaacacaagtcccagtgtggcatcaccagaacactcagtggaatcttccagctatggagacacactacttggcctcagtgattctgaagtggaagagctagatagtgcccctggaagtgtcaaacagaatggtcctaaaacaccagtacattcttctggggatatggtacaacccttgtcaccatctcaggggcagagcactcacgtgcatgatgcccaatgtgagaacacaccagagaaagaattgcctgtaagtcctggtcatcggaaaaccccattcacaaaagacaaacattcaagccgcttggaggctcatctcacaagagatgaacttagggcaaaagctctccatatcccattccctgtagaaaaaatcattaacctccctgttgttgacttcaacgaaatgatgtccaaagagcagttcaatgaagctcaacttgcattaattcgggatatacgtaggaggggtaagaataaagtggctgctcagaattgcagaaaaagaaaactggaaaatatagtagaactagagcaagatttagatcatttgaaagatgaaaaagaaaaattgctcaaagaaaaaggagaaaatgacaaaagccttcacctactgaaaaaacaactcagcaccttatatctcgaagttttcagcatgctacgtgatgaagatggaaaaccttattctcctagtgaatactccctgcagcaaacaagagatggcaatgttttccttgttcccaaaagtaagaagccagatgttaagaaaaactagatttaggaggatttgaccttttctgagctagtttttttgtactattatactaaaagctcctactgtgatgtgaaatgctcatactttataagtaattctatgcaaaatcatagccaaaactagtatagaaaataatacgaaactttaaaaagcattggagtgtcagtatgttgaatcagtagtttcactttaactgtaaacaatttcttaggacaccatttgggctagtttctgtgtaagtgtaaatactacaaaaacttatttatactgttcttatgtcatttgttatattcatagatttatatgatgatatgacatctggctaaaaagaaattattgcaaaactaaccactatgtacttttttataaatactgtatggacaaaaaatggcattttttatattaaattgtttagctctggcaaaaaaaaaaaattttaagagctggtactaataaaggattattatgactgttaaatta

SEQ ID NO: 357950 - DNA, 2548 bp, Homo sapiens
agcggaggggccggactcttgccccgcccttgtggggcgggaggcggagcggggcaggggcccgccggcgtgtagccgattaccgagtgccggggagcccggaggagccgccgacgcagccgccaccgccgccgccgccgccaccagagccgccctgtccgcgccgcgcctcggcagccggaacagggccgccgtcggggagccccaacacacggtccacagctcatcatgatggacttggagctgccgccgccgggactcccgtcccagcaggacatggatttgattgacatactttggaggcaagatatagatcttggagtaagtcgagaagtatttgacttcagtcagcgacggaaagagtatgagctggaaaaacagaaaaaacttgaaaaggaaagacaagaacaactccaaaaggagcaagagaaagcctttttcgctcagttacaactagatgaagagacaggtgaatttctcccaattcagccagcccagcacatccagtcagaaaccagtggatctgccaactactcccaggttgcccacattcccaaatcagatgctttgtactttgatgactgcatgcagcttttggcgcagacattcccgtttgtagatgacaatgaggtttcttcggctacgtttcagtcacttgttcctgatattcccggtcacatcgagagcccagtcttcattgctactaatcaggctcagtcacctgaaacttctgttgctcaggtagcccctgttgatttagacggtatgcaacaggacattgagcaagtttgggaggagctattatccattcctgagttacagtataaacttccttctcatgcagtgtcttaatattgaaaatgacaagctggttgagactaccatggttccaagtccagaagccaaactgacagaagttgacaattatcatttttactcatctataccctcaatggaaaaagaagtaggtaactgtagtccacattttcttaatgcttttgaggattccttcagcagcatcctctccacagaagaccccaaccagttgacagtgaactcattaaattcagatgccacagtcaacacagattttggtgatgaattttattctgctttcatagctgagcccagtatcagcaacagcatgccctcacctgctactttaagccattcactctctgaacttctaaatgggcccattgatgtttctgatctatcactttgcaaagctttcaaccaaaaccaccctgaaagcacagcagaattcaatgattctgactccggcatttcactaaacacaagtcccagtgtggcatcaccagaacactcagtggaatcttccagctatggagacacactacttggcctcagtgattctgaagtggaagagctagatagtgcccctggaagtgtcaaacagaatggtcctaaaacaccagtacattcttctggggatatggtacaacccttgtcaccatctcaggggcagagcactcacgtgcatgatgcccaatgtgagaacacaccagagaaagaattgcctgtaagtcctggtcatcggaaaaccccattcacaaaagacaaacattcaagccgcttggaggctcatctcacaagagatgaacttagggcaaaagctctccatatcccattccctgtagaaaaaatcattaacctccctgttgttgacttcaacgaaatgatgtccaaagagcagttcaatgaagctcaacttgcattaattcgggatatacgtaggaggggtaagaataaagtggctgctcagaattgcagaaaaagaaaactggaaaatatagtagaactagagcaagatttagatcatttgaaagatgaaaaagaaaaattgctcaaagaaaaaggagaaaatgacaaaagccttcacctactgaaaaaacaactcagcaccttatatctcgaagttttcagcatgctacgtgatgaagatggaaaaccttattctcctagtgaatactccctgcagcaaacaagagatggcaatgttttccttgttcccaaaagtaagaagccagatgttaagaaaaactagatttaggaggatttgaccttttctgagctagtttttttgtactattatactaaaagctcctactgtgatgtgaaatgctcatactttataagtaattctatgcaaaatcatagccaaaactagtatagaaaataatacgaaactttaaaaagcattggagtgtcagtatgttgaatcagtagtttcactttaactgtaaacaatttcttaggacaccatttgggctagtttctgtgtaagtgtaaatactacaaaaacttatttatactgttcttatgtcatttgttatattcatagatttatatgatgatatgacatctggctaaaaagaaattattgcaaaactaaccactatgtacttttttataaatactgtatggacaaaaaatggcattttttatattaaattgtttagctctggcaaaaaaaaaaaattttaagagctggtactaataaaggattattatgactgttaaatta

SEQ ID NO: 357951 - DNA, 3090 bp, Homo sapiens
tgctttatagcgtgcaaacctcgccgcgccagggccaagggacaggttggagctgttgatctgttgcgcaattgctattttccccagagcggctttgtctttggatttagcgtttcagaattgcaattccaaaatgtgtaagacgggatattctcttctgtgctgtcaagggacatggatttgattgacatactttggaggcaagatatagatcttggagtaagtcgagaagtatttgacttcagtcagcgacggaaagagtatgagctggaaaaacagaaaaaacttgaaaaggaaagacaagaacaactccaaaaggagcaagagaaagcctttttcgctcagttacaactagatgaagagacaggtgaatttctcccaattcagccagcccagcacatccagtcagaaaccagtggatctgccaactactcccaggttgcccacattcccaaatcagatgctttgtactttgatgactgcatgcagcttttggcgcagacattcccgtttgtagatgacaatgaggtgaggtataaaataacctggttaatagaaaaactccatcataactataaaataacaatctattctatgtaagtcccgtcaatgaatctccatttaaaagaataaaaacatttttaggaggaaattttttaaccaaggaaatactcttgtcaaggaaaccttagcctataaataactttacaattaagaaaaaaaaaaacccttcacacaatacaaaaccaaaaccattgactattgcatagccagaaacatggacagcataaccatggaaacaaataacccatttgctgcaagtatctaagaggtttggtgagtaaagagccagctgggcaataaacgaagacttgttcagttaacaattttaataaatctgttttatctagtaccactgtgctagatattatataaactaaatcctaaagattgtacttacgcattttaaagtttactttcaaatgcttaagctgaaacagaccagcaaattataaatttgagtcagtggggtaggaaaaaaagatttgttatttacaaacggggtcatgactggttagtaagtagagagacacagaactgcagctgattccattttgttttgtagtggtgccttagagcttactcatcccctgttggtggaagactcataaatcaatgccttatcaattttaggtttcttcggctacgtttcagtcacttgttcctgatattcccggtcacatcgagagcccagtcttcattgctactaatcaggctcagtcacctgaaacttctgttgctcaggtagcccctgttgatttagacggtatgcaacaggacattgagcaagtttgggaggagctattatccattcctgagttacagtgtcttaatattgaaaatgacaagctggttgagactaccatggttccaagtccagaagccaaactgacagaagttgacaattatcatttttactcatctataccctcaatggaaaaagaagtaggtaactgtagtccacattttcttaatgcttttgaggattccttcagcagcatcctctccacagaagaccccaaccagttgacagtgaactcattaaattcagatgccacagtcaacacagattttggtgatgaattttattctgctttcatagctgagcccagtatcagcaacagcatgccctcacctgctactttaagccattcactctctgaacttctaaatgggcccattgatgtttctgatctatcactttgcaaagctttcaaccaaaaccaccctgaaagcacagcagaattcaatgattctgactccggcatttcactaaacacaagtcccagtgtggcatcaccagaacactcagtggaatcttccagctatggagacacactacttggcctcagtgattctgaagtggaagagctagatagtgcccctggaagtgtcaaacagaatggtcctaaaacaccagtacattcttctggggatatggtacaacccttgtcaccatctcaggggcagagcactcacgtgcatgatgcccaatgtgagaacacaccagagaaagaattgcctgtaagtcctggtcatcggaaaaccccattcacaaaagacaaacattcaagccgcttggaggctcatctcacaagagatgaacttagggcaaaagctctccatatcccattccctgtagaaaaaatcattaacctccctgttgttgacttcaacgaaatgatgtccaaagagcagttcaatgaagctcaacttgcattaattcgggatatacgtaggaggggtaagaataaagtggctgctcagaattgcagaaaaagaaaactggaaaatatagtagaactagagcaagatttagatcatttgaaagatgaaaaagaaaaattgctcaaagaaaaaggagaaaatgacaaaagccttcacctactgaaaaaacaactcagcaccttatatctcgaagttttcagcatgctacgtgatgaagatggaaaaccttattctcctagtgaatactccctgcagcaaacaagagatggcaatgttttccttgttcccaaaagtaagaagccagatgttaagaaaaactagatttaggaggatttgaccttttctgagctagtttttttgtactattatactaaaagctcctactgtgatgtgaaatgctcatactttataagtaattctatgcaaaatcatagccaaaactagtatagaaaataatacgaaactttaaaaagcattggagtgtcagtatgttgaatcagtagtttcactttaactgtaaacaatttcttaggacaccatttgggctagtttctgtgtaagtgtaaatactacaaaaacttatttatactgttcttatgtcatttgttatattcatagatttatatgatgatatgacatctggctaaaaagaaattattgcaaaactaaccactatgtacttttttataaatactgtatggacaaaaaatggcattttttatattaaattgtttagctctggcaaaaaaaaaaaattttaagagctggtactaataaaggattattatgactgttaaatta

SEQ ID NO: 357952 - DNA, 2436 bp, Homo sapiens
agcggaggggccggactcttgccccgcccttgtggggcgggaggcggagcggggcaggggcccgccggcgtgtagccgattaccgagtgccggggagcccggaggagccgccgacgcagccgccaccgccgccgccgccgccaccagagccgccctgtccgcgccgcgcctcggcagccggaacagggccgccgtcggggagccccaacacacggtccacagctcatcatgatggacttggagctgccgccgccgggactcccgtcccagcaggacatggatttgattgacatactttggaggcaagatatagatcttggagtaagtcgagaagtatttgacttcagtcagcgacggaaagagtatgagctggaaaaacagaaaaaacttgaaaaggaaagacaagaacaactccaaaaggagcaagagaaagcctttttcgctcagttacaactagatgaagagacaggtgaatttctcccaattcagccagcccagcacatccagtcagaaaccagtggatctgccaactactcccaggtttcttcggctacgtttcagtcacttgttcctgatattcccggtcacatcgagagcccagtcttcattgctactaatcaggctcagtcacctgaaacttctgttgctcaggtagcccctgttgatttagacggtatgcaacaggacattgagcaagtttgggaggagctattatccattcctgagttacagtgtcttaatattgaaaatgacaagctggttgagactaccatggttccaagtccagaagccaaactgacagaagttgacaattatcatttttactcatctataccctcaatggaaaaagaagtaggtaactgtagtccacattttcttaatgcttttgaggattccttcagcagcatcctctccacagaagaccccaaccagttgacagtgaactcattaaattcagatgccacagtcaacacagattttggtgatgaattttattctgctttcatagctgagcccagtatcagcaacagcatgccctcacctgctactttaagccattcactctctgaacttctaaatgggcccattgatgtttctgatctatcactttgcaaagctttcaaccaaaaccaccctgaaagcacagcagaattcaatgattctgactccggcatttcactaaacacaagtcccagtgtggcatcaccagaacactcagtggaatcttccagctatggagacacactacttggcctcagtgattctgaagtggaagagctagatagtgcccctggaagtgtcaaacagaatggtcctaaaacaccagtacattcttctggggatatggtacaacccttgtcaccatctcaggggcagagcactcacgtgcatgatgcccaatgtgagaacacaccagagaaagaattgcctgtaagtcctggtcatcggaaaaccccattcacaaaagacaaacattcaagccgcttggaggctcatctcacaagagatgaacttagggcaaaagctctccatatcccattccctgtagaaaaaatcattaacctccctgttgttgacttcaacgaaatgatgtccaaagagcagttcaatgaagctcaacttgcattaattcgggatatacgtaggaggggtaagaataaagtggctgctcagaattgcagaaaaagaaaactggaaaatatagtagaactagagcaagatttagatcatttgaaagatgaaaaagaaaaattgctcaaagaaaaaggagaaaatgacaaaagccttcacctactgaaaaaacaactcagcaccttatatctcgaagttttcagcatgctacgtgatgaagatggaaaaccttattctcctagtgaatactccctgcagcaaacaagagatggcaatgttttccttgttcccaaaagtaagaagccagatgttaagaaaaactagatttaggaggatttgaccttttctgagctagtttttttgtactattatactaaaagctcctactgtgatgtgaaatgctcatactttataagtaattctatgcaaaatcatagccaaaactagtatagaaaataatacgaaactttaaaaagcattggagtgtcagtatgttgaatcagtagtttcactttaactgtaaacaatttcttaggacaccatttgggctagtttctgtgtaagtgtaaatactacaaaaacttatttatactgttcttatgtcatttgttatattcatagatttatatgatgatatgacatctggctaaaaagaaattattgcaaaactaaccactatgtacttttttataaatactgtatggacaaaaaatggcattttttatattaaattgtttagctctggcaaaaaaaaaaaattttaagagctggtactaataaaggattattatgactgttaaatta

SEQ ID NO: 357953 - DNA, 1773 bp, Homo sapiens
agcggaggggccggactcttgccccgcccttgtggggcgggaggcggagcggggcaggggcccgccggcgtgtagccgattaccgagtgccggggagcccggaggagccgccgacgcagccgccaccgccgccgccgccgccaccagagccgccctgtccgcgccgcgcctcggcagccggaacagggccgccgtcggggagccccaacacacggtccacagctcatcatgatggacttggagctgccgccgccgggactcccgtcccagcaggacatggatttgattgacatactttggaggcaagatatagatcttggagtaagtcgagaagtatttgacttcagtcagcgacggaaagagtatgagctggaaaaacagaaaaaacttgaaaaggaaagacaagaacaactccaaaaggagcaagagaaagcctttttcgctcagttacaactagatgaagagacaggtgaatttctcccaattcagccagcccagcacatccagtcagaaaccagtggatctgccaactactcccaggttgcccacattcccaaatcagatgctttgtactttgatgactgcatgcagcttttggcgcagacattcccgtttgtagatgacaatgaggtttcttcggctacgtttcagtcacttgttcctgatattcccggtcacatcgagagcccagtcttcattgctactaatcaggctcagtcacctgaaacttctgttgctcaggtagcccctgttgatttagacggtatgcaacaggacattgagcaagtttgggaggagctattatccattcctgagttacagtgtcttaatattgaaaatgacaagctggttgagactaccatggttccaagtccagaagccaaactgacagaagttgacaattatcatttttactcatctataccctcaatggaaaaagaagtaggtaactgtagtccacattttcttaatgcttttgaggattccttcagcagcatcctctccacagaagaccccaaccagttgacagtgaactcattaaattcagatgccacagtcaacacagattttggtgatgaattttattctgctttcatagctgagcccagtatcagcaacagcatgccctcacctgctactttaagccattcactctctgaacttctaaatgggcccattgatgtttctgatctatcactttgcaaagctttcaaccaaaaccaccctgaaagcacagcagaattcaatgattctgactccggcatttcactaaacacaagtcccagtgtggcatcaccagaacactcagtggaatcttccagctatggagacacactacttggcctcagtgattctgaagtggaagagctagatagtgcccctggaagtgtcaaacagaatggtcctaaaacaccagtacattcttctggggatatggtacaacccttgtcaccatctcaggggcagagcactcacgtgcatgatgcccaatgtgagaacacaccagagaaagaattgcctgtaagtcctggtcatcggaaaaccccattcacaaaagacaaacattcaagccgcttggaggctcatctcacaagagatgaacttagggcaaaagctctccatatcccattccctgtagaaaaaatcattaacctccctgttgttgacttcaacgaaatgatgtccaaagagcagttcaatgaagctcaacttgcattaattcgggatatacgtaggaggggtaagaataaagtggctgctcagaattgcaga

SEQ ID NO: 357954 - DNA, 1331 bp, Homo sapiens
agcggaggggccggactcttgccccgcccttgtggggcgggaggcggagcggggcaggggcccgccggcgtgtagccgattaccgagtgccggggagcccggaggagccgccgacgcagccgccaccgccgccgccgccgccaccagagccgccctgtccgcgccgcgcctcggcagccggaacagggccgccgtcggggagccccaacacacggtccacagctcatcatgatggacttggagctgccgccgccgggactcccgtcccagcaggacatggatttgattgacatactttggaggcaagatatagatcttggagtaagtcgagaagtatttgacttcagtcagcgacggaaagagtatgagctggaaaaacagaaaaaacttgaaaaggaaagacaagaacaactccaaaaggagcaagagaaagcctttttcgctcagttacaactagatgaagagacaggtgaatttctcccaattcagccagcccagcacatccagtcagaaaccagtggatctgccaactactcccaggttgcccacattcccaaatcagatgctttgtactttgatgactgcatgcagcttttggcgcagacattcccgtttgtagatgacaatgaggtttcttcggctacgtttcagtcacttgttcctgatattcccggtcacatcgagagcccagtcttcattgctactaatcaggctcagtcacctgaaacttctgttgctcaggtagcccctgttgatttagacggtatgcaacaggacattgagcaagtttgggaggagctattatccattcctgagttacagtgtcttaatattgaaaatgacaagctggttgagactaccatggttccaagtccagaagccaaactgacagaagttgacaattatcatttttactcatctataccctcaatggaaaaagaagtaggtaactgtagtccacattttcttaatgcttttgaggattccttcagcagcatcctctccacagaagaccccaaccagttgacagtgaactcattaaattcagatgccacagtcaacacagattttggtgatgaattttattctgctttcatagctgagcccagtatcagcaacagcatgccctcacctgctactttaagccattcactctctgaacttctaaatgggcccattgatgtttctgatctatcactttgcaaagctttcaaccaaaacacccttaaagcccagagaattccagagttctgagtccgggttttccgtttaacaagtccccggggtttccccaaaaccccggggatctcccgttggggaacctattgggc

SEQ ID NO: 357955 - DNA, 653 bp, Homo sapiens
ttaaattgtttagctctggcaaaaaaaaaaaattttaagagctggtactaataaaggattattatgactgttaaattataaattatttgtttgggattcctttgagtttattcacacagtattttccataagataatcatccatttaatttagatgttttgcattttcagaatgttttatttgaaaatataaaaataattttatactacatttctagtaccagggttacagagaaataaagtatatcaagaggatactttgcctcttcaatagcaggtacatctaaacccaagaaaatgttacacactgacatgaaagcactgattcatttatttccatcagtagacatacgcccactataccctaggcagagtttgaagtagaaaggacaaaaccaatatccctgcctggcctggaacttgcattctagcgaaggggaggtaacaagcatactccactatgttagaaggaactggacggggaaaaccagtaaaaagcgtcacaacttaaggctgtaaatgggaagagccttactgaagtggcaacatttgaaggtgtgggagaagctgttctcatagccaagaacactgcagacaagacacagcaggtccaaaggctgaaccacatttgagaaaaaacaaggacaatgtggc

SEQ ID NO: 357956 - DNA, 2526 bp, Homo sapiens
agcggaggggccggactcttgccccgcccttgtggggcgggaggcggagcggggcaggggcccgccggcgtgtagccgattaccgagtgccggggagcccggaggagccgccgacgcagccgccaccgccgccgccgccgccaccagagccgccctgtccgcgccgcgcctcggcagccggaacagggccgccgtcggggagccccaacacacggtccacagctcatcatgatggacttggagctgccgccgccgggactcccgtcccagcaggacatggatttgattgacatactttggaggcaagatatagatcttggagtaagtcgagaagtatttgacttcagtcagcgacggaaagagtatgagctggaaaaacagaaaaaacttgaaaaggaaagacaagaacaactccaaaaggagcaagagaaagcctttttcgctcagttacaactagatgaagagacaggtgaatttctcccaattcagccagcccagcacatccagtcagaaaccagtggatctgccaactactcccaggttgcccacattcccaaatcagatgctttgtactttgatgactgcatgcagcttttggcgcagacattcccgtttgtagatgacaatgaggtttcttcggctacgtttcagtcacttgttcctgatattcccggtcacatcgagagcccagtcttcattgctactaatcaggctcagtcacctgaaacttctgttgctcaggtagcccctgttgatttagacggtatgcaacaggacattgagcaagtttgggaggagctattatccattcctgagttacagtgtcttaatattgaaaatgacaagctggttgagactaccatggttccaagtccagaagccaaactgacagaagttgacaattatcatttttactcatctataccctcaatggaaaaagaagtaggtaactgtagtccacattttcttaatgcttttgaggattccttcagcagcatcctctccacagaagaccccaaccagttgacagtgaactcattaaattcagatgccacagtcaacacagattttggtgatgaattttattctgctttcatagctgagcccagtatcagcaacagcatgccctcacctgctactttaagccattcactctctgaacttctaaatgggcccattgatgtttctgatctatcactttgcaaagctttcaaccaaaaccaccctgaaagcacagcagaattcaatgattctgactccggcatttcactaaacacaagtcccagtgtggcatcaccagaacactcagtggaatcttccagctatggagacacactacttggcctcagtgattctgaagtggaagagctagatagtgcccctggaagtgtcaaacagaatggtcctaaaacaccagtacattcttctggggatatggtacaacccttgtcaccatctcaggggcagagcactcacgtgcatgatgcccaatgtgagaacacaccagagaaagaattgcctgtaagtcctggtcatcggaaaaccccattcacaaaagacaaacattcaagccgcttggaggctcatctcacaagagatgaacttagggcaaaagctctccatatcccattccctgtagaaaaaatcattaacctccctgttgttgacttcaacgaaatgatgtccaaagagcagttcaatgaagctcaacttgcattaattcgggatatacgtaggaggggtaagaataaagtggctgctcagaattgcagaaaaagaaaactggaaaatatagtagaactagagcaagatttagatcatttgaaagatgaaaaagaaaaattgctcaaagaaaaaggagaaaatgacaaaagccttcacctactgaaaaaacaactcagcaccttatatctcgaagttttcagcatgctacgtgatgaagatggaaaaccttattctcctagtgaatactccctgcagcaaacaagagatggcaatgttttccttgttcccaaaagtaagaagccagatgttaagaaaaactagatttaggaggatttgaccttttctgagctagtttttttgtactattatactaaaagctcctactgtgatgtgaaatgctcatactttataagtaattctatgcaaaatcatagccaaaactagtatagaaaataatacgaaactttaaaaagcattggagtgtcagtatgttgaatcagtagtttcactttaactgtaaacaatttcttaggacaccatttgggctagtttctgtgtaagtgtaaatactacaaaaacttatttatactgttcttatgtcatttgttatattcatagatttatatgatgatatgacatctggctaaaaagaaattattgcaaaactaaccactatgtacttttttataaatactgtatggacaaaaaatggcattttttatattaaattgtttagctctggcaaaaaaaaaaaattttaagagctggtactaataaaggattattatgactgttaaatta

SEQ ID NO: 357957 - DNA, 968 bp, Homo sapiens
agcggaggggccggactcttgccccgcccttgtggggcgggaggcggagcggggcaggggcccgccggcgtgtagccgattaccgagtgccggggagcccggaggagccgccgacgcagccgccaccgccgccgccgccgccaccagagccgccctgtccgcgccgcgcctcggcagccggaacagggccgccgtcggggagccccaacacacggtccacagctcatcatgatggacttggagctgccgccgccgggactcccgtcccagcaggacatggatttgattgacatactttggaggcaagatatagatcttggagtaagtcgagaagtatttgacttcagtcagcgacggaaagagtatgagctggaaaaacagaaaaaacttgaaaaggaaagacaagaacaactccaaaaggagcaagagaaagcctttttcgctcagttacaactagatgaagagacaggtgaatttctcccaattcagccagcccagcacatccagtcagaaaccagtggatctgccaactactcccaggttgcccacattcccaaatcagatgctttgtactttgatgactgcatgcagcttttggcgcagacattcccgtttgtagatgacaatgaggtttcttcggctacgtttcagtcacttgttcctgatattcccggtcacatcgagagcccagtcttcattgctactaatcaggctcagtcacctgaaacttctgttgctcaggtagcccctgttgatttagacggtatgcaacaggacattgagcaagtttgggaggagctattatccattcctgagttacaggctctcactatgttgcccaggctcgtctcaaattcctggacttgggatccatctgcctcagcctcccaaagtgctgggattacaggcgtgagccactgtgcctggccctggtaacttttaatgttcctttgaaggtgttttcctag

SEQ ID NO: 357958 - DNA, 2737 bp, Homo sapiens
agttttttaagcacaatagcaaaaccatcagctctgtattttctcctgttatttcattacagtagctgcttgtgggaactaggaaaaattcttccaacatattttaaggcctaaaatcttagttccccattctcctaccttatagattcacaggcctttctcgcctaggcatcatagataaacgtaattgtttggggagttgaatttaatgaacttatctaactttgtaacccatcttggctttagtaactttatcaaggtggtggctttagtgaatataatggtaaactttagaggacgctaaagcctccttttatagcgctcctcaacggtagggagagctgaagggaaaacattctgactgtgtggcagggtgattttcttccttatgaccacttacagtggatatttattgtcaacacacggtccacagctcatcatgatggacttggagctgccgccgccgggactcccgtcccagcaggacatggatttgattgacatactttggaggcaagatatagatcttggagtaagtcgagaagtatttgacttcagtcagcgacggaaagagtatgagctggaaaaacagaaaaaacttgaaaaggaaagacaagaacaactccaaaaggagcaagagaaagcctttttcgctcagttacaactagatgaagagacaggtgaatttctcccaattcagccagcccagcacatccagtcagaaaccagtggatctgccaactactcccaggttgcccacattcccaaatcagatgctttgtactttgatgactgcatgcagcttttggcgcagacattcccgtttgtagatgacaatgaggtttcttcggctacgtttcagtcacttgttcctgatattcccggtcacatcgagagcccagtcttcattgctactaatcaggctcagtcacctgaaacttctgttgctcaggtagcccctgttgatttagacggtatgcaacaggacattgagcaagtttgggaggagctattatccattcctgagttacagtgtcttaatattgaaaatgacaagctggttgagactaccatggttccaagtccagaagccaaactgacagaagttgacaattatcatttttactcatctataccctcaatggaaaaagaagtaggtaactgtagtccacattttcttaatgcttttgaggattccttcagcagcatcctctccacagaagaccccaaccagttgacagtgaactcattaaattcagatgccacagtcaacacagattttggtgatgaattttattctgctttcatagctgagcccagtatcagcaacagcatgccctcacctgctactttaagccattcactctctgaacttctaaatgggcccattgatgtttctgatctatcactttgcaaagctttcaaccaaaaccaccctgaaagcacagcagaattcaatgattctgactccggcatttcactaaacacaagtcccagtgtggcatcaccagaacactcagtggaatcttccagctatggagacacactacttggcctcagtgattctgaagtggaagagctagatagtgcccctggaagtgtcaaacagaatggtcctaaaacaccagtacattcttctggggatatggtacaacccttgtcaccatctcaggggcagagcactcacgtgcatgatgcccaatgtgagaacacaccagagaaagaattgcctgtaagtcctggtcatcggaaaaccccattcacaaaagacaaacattcaagccgcttggaggctcatctcacaagagatgaacttagggcaaaagctctccatatcccattccctgtagaaaaaatcattaacctccctgttgttgacttcaacgaaatgatgtccaaagagcagttcaatgaagctcaacttgcattaattcgggatatacgtaggaggggtaagaataaagtggctgctcagaattgcagaaaaagaaaactggaaaatatagtagaactagagcaagatttagatcatttgaaagatgaaaaagaaaaattgctcaaagaaaaaggagaaaatgacaaaagccttcacctactgaaaaaacaactcagcaccttatatctcgaagttttcagcatgctacgtgatgaagatggaaaaccttattctcctagtgaatactccctgcagcaaacaagagatggcaatgttttccttgttcccaaaagtaagaagccagatgttaagaaaaactagatttaggaggatttgaccttttctgagctagtttttttgtactattatactaaaagctcctactgtgatgtgaaatgctcatactttataagtaattctatgcaaaatcatagccaaaactagtatagaaaataatacgaaactttaaaaagcattggagtgtcagtatgttgaatcagtagtttcactttaactgtaaacaatttcttaggacaccatttgggctagtttctgtgtaagtgtaaatactacaaaaacttatttatactgttcttatgtcatttgttatattcatagatttatatgatgatatgacatctggctaaaaagaaattattgcaaaactaaccactatgtacttttttataaatactgtatggacaaaaaatggcattttttatattaaattgtttagctctggcaaaaaaaaaaaattttaagagctggtactaataaaggattattatgactgttaaatta

SEQ ID NO: 357959 - DNA, 2778 bp, Homo sapiens
gtgtaggaaagatggaaagaatggtgatatttcacaactgctagattgacactttaacttgagagttatccctctataaactggatatttgctgagcaaagtttaaagaaaactccatgtattcagtaatgttttccagaccccacttctcttatataagccagtggcttagagtgcttgctctaatttctatattccattaaacaagggtgggatttcttctcattcaaaccatttgtgactttgccctttagtgacctctaccatcaccctatcattaatgatccaagtgattagaatggatggctatgtgtttgtaggttgtttgttgtctttaatgaatagattcattgaatggaattaactgtgctcttctagaacattggatctgtgttctcatttagattgtatttgtaatctccccacttcccaccatcaacagtggcataatgtgaattaatttatgtggtatctgtcatttaaaaaacatgagctctctccttcctttttttgtcttaaacataggacatggatttgattgacatactttggaggcaagatatagatcttggagtaagtcgagaagtatttgacttcagtcagcgacggaaagagtatgagctggaaaaacagaaaaaacttgaaaaggaaagacaagaacaactccaaaaggagcaagagaaagcctttttcgctcagttacaactagatgaagagacaggtgaatttctcccaattcagccagcccagcacatccagtcagaaaccagtggatctgccaactactcccaggttgcccacattcccaaatcagatgctttgtactttgatgactgcatgcagcttttggcgcagacattcccgtttgtagatgacaatgaggtttcttcggctacgtttcagtcacttgttcctgatattcccggtcacatcgagagcccagtcttcattgctactaatcaggctcagtcacctgaaacttctgttgctcaggtagcccctgttgatttagacggtatgcaacaggacattgagcaagtttgggaggagctattatccattcctgagttacagtgtcttaatattgaaaatgacaagctggttgagactaccatggttccaagtccagaagccaaactgacagaagttgacaattatcatttttactcatctataccctcaatggaaaaagaagtaggtaactgtagtccacattttcttaatgcttttgaggattccttcagcagcatcctctccacagaagaccccaaccagttgacagtgaactcattaaattcagatgccacagtcaacacagattttggtgatgaattttattctgctttcatagctgagcccagtatcagcaacagcatgccctcacctgctactttaagccattcactctctgaacttctaaatgggcccattgatgtttctgatctatcactttgcaaagctttcaaccaaaaccaccctgaaagcacagcagaattcaatgattctgactccggcatttcactaaacacaagtcccagtgtggcatcaccagaacactcagtggaatcttccagctatggagacacactacttggcctcagtgattctgaagtggaagagctagatagtgcccctggaagtgtcaaacagaatggtcctaaaacaccagtacattcttctggggatatggtacaacccttgtcaccatctcaggggcagagcactcacgtgcatgatgcccaatgtgagaacacaccagagaaagaattgcctgtaagtcctggtcatcggaaaaccccattcacaaaagacaaacattcaagccgcttggaggctcatctcacaagagatgaacttagggcaaaagctctccatatcccattccctgtagaaaaaatcattaacctccctgttgttgacttcaacgaaatgatgtccaaagagcagttcaatgaagctcaacttgcattaattcgggatatacgtaggaggggtaagaataaagtggctgctcagaattgcagaaaaagaaaactggaaaatatagtagaactagagcaagatttagatcatttgaaagatgaaaaagaaaaattgctcaaagaaaaaggagaaaatgacaaaagccttcacctactgaaaaaacaactcagcaccttatatctcgaagttttcagcatgctacgtgatgaagatggaaaaccttattctcctagtgaatactccctgcagcaaacaagagatggcaatgttttccttgttcccaaaagtaagaagccagatgttaagaaaaactagatttaggaggatttgaccttttctgagctagtttttttgtactattatactaaaagctcctactgtgatgtgaaatgctcatactttataagtaattctatgcaaaatcatagccaaaactagtatagaaaataatacgaaactttaaaaagcattggagtgtcagtatgttgaatcagtagtttcactttaactgtaaacaatttcttaggacaccatttgggctagtttctgtgtaagtgtaaatactacaaaaacttatttatactgttcttatgtcatttgttatattcatagatttatatgatgatatgacatctggctaaaaagaaattattgcaaaactaaccactatgtacttttttataaatactgtatggacaaaaaatggcattttttatattaaattgtttagctctggcaaaaaaaaaaaattttaagagctggtactaataaaggattattatgactgttaaatta

SEQ ID NO: 357960 - DNA, 2469 bp, Homo sapiens
agcggaggggccggactcttgccccgcccttgtggggcgggaggcggagcggggcaggggcccgccggcgtgtagccgattaccgagtgccggggagcccggaggagccgccgacgcagccgccaccgccgccgccgccgccaccagagccgccctgtccgcgccgcgcctcggcagccggaacagggccgccgtcggggagccccaacacacggtccacagctcatcatgatggacttggagctgccgccgccgggactcccgtcccagcaggacatggatttgattgacatactttggaggcaagatatagatcttggagtaagtcgagaagtatttgacttcagtcagcgacggaaagagtatgagctggaaaaacagaaaaaacttgaaaaggaaagacaagaacaactccaaaaggagcaagagaaagcctttttcgctcagttacaactagatgaagagacaggtgaatttctcccaattcagccagcccagcacatccagtcagaaaccagtggatctgccaactactcccaggttgcccacattcccaaatcagatgctttgtactttgatgactgcatgcagcttttggcgcagacattcccgtttgtagatgacaatgaggtttcttcggctacgtttcagtcacttgttcctgatattcccggtcacatcgagagcccagtcttcattgctactaatcaggctcagtcacctgaaacttctgttgctcaggtagcccctgttgatttagacggtatgcaacaggacattgagcaagtttgggaggagctattatccattcctgagttacagtgtcttaatattgaaaatgacaagctggttgagactaccatggttccaagtccagaagccaaactgacagaagttgacaattatcatttttactcatctataccctcaatggaaaaagaagtaggtaactgtagtccacattttcttaatgcttttgaggattccttcagcagcatcctctccacagaagaccccaaccagttgacagtgaactcattaaattcagatgccacagtcaacacagattttggtgatgaattttattctgctttcatagctgagcccagtatcagcaacagcatgccctcacctgctactttaagccattcactctctgaacttctaaatgggcccattgatgtttctgatctatcactttgcaaagctttcaaccaaaaccaccctgaaagcacagcagaattcaatgattctgactccggcatttcactaaacacaagtcccagtgtggcatcaccagaacactcagtggaatcttccagctatggagacacactacttggcctcagtgattctgaagtggaagagctagatagtgcccctggaagtgtcaaacagaatggtcctaaaacaccagtacattcttctggggatatggtacaacccttgtcaccatctcaggggcagagcactcacgtgcatgatgcccaatgtgagaacacaccagagaaagaattgcctgtaagtcctggtcatcggaaaaccccattcacaaaagacaaacattcaagccgcttggaggctcatctcacaagagatgaacttagggcaaaagctctccatatcccattccctgtagaaaaaatcattaacctccctgttgttgacttcaacgaaatgatgtccaaagagcagttcaatgaagctcaacttgcattaattcgggatatacgtaggaggggtaagaataaagtggctgctcagaattgcagaaaaagaaaactggaaaatatagtagaactagagcaagatttagatcatttgaaagatgaaaaagaaaaattgctcaaagaaaaaggagaaaatgacaaaagccttcacctactgaaaaaacaactcagcaccttatatctcgaagttttcagcatgctacgtgatgaagatggaaaaccttattctcctagtgaatactccctgcagcaaacaagagatggcaatgttttccttgttcccaaaagtaagaagccagatgttaagaaaaactagatttaggaggatttgaccttttctgagctagtttttttgtactattatactaaaagctcctactgtgatgtgaaatgctcatactttataagtaattctatgcaaaatcatagccaaaactagtatagaaaataatacgaaactttaaaaagcattggagtgtcagtatgttgaatcagtagtttcactttaactgtaaacaatttcttaggacaccatttgggctagtttctgtgtaagtgtaaatactacaaaaacttatttatactgttcttatgtcatttgttatattcatagatttatatgatgatatgacatctggctaaaaagaaattattgcaaaactaaccactatgtacttttttataaatactgtatggacaaaaaatggcattttttatattaaattgtttagctctggca

SEQ ID NO: 357961 - DNA, 2353 bp, Homo sapiens
tgctttatagcgtgcaaacctcgccgcgccagggccaagggacaggttggagctgttgatctgttgcgcaattgctattttccccagagcggctttgtctttggatttagcgtttcagaattgcaattccaaaatgtgtaagacgggatattctcttctgtgctgtcaagggacatggatttgattgacatactttggaggcaagatatagatcttggagtaagtcgagaagtatttgacttcagtcagcgacggaaagagtatgagctggaaaaacagaaaaaacttgaaaaggaaagacaagaacaactccaaaaggagcaagagaaagcctttttcgctcagttacaactagatgaagagacaggttgcccacattcccaaatcagatgctttgtactttgatgactgcatgcagcttttggcgcagacattcccgtttgtagatgacaatgaggtttcttcggctacgtttcagtcacttgttcctgatattcccggtcacatcgagagcccagtcttcattgctactaatcaggctcagtcacctgaaacttctgttgctcaggtagcccctgttgatttagacggtatgcaacaggacattgagcaagtttgggaggagctattatccattcctgagttacagtgtcttaatattgaaaatgacaagctggttgagactaccatggttccaagtccagaagccaaactgacagaagttgacaattatcatttttactcatctataccctcaatggaaaaagaagtaggtaactgtagtccacattttcttaatgcttttgaggattccttcagcagcatcctctccacagaagaccccaaccagttgacagtgaactcattaaattcagatgccacagtcaacacagattttggtgatgaattttattctgctttcatagctgagcccagtatcagcaacagcatgccctcacctgctactttaagccattcactctctgaacttctaaatgggcccattgatgtttctgatctatcactttgcaaagctttcaaccaaaaccaccctgaaagcacagcagaattcaatgattctgactccggcatttcactaaacacaagtcccagtgtggcatcaccagaacactcagtggaatcttccagctatggagacacactacttggcctcagtgattctgaagtggaagagctagatagtgcccctggaagtgtcaaacagaatggtcctaaaacaccagtacattcttctggggatatggtacaacccttgtcaccatctcaggggcagagcactcacgtgcatgatgcccaatgtgagaacacaccagagaaagaattgcctgtaagtcctggtcatcggaaaaccccattcacaaaagacaaacattcaagccgcttggaggctcatctcacaagagatgaacttagggcaaaagctctccatatcccattccctgtagaaaaaatcattaacctccctgttgttgacttcaacgaaatgatgtccaaagagcagttcaatgaagctcaacttgcattaattcgggatatacgtaggaggggtaagaataaagtggctgctcagaattgcagaaaaagaaaactggaaaatatagtagaactagagcaagatttagatcatttgaaagatgaaaaagaaaaattgctcaaagaaaaaggagaaaatgacaaaagccttcacctactgaaaaaacaactcagcaccttatatctcgaagttttcagcatgctacgtgatgaagatggaaaaccttattctcctagtgaatactccctgcagcaaacaagagatggcaatgttttccttgttcccaaaagtaagaagccagatgttaagaaaaactagatttaggaggatttgaccttttctgagctagtttttttgtactattatactaaaagctcctactgtgatgtgaaatgctcatactttataagtaattctatgcaaaatcatagccaaaactagtatagaaaataatacgaaactttaaaaagcattggagtgtcagtatgttgaatcagtagtttcactttaactgtaaacaatttcttaggacaccatttgggctagtttctgtgtaagtgtaaatactacaaaaacttatttatactgttcttatgtcatttgttatattcatagatttatatgatgatatgacatctggctaaaaagaaattattgcaaaactaaccactatgtacttttttataaatactgtatggacaaaaaatggcattttttatattaaattgtttagctctggcaaaaaaaaaaaattttaagagctggtactaataaaggattattatgactgttaaatta

SEQ ID NO: 357962 - DNA, 2472 bp, Homo sapiens
agcggaggggccggactcttgccccgcccttgtggggcgggaggcggagcggggcaggggcccgccggcgtgtagccgattaccgagtgccggggagcccggaggagccgccgacgcagccgccaccgccgccgccgccgccaccagagccgccctgtccgcgccgcgcctcggcagccggaacagggccgccgtcggggagccccaacacacggtccacagctcatcatgatggacttggagctgccgccgccgggactcccgtcccagcaggacatggatttgattgacatactttggaggcaagatatagatcttggagtaagtcgagaagtatttgacttcagtcagcgacggaaagagtatgagctggaaaaacagaaaaaacttgaaaaggaaagacaagaacaactccaaaaggagcaagagaaagcctttttcgctcagttacaactagatgaagagacaggtgaatttctcccaattcagccagcccagcacatccagtcagaaaccagtggatctgccaactactcccaggttgcccacattcccaaatcagatgctttgtactttgatgactgcatgcagcttttggcgcagacattcccgtttgtagatgacaatgaggtttcttcggctacgtttcagtcacttgttcctgatattcccggtcacatcgagagcccagtcttcattgctactaatcaggctcagtcacctgaaacttctgttgctcaggtagcccctgttgatttagacggtatgcaacaggacattgagcaagtttgggaggagctattatccattcctgagttacagtgtcttaatattgaaaatgacaagctggttgagactaccatggttccaagtccagaagccaaactgacagaagttgacaattatcatttttactcatctataccctcaatggaaaaagaagtaggtaactgtagtccacattttcttaatgcttttgaggattccttcagcagcatcctctccacagaagaccccaaccagttgacagtgaactcattaaattcagatgccacagtcaacacagattttggtgatgaattttattctgctttcatagctgagcccagtatcagcaacagcatgccctcacctgctactttaagccattcactctctgaacttctaaatgggcccattgatgtttctgatctatcactttgcaaagctttcaacctaaacacaagtcccagtgtggcatcaccagaacactcagtggaatcttccagctatggagacacactacttggcctcagtgattctgaagtggaagagctagatagtgcccctggaagtgtcaaacagaatggtcctaaaacaccagtacattcttctggggatatggtacaacccttgtcaccatctcaggggcagagcactcacgtgcatgatgcccaatgtgagaacacaccagagaaagaattgcctgtaagtcctggtcatcggaaaaccccattcacaaaagacaaacattcaagccgcttggaggctcatctcacaagagatgaacttagggcaaaagctctccatatcccattccctgtagaaaaaatcattaacctccctgttgttgacttcaacgaaatgatgtccaaagagcagttcaatgaagctcaacttgcattaattcgggatatacgtaggaggggtaagaataaagtggctgctcagaattgcagaaaaagaaaactggaaaatatagtagaactagagcaagatttagatcatttgaaagatgaaaaagaaaaattgctcaaagaaaaaggagaaaatgacaaaagccttcacctactgaaaaaacaactcagcaccttatatctcgaagttttcagcatgctacgtgatgaagatggaaaaccttattctcctagtgaatactccctgcagcaaacaagagatggcaatgttttccttgttcccaaaagtaagaagccagatgttaagaaaaactagatttaggaggatttgaccttttctgagctagtttttttgtactattatactaaaagctcctactgtgatgtgaaatgctcatactttataagtaattctatgcaaaatcatagccaaaactagtatagaaaataatacgaaactttaaaaagcattggagtgtcagtatgttgaatcagtagtttcactttaactgtaaacaatttcttaggacaccatttgggctagtttctgtgtaagtgtaaatactacaaaaacttatttatactgttcttatgtcatttgttatattcatagatttatatgatgatatgacatctggctaaaaagaaattattgcaaaactaaccactatgtacttttttataaatactgtatggacaaaaaatggcattttttatattaaattgtttagctctggcaaaaaaaaaaaattttaagagctggtactaataaaggattattatgactgttaaatta

SEQ ID NO: 357963 - DNA, 3007 bp, Homo sapiens
agcggaggggccggactcttgccccgcccttgtggggcgggaggcggagcggggcaggggcccgccggcgtgtagccgattaccgagtgccggggagcccggaggagccgccgacgcagccgccaccgccgccgccgccgccaccagagccgccctgtccgcgccgcgcctcggcagccggaacagggccgccgtcggggagccccaacacacggtccacagctcatcatgatggacttggagctgccgccgccgggactcccgtcccagcaggacatggatttgattgacatactttggaggcaagatatagatcttggagtaagtcgagaagtatttgacttcagtcagcgacggaaagagtatgagctggaaaaacagaaaaaacttgaaaaggaaagacaagaacaactccaaaaggagcaagagaaagcctttttcgctcagttacaactagatgaagagacaggtgaatttctcccaattcagccagcccagcacatccagtcagaaaccagtggatctgccaactactcccaggttgcccacattcccaaatcagatgctttgtactttgatgactgcatgcagcttttggcgcagacattcccgtttgtagatgacaatgaggtttcttcggctacgtttcagtcacttgttcctgatattcccggtcacatcgagagcccagtcttcattgctactaatcaggctcagtcacctgaaacttctgttgctcaggtagcccctgttgatttagacggtatgcaacaggacattgagcaagtttgggaggagctattatccattcctgagttacagtgtcttaatattgaaaatgacaagctggttgagactaccatggttccaagtccagaagccaaactgacagaagttgacaattatcatttttactcatctataccctcaatggaaaaagaagtaggtaactgtagtccacattttcttaatgcttttgaggattccttcagcagcatcctctccacagaagaccccaaccagttgacagtgaactcattaaattcagatgccacagtcaacacagattttggtgatgaattttattctgctttcatagctgagcccagtatcagcaacagcatgccctcacctgctactttaagccattcactctctgaacttctaaatgggcccattgatgtttctgatctatcactttgcaaagctttcaaccaaaaccaccctgaaagcacagcagaattcaatgattctgactccggcatttcactaaacacaagtcccagtgtggcatcaccagaacactcagtggaatcttccagctatggagacacactacttggcctcagtgattctgaagtggaagagctagatagtgcccctggaagtgtcaaacagaatggtcctaaaacaccagtacattcttctggggatatggtacaacccttgtcaccatctcaggggcagagcactcacgtgcatgatgcccaatgtgagaacacaccagagaaagaattgcctgtaagtcctggtcatcggaaaaccccattcacaaaagacaaacattcaagccgcttggaggctcatctcacaagagatgaacttagggcaaaagctctccatatcccattccctgtagaaaaaatcattaacctccctgttgttgacttcaacgaaatgatgtccaaagagcagttcaatgaagctcaacttgcattaattcgggatatacgtaggaggggtaagaataaagtggctgctcagaattgcagaaaaagaaaactggaaaatatagtagaactagagcaagatttagatcatttgaaagatgaaaaagaaaaattgctcaaagaaaaaggagaaaatgacaaaagccttcacctactgaaaaaacaactcagcaccttatatctcgaagttttcagcatgctacgtgatgaagatggaaaaccttattctcctagtgaatactccctgcagcaaacaagagatggcaatgttttccttgttcccaaaagtaagaagccagatgttaagaaaaactagatttaggaggatttgaccttttctgagctagtttttttgtactattatactaaaagctcctactgtgatgtgaaatgctcatactttataagtaattctatgcaaaatcatagccaaaactagtatagaaaataatacgaaactttaaaaagcattggagtgtcagtatgttgaatcagtagtttcactttaactgtaaacaatttcttaggacaccatttgggctagtttctgtgtaagtgtaaatactacaaaaacttatttatactgttcttatgtcatttgttatattcatagatttatatgatgatatgacatctggctaaaaagaaattattgcaaaactaaccactatgtacttttttataaatactgtatggacaaaaaatggcattttttatattaaattgtttagctctggcaaaaaaaaaaaattttaagagctggtactaataaaggattattatgactgttaaattaaaaaaaaaaacagaaaaaaacaaaaaaacaaaaagcaacaaaacaaaacacaaaacaaagaacagaacacaacaaagaacacacagacagacgaaaaagcaaaaccgacacgaaaaaacaaacacacacaagaaacacaccagcgcatcggaccggctacaaacatagaccagacgaagacgagacaaaagcaggccagcgaaacgacagagaagaacaacacaacgagagtaaaacataaaatgaggacagcacacaccccgcaaagccatcacgacagcgacgaacgcataaagacgcaaaaacgaaacgagacggataacagagaaaacacgagaggaagccaggagccaataatcagaggagataagaaccgacgatggaagagagagacgaagaacacacaaaaagagggagaggagaggaagggcgagacgaacaggagagagggcggcaaagcaacacaaagaggaagaggaca

SEQ ID NO: 357964 - DNA, 1969 bp, Homo sapiens
agcggaggggccggactcttgccccgcccttgtggggcgggaggcggagcggggcaggggcccgccggcgtgtagccgattaccgagtgccggggagcccggaggagccgccgacgcagccgccaccgccgccgccgccgccaccagagccgccctgtccgcgccgcgcctcggcagccggaacagggccgccgtcggggagccccaacacacggtccacagctcatcatgatggacttggagctgccgccgccgggactcccgtcccagcaggacatggatttgattgacatactttggaggcaagatatagatcttggagtaagtcgagaagtatttgacttcagtcagcgacggaaagagtatgagctggaaaaacagaaaaaacttgaaaaggaaagacaagaacaactccaaaaggagcaagagaaagcctttttcgctcagttacaactagatgaagagacaggtgaatttctcccaattcagccagcccagcacatccagtcagaaaccagtggatctgccaactactcccaggttgcccacattcccaaatcagatgctttgtactttgatgactgcatgcagcttttggcgcagacattcccgtttgtagatgacaatgaggtttcttcggctacgtttcagtcacttgttcctgatattcccggtcacatcgagagcccagtcttcattgctactaatcaggctcagtcacctgaaacttctgttgctcaggtagcccctgttgatttagacggtatgcaacaggacattgagcaagtttgggaggagctattatccattcctgagttacagtgtcttaatattgaaaatgacaagctggttgagactaccatggttccaagtccagaagccaaactgacagaagttgacaattatcatttttactcatctataccctcaatggaaaaagaagtaggtaactgtagtccacattttcttaatgcttttgaggattccttcagcagcatcctctccacagaagaccccaaccagttgacagtgaactcattaaattcagatgccacagtcaacacagattttggtgatgaattttattctgctttcatagctgagcccagtatcagcaacagcatgccctcacctgctactttaagccattcactctctgaacttctaaatgggcccattgatgtttctgatctatcactttgcaaagctttcaaccaaaaccaccctgaaagcacagcagaattcaatgattctgactccggcatttcactaaacacaagtcccagtgtggcatcaccagaacactcagtggaatcttccagctatggagacacactacttggcctcagtgattctgaagtggaagagctagatagtgcccctggaagtgtcaaacagaatggtcctaaaacaccagtacattcttctggggatatggtacaacccttgtcaccatctcaggggcagagcactcacgtgcatgatgcccaatgtgagaacacaccagagaaagaattgcctgtaagtcctggtcatcggaaaaccccattcacaaaagacaaacattcaagccgcttggaggctcatctcacaagagatgaacttagggcaaaagctctccatatcccattccctgtagaaaaaatcattaacctccctgttgttgacttcaacgaaatgatgtccaaagagcagttcaatgaagctcaacttgcattaattcgggatatacgtttcagtcacttgttccctgatattcccggtcacatcgagagcccagtcttcattgctactaatcaggctcagtcacctgaaacttctgttgctcaggtagcccctgttgatttagacggtatgcaacaggacattgagcaagtttgggaggagctattatccattcctgagttcagtgtcttaatattgaaaatgacaagccggttgagaccccgtcgacgcggccgcgaattta

SEQ ID NO: 357965 - DNA, 904 bp, Homo sapiens
agttttttaagcacaatagcaaaaccatcagctctgtattttctcctgttatttcattacagtagctgcttgtgggaactaggaaaaattcttccaacatattttaaggcctaaaatcttagttccccattctcctaccttatagattcacaggcctttctcgcctaggcatcatagataaacgtaattgtttggggagttgaatttaatgaacttatctaactttgtaacccatcttggctttagtaactttatcaaggtggtggctttagtgaatataatggtaaactttagaggacgctaaagcctccttttatagcgctcctcaacggtagggagagctgaagggaaaacattctgactgtgtggcagggtgattttcttccttatgaccacttacagtggatatttattgtcaacacacggtccacagctcatcatgatggacttggagctgccgccgccgggactcccgtcccagcaggacatggatttgattgacatactttggaggcaagatatagatcttggagtaagtcgagaagtatttgacttcagtcagcgacggaaagagtatgagctggaaaaacagaaaaaacttgaaaaggaaagacaagaacaactccaaaaggagcaagagaaagcctttttcgctcagttacaactagatgaagagacaggtgaatttctcccaattcagccagcccagcacatccagtcagaaaccagtggatctgccaactactcccagtgcccacattcccaatgaagagctagactttacaaagaaagatcaagtacaaaagtgaaagaatgggtgggatgtcatagctggggcatatatgctgatgacccaaattatgtggtaacccttcctttccaggctgacctgatacccaagtgt

SEQ ID NO: 357966 - DNA, 437 bp, Homo sapiens
gagataagatcagtttagttgctaatgaattttggtccccagcacagaacaattacaatggaatatgaggacggtttcaagagcatcaggaagattttaccaaattctatttaatctcctctcaccctgtttacaggtcagcttattaaagttgaaaattcctggtagatggtttccatggagagagaaaattatctctttagataaactattctagggttaatttgattcaaccaacatttatttagagtttcacatgtgaaacacaatactgtcttaggagctacagggatactaagatgaacgtggaaaaaaatgattgcccttaattaagttggcatgaagttcatgtacacaaagatgtacacggatctaggataaaatgtggcaagtactatcatgtaagtataaataaataaaaaattgtactcttcata

SEQ ID NO: 357967 - DNA, 2634 bp, Homo sapiens
  misc_feature (110)..(110): n is a, c, g, or t
ggcttctgtactgcgcgcgcacatgcgcgcaaacccggaagcggattatgtggagtgaaagttacaccgtggcggaatggggtgtattgattctgagcaataaacaacanatttttaacattcaggattgacttctaaggactcttggtacatgaggaagaaacccggaaggggaagaggaaagcaaaggcgtcaggaatggttcttcctcaggtattttttctaaatgtgagatcaaggaattaccaccaaaaaaggagagtaatacaggagaaatattccagacagtaatgttggaaagacatgaaagccacgacatacaagatttttgcttcagagaaacccagaaaaatgtacatgactctcagtgtctgtggaaacatgattgaagacattataagcgagtgcgtgtgacctataaggaaagtctcattggtagaagagacatgcatggtagaaaggatgatgcacaaaagcagcctgttaaaaatcagcttggattaaacccgcagtcacatctaccagaactgcagctatttcaagctgaagggaaaatatataaatatgatcacatggaaaaatctgtcaacagtagttccttagtttccccaccccaacgtatttcttctactgtcaaaacccacatttctcatacatatgaatgtaattttgtggattcattattcacacaaaaagagaaagcaaatattgggacagaacactacaaatgtaatgagcgtggcaaggcctttcatcaaggcttacattttactatacatcaaataatccatactaaagagacgcaatttaaatgtgatatatgtggcaagatcttcaataaaaaatcaaaccttgcaagtcatcaaagaattcatactggagagaagccatataaatgtaatgaatgtggcaaggtcttccataatatgtcacaccttgcacagcatcgcaggattcatactggagagaaaccatataaatgtaatgaatgtggcaaggtctttaatcaaatttcacaccttgcacaacatcaaagaattcataccggagagaaaccttataaatgtaatgaatgtggaaaggtcttccatcaaatttcacaccttgcacaacatcggacaattcatactggagaaaaaccttacgaatgtaacaaatgtggcaaggtgttcagtcgcaattcctaccttgtacaacatctgatcattcatactggagagaaaccttacagatgtaatgtatgtggaaaggtcttccatcatatttcacaccttgcacaacatcagagaatccacactggagagaaaccttacaaatgtaatgagtgtggcaaggtcttcagtcacaagtcatccctagtaaatcactggagaattcatactggagagaaaccttacaaatgtaatgagtgtggcaaggtcttcagtcacaagtcatccctagtaaatcactggagaatccacactggagagaaaccttacaaatgtaatgaatgtggcaaggtcttcagtcgcaattcataccttgcccaacatctgataattcatgccggtgagaaaccttataagtgtgatgaatgtgacaaagcattcagtcaaaattcacatcttgtacaacatcacagaatccatactggagagaaaccttacaaatgtgatgaatgtggcaaagtcttcagtcaaaattcataccttgcatatcattggagaattcatactggagaaaaagcttataaatgtaatgaatgtgggaaggtcttcggtctaaactcatccctagcacatcatcggaaaattcacactggagagaaacctttcaaatgtaatgaatgtggcaaagcttttagtatgcgttcaagcctcactaatcatcatgcgatccacactggagagaaacatttcaaatgtaatgaatgtggcaaactcttccgcgacaattcatatcttgtacgtcatcagagatttcatgccggaaagaaatctaacacatgtaattaatgtggcagagtgttcagttagcattaaagccttgtaagacatacaataatttatactggagaaaaactttgcaagtataatgaatgtagcagagcctttagtttttgttcaaggcttaataaccgttagctagaccatagaggacagaaactttactaatgtactgaatgtggcaaggtcttaaggtaaaatctgagaccaggatttttcaaagaattcttgctggtgagaaacctaacaaatgtaatgaatgtggcaaggtcttctggcacaattctcacattgtacaatattgcaaaaattcatgcttgagagaaacaaaaacactgagagtgggaaaccattatgacttcaaacattcatcaacatcagagaatccatactaaagagcatttataataattatatgtgatagagattttccgcaggccaaagtctcactaggcatcaaaaacttttttgatgaaaccatacaaatgtaacgtgcatgcttaagcttttacccaggcatcaaaaccggaacatcacagggtttatactggagagtaactacacaaagataatgtaataagcctttcagtgtaatattcatgattttgtcgtgagagatccactcaataaaaaccaggcaaatgta

SEQ ID NO: 357968 - DNA, 2581 bp, Homo sapiens
  misc_feature (1)..(1): n is a, c, g, or t
nggtgcagtggctcacgcctgtaatcccagcactctgggaggctgatgagggcagatcacaaggtcaggagatcaagaccatcctggtgaacacggtggggccctgtctctactgaaaatacaaaaaaaaatcagccctcagaagttgctggaattacaggtattttttctaaatgtgagatcaaggaattaccaccaaaaaaggagagtaatacaggagaaatattccagacagtaatgttggaaagacatgaaagccacgacatacaagatttttgcttcagagaaacccagaaaaatgtacatgactctcagtgtctgtggaaacatgattgaagacattataagcgagtgcgtgtgacctataaggaaagtctcattggtagaagagacatgcatggtagaaaggatgatgcacaaaagcagcctgttaaaaatcagcttggattaaacccgcagtcacatctaccagaactgcagctatttcaagctgaagggaaaatatataaatatgatcacatggaaaaatctgtcaacagtagttccttagtttccccaccccaacgtatttcttctactgtcaaaacccacatttctcatacatatgaatgtaattttgtggattcattattcacacaaaaagagaaagcaaatattgggacagaacactacaaatgtaatgagcgtggcaaggcctttcatcaaggcttacattttactatacatcaaataatccatactaaagagacgcaatttaaatgtgatatatgtggcaagatcttcaataaaaaatcaaaccttgcaagtcatcaaagaattcatactggagagaagccatataaatgtaatgaatgtggcaaggtcttccataatatgtcacaccttgcacagcatcgcaggattcatactggagagaaaccatataaatgtaatgaatgtggcaaggtctttaatcaaatttcacaccttgcacaacatcaaagaattcataccggagagaaaccttataaatgtaatgaatgtggaaaggtcttccatcaaatttcacaccttgcacaacatcggacaattcatactggagaaaaaccttacgaatgtaacaaatgtggcaaggtgttcagtcgcaattcctaccttgtacaacatctgatcattcatactggagagaaaccttacagatgtaatgtatgtggaaaggtcttccatcatatttcacaccttgcacaacatcagagaatccacactggagagaaaccttacaaatgtaatgagtgtggcaaggtcttcagtcacaagtcatccctagtaaatcactggagaattcatactggagagaaaccttacaaatgtaatgagtgtggcaaggtcttcagtcacaagtcatccctagtaaatcactggagaatccacactggagagaaaccttacaaatgtaatgaatgtggcaaggtcttcagtcgcaattcataccttgcccaacatctgataattcatgccggtgagaaaccttataagtgtgatgaatgtgacaaagcattcagtcaaaattcacatcttgtacaacatcacagaatccatactggagagaaaccttacaaatgtgatgaatgtggcaaagtcttcagtcaaaattcataccttgcatatcattggagaattcatactggagaaaaagcttataaatgtaatgaatgtgggaaggtcttcggtctaaactcatccctagcacatcatcggaaaattcacactggagagaaacctttcaaatgtaatgaatgtggcaaagcttttagtatgcgttcaagcctcactaatcatcatgcgatccacactggagagaaacatttcaaatgtaatgaatgtggcaaactcttccgcgacaattcatatcttgtacgtcatcagagatttcatgccggaaagaaatctaacacatgtaattaatgtggcagagtgttcagttagcattaaagccttgtaagacatacaataatttatactggagaaaaactttgcaagtataatgaatgtagcagagcctttagtttttgttcaaggcttaataaccgttagctagaccatagaggacagaaactttactaatgtactgaatgtggcaaggtcttaaggtaaaatctgagaccaggatttttcaaagaattcttgctggtgagaaacctaacaaatgtaatgaatgtggcaaggtcttctggcacaattctcacattgtacaatattgcaaaaattcatgcttgagagaaacaaaaacactgagagtgggaaaccattatgacttcaaacattcatcaacatcagagaatccatactaaagagcatttataataattatatgtgatagagattttccgcaggccaaagtctcactaggcatcaaaaacttttttgatgaaaccatacaaatgtaacgtgcatgcttaagcttttacccaggcatcaaaaccggaacatcacagggtttatactggagagtaactacacaaagataatgtaataagcctttcagtgtaatattcatgattttgtcgtgagagatccactcaataaaaaccaggcaaatgta

SEQ ID NO: 357969 - DNA, 866 bp, Homo sapiens
ggggcccgccgaggcctggcttctgtcctgcgcgcgcagattctcgcaaatctggaagcggatcgcgtggagtgacggtcacaccgcggcgaattaatttccaaagactcatgttacatgagaaagccaccaagaagaccaaagaaaaggagacaaggatggctcttcctcagggatgcttgactttcaaggatgtggctatagaattctctttggaggagtggaaatgcctgaaccctgcacagagggctttatacagggccgtgatgttggagaactacaggaacctggagtctgtgggattgacttctaaggactcttggtacatgaggaagaaacccggaaggggaagaggaaagcaaaggcgtcaggaatggttcttcctcagggtctattgacattcagggatgtggccatagaattctctcaggaggagtggaaatgcctggaccctgctcagaggactctatacagagatgtgatgttggagaattataggaacctggtctccctgggtattttttctaaatgtgagatcaaggaattaccaccaaaaaaggagagtaatacaggagaaatattccagacagtaatgttggaaagacatgaaagccacgacatacaagatttttgcttcagagaaacccagaaaaatggtctccctctgatgccgagccgaagctggacggtactgctgccatcttggctcactgcaacctccctgcctgattctcctgcctcagcctgctgagtgcctgtgattgcaggcgcgcgccgccacgcctgactggttttcgtatttttttggtggagacggggattcgctgtgttggccgggctggtctccagctcctaaccgggagtga

SEQ ID NO: 357970 - DNA, 724 bp, Homo sapiens
ggggcccgccgaggcctggcttctgtcctgcgcgcgcagattctcgcaaatctggaagcggatcgcgtggagtgacggtcacaccgcggcgaattaatttccaaagactcatgttacatgagaaagccaccaagaagaccaaagaaaaggagacaaggatggctcttcctcagggatgcttgactttcaaggatgtggctatagaattctctttggaggagtggaaatgcctgaaccctgcacagagggctttatacagggccgtgatgttggagaactacaggaacctggagtctgtgggattgacttctaaggactcttggtacatgaggaagaaacccggaaggggaagaggaaagcaaaggcgtcaggaatggttcttcctcagggtctattgacattcagggatgtggccatagaattctctcaggaggagtggaaatgcctggaccctgctcagaggactctatacagagatgtgatgttggagaattataggaacctggtctccctggaattttttctaaatgcgagaccacagaaataccaccaaaacaggagaggcatacccggagaccattccacacagtaaccgcgcaaagcctcgaacccacgacatacaaaactttcgcttcacggacacaccacacgtccatgaccttctactcgcctgggccatgaatcgaagaccttacttagccacgtccgcccgacctcatcggcg

SEQ ID NO: 357971 - DNA, 2509 bp, Homo sapiens
ggcttctgtactgcgcgcgcacatgcgcgcaaacccggaagcggattatgtggagtgaaagttacaccgtggcggattgacttctaaggactcttggtacatgaggaagaaacccggaaggggaagaggaaagcaaaggcgtcaggaatggttcttcctcaggtattttttctaaatgtgagatcaaggaattaccaccaaaaaaggagagtaatacaggagaaatattccagacagtaatgttggaaagacatgaaagccacgacatacaagatttttgcttcagagaaacccagaaaaatgtacatgactctcagtgtctgtggaaacatgattgaagacattataagcgagtgcgtgtgacctataaggaaagtctcattggtagaagagacatgcatggtagaaaggatgatgcacaaaagcagcctgttaaaaatcagcttggattaaacccgcagtcacatctaccagaactgcagctatttcaagctgaagggaaaatatataaatatgatcacatggaaaaatctgtcaacagtagttccttagtttccccaccccaacgtatttcttctactgtcaaaacccacatttctcatacatatgaatgtaattttgtggattcattattcacacaaaaagagaaagcaaatattgggacagaacactacaaatgtaatgagcgtggcaaggcctttcatcaaggcttacattttactatacatcaaataatccatactaaagagacgcaatttaaatgtgatatatgtggcaagatcttcaataaaaaatcaaaccttgcaagtcatcaaagaattcatactggagagaagccatataaatgtaatgaatgtggcaaggtcttccataatatgtcacaccttgcacagcatcgcaggattcatactggagagaaaccatataaatgtaatgaatgtggcaaggtctttaatcaaatttcacaccttgcacaacatcaaagaattcataccggagagaaaccttataaatgtaatgaatgtggaaaggtcttccatcaaatttcacaccttgcacaacatcggacaattcatactggagaaaaaccttacgaatgtaacaaatgtggcaaggtgttcagtcgcaattcctaccttgtacaacatctgatcattcatactggagagaaaccttacagatgtaatgtattgtaatgagtgtggcaaggtcttcagtcacaagtcatccctagtaaatcactggagaattcatactggagagaaaccttacaaatgtaatgagtgtggcaaggtcttcagtcacaagtcatccctagtaaatcactggagaatccacactggagagaaaccttacaaatgtaatgaatgtggcaaggtcttcagtcgcaattcataccttgcccaacatctgataattcatgccggtgagaaaccttataagtgtgatgaatgtgacaaagcattcagtcaaaattcacatcttgtacaacatcacagaatccatactggagagaaaccttacaaatgtgatgaatgtggcaaagtcttcagtcaaaattcataccttgcatatcattggagaattcatactggagaaaaagcttataaatgtaatgaatgtgggaaggtcttcggtctaaactcatccctagcacatcatcggaaaattcacactggagagaaacctttcaaatgtaatgaatgtggcaaagcttttagtatgcgttcaagcctcactaatcatcatgcgatccacactggagagaaacatttcaaatgtaatgaatgtggcaaactcttccgcgacaattcatatcttgtacgtcatcagagatttcatgccggaaagaaatctaacacatgtaattaatgtggcagagtgttcagttagcattaaagccttgtaagacatacaataatttatactggagaaaaactttgcaagtataatgaatgtagcagagcctttagtttttgttcaaggcttaataaccgttagctagaccatagaggacagaaactttactaatgtactgaatgtggcaaggtcttaaggtaaaatctgagaccaggatttttcaaagaattcttgctggtgagaaacctaacaaatgtaatgaatgtggcaaggtcttctggcacaattctcacattgtacaatattgcaaaaattcatgcttgagagaaacaaaaacactgagagtgggaaaccattatgacttcaaacattcatcaacatcagagaatccatactaaagagcatttataataattatatgtgatagagattttccgcaggccaaagtctcactaggcatcaaaaacttttttgatgaaaccatacaaatgtaacgtgcatgcttaagcttttacccaggcatcaaaaccggaacatcacagggtttatactggagagtaactacacaaagataatgtaataagcctttcagtgtaatattcatgattttgtcgtgagagatccactcaataaaaaccaggcaaatgta

SEQ ID NO: 357972 - DNA, 2870 bp, Homo sapiens
ggcttctgtactgcgcgcgcacatgcgcgcaaacccggaagcggattatgtggagtgaaagttacaccgtggcggattgacttctaaggactcttggtacatgaggaagaaacccggaaggggaagaggaaagcaaaggcgtcaggaatggttcttcctcagggtctattgacattcagggatgtggccatagaattctctcaggaggagtggaaatgcctggaccctgctcagaggactctatacagagatgtgatgttggagaattataggaacctggtctccctggatgttctgcgttcttcatgatagctcagtgggggttccagaagtaaagaaggcttaaaaccttatggctggcaaggcgtggtgactcatgcctgtaatcccagcactttgggaggccaaagcttgtggatcacttcagtggagtgcagtggcacaatctcggctcaccaccacctccgcctcccgggttcaagcgattctcccgcctcagcctcagaagttgctggaattacaggtattttttctaaatgtgagatcaaggaattaccaccaaaaaaggagagtaatacaggagaaatattccagacagtaatgttggaaagacatgaaagccacgacatacaagatttttgcttcagagaaacccagaaaaatgtacatgactctcagtgtctgtggaaacatgattgaagacattataagcgagtgcgtgtgacctataaggaaagtctcattggtagaagagacatgcatggtagaaaggatgatgcacaaaagcagcctgttaaaaatcagcttggattaaacccgcagtcacatctaccagaactgcagctatttcaagctgaagggaaaatatataaatatgatcacatggaaaaatctgtcaacagtagttccttagtttccccaccccaacgtatttcttctactgtcaaaacccacatttctcatacatatgaatgtaattttgtggattcattattcacacaaaaagagaaagcaaatattgggacagaacactacaaatgtaatgagcgtggcaaggcctttcatcaaggcttacattttactatacatcaaataatccatactaaagagacgcaatttaaatgtgatatatgtggcaagatcttcaataaaaaatcaaaccttgcaagtcatcaaagaattcatactggagagaagccatataaatgtaatgaatgtggcaaggtcttccataatatgtcacaccttgcacagcatcgcaggattcatactggagagaaaccatataaatgtaatgaatgtggcaaggtctttaatcaaatttcacaccttgcacaacatcaaagaattcataccggagagaaaccttataaatgtaatgaatgtggaaaggtcttccatcaaatttcacaccttgcacaacatcggacaattcatactggagaaaaaccttacgaatgtaacaaatgtggcaaggtgttcagtcgcaattcctaccttgtacaacatctgatcattcatactggagagaaaccttacagatgtaatgtattgtaatgagtgtggcaaggtcttcagtcacaagtcatccctagtaaatcactggagaattcatactggagagaaaccttacaaatgtaatgagtgtggcaaggtcttcagtcacaagtcatccctagtaaatcactggagaatccacactggagagaaaccttacaaatgtaatgaatgtggcaaggtcttcagtcgcaattcataccttgcccaacatctgataattcatgccggtgagaaaccttataagtgtgatgaatgtgacaaagcattcagtcaaaattcacatcttgtacaacatcacagaatccatactggagagaaaccttacaaatgtgatgaatgtggcaaagtcttcagtcaaaattcataccttgcatatcattggagaattcatactggagaaaaagcttataaatgtaatgaatgtgggaaggtcttcggtctaaactcatccctagcacatcatcggaaaattcacactggagagaaacctttcaaatgtaatgaatgtggcaaagcttttagtatgcgttcaagcctcactaatcatcatgcgatccacactggagagaaacatttcaaatgtaatgaatgtggcaaactcttccgcgacaattcatatcttgtacgtcatcagagatttcatgccggaaagaaatctaacacatgtaattaatgtggcagagtgttcagttagcattaaagccttgtaagacatacaataatttatactggagaaaaactttgcaagtataatgaatgtagcagagcctttagtttttgttcaaggcttaataaccgttagctagaccatagaggacagaaactttactaatgtactgaatgtggcaaggtcttaaggtaaaatctgagaccaggatttttcaaagaattcttgctggtgagaaacctaacaaatgtaatgaatgtggcaaggtcttctggcacaattctcacattgtacaatattgcaaaaattcatgcttgagagaaacaaaaacactgagagtgggaaaccattatgacttcaaacattcatcaacatcagagaatccatactaaagagcatttataataattatatgtgatagagattttccgcaggccaaagtctcactaggcatcaaaaacttttttgatgaaaccatacaaatgtaacgtgcatgcttaagcttttacccaggcatcaaaaccggaacatcacagggtttatactggagagtaactacacaaagataatgtaataagcctttcagtgtaatattcatgattttgtcgtgagagatccactcaataaaaaccaggcaaatgta

SEQ ID NO: 357973 - DNA, 2596 bp, Homo sapiens
atcgagacagtctcactctagcctgggagacagccaggctccatctcaaaaaaaaaaaaacacaaaaattatccaggcgtgatggcacatgtctgtaatcccaggtactagaaaggctaaggtaagattatcacctgaacctgggaggcaatgtggagtgcagtggcacaatctcggctcaccaccacctccgcctcccgggttcaagcgattctcccgcctcagcctcagaagttgctggaattacaggtattttttctaaatgtgagatcaaggaattaccaccaaaaaaggagagtaatacaggagaaatattccagacagtaatgttggaaagacatgaaagccacgacatacaagatttttgcttcagagaaacccagaaaaatgtacatgactctcagtgtctgtggaaacatgattgaagacattataagcgagtgcgtgtgacctataaggaaagtctcattggtagaagagacatgcatggtagaaaggatgatgcacaaaagcagcctgttaaaaatcagcttggattaaacccgcagtcacatctaccagaactgcagctatttcaagctgaagggaaaatatataaatatgatcacatggaaaaatctgtcaacagtagttccttagtttccccaccccaacgtatttcttctactgtcaaaacccacatttctcatacatatgaatgtaattttgtggattcattattcacacaaaaagagaaagcaaatattgggacagaacactacaaatgtaatgagcgtggcaaggcctttcatcaaggcttacattttactatacatcaaataatccatactaaagagacgcaatttaaatgtgatatatgtggcaagatcttcaataaaaaatcaaaccttgcaagtcatcaaagaattcatactggagagaagccatataaatgtaatgaatgtggcaaggtcttccataatatgtcacaccttgcacagcatcgcaggattcatactggagagaaaccatataaatgtaatgaatgtggcaaggtctttaatcaaatttcacaccttgcacaacatcaaagaattcataccggagagaaaccttataaatgtaatgaatgtggaaaggtcttccatcaaatttcacaccttgcacaacatcggacaattcatactggagaaaaaccttacgaatgtaacaaatgtggcaaggtgttcagtcgcaattcctaccttgtacaacatctgatcattcatactggagagaaaccttacagatgtaatgtattgtaatgagtgtggcaaggtcttcagtcacaagtcatccctagtaaatcactggagaattcatactggagagaaaccttacaaatgtaatgagtgtggcaaggtcttcagtcacaagtcatccctagtaaatcactggagaatccacactggagagaaaccttacaaatgtaatgaatgtggcaaggtcttcagtcgcaattcataccttgcccaacatctgataattcatgccggtgagaaaccttataagtgtgatgaatgtgacaaagcattcagtcaaaattcacatcttgtacaacatcacagaatccatactggagagaaaccttacaaatgtgatgaatgtggcaaagtcttcagtcaaaattcataccttgcatatcattggagaattcatactggagaaaaagcttataaatgtaatgaatgtgggaaggtcttcggtctaaactcatccctagcacatcatcggaaaattcacactggagagaaacctttcaaatgtaatgaatgtggcaaagcttttagtatgcgttcaagcctcactaatcatcatgcgatccacactggagagaaacatttcaaatgtaatgaatgtggcaaactcttccgcgacaattcatatcttgtacgtcatcagagatttcatgccggaaagaaatctaacacatgtaattaatgtggcagagtgttcagttagcattaaagccttgtaagacatacaataatttatactggagaaaaactttgcaagtataatgaatgtagcagagcctttagtttttgttcaaggcttaataaccgttagctagaccatagaggacagaaactttactaatgtactgaatgtggcaaggtcttaaggtaaaatctgagaccaggatttttcaaagaattcttgctggtgagaaacctaacaaatgtaatgaatgtggcaaggtcttctggcacaattctcacattgtacaatattgcaaaaattcatgcttgagagaaacaaaaacactgagagtgggaaaccattatgacttcaaacattcatcaacatcagagaatccatactaaagagcatttataataattatatgtgatagagattttccgcaggccaaagtctcactaggcatcaaaaacttttttgatgaaaccatacaaatgtaacgtgcatgcttaagcttttacccaggcatcaaaaccggaacatcacagggtttatactggagagtaactacacaaagataatgtaataagcctttcagtgtaatattcatgattttgtcgtgagagatccactcaataaaaaccaggcaaatgta

SEQ ID NO: 357974 - DNA, 3302 bp, Homo sapiens
ggcttctgtactgcgcgcgcacatgcgcgcaaacccggaagcggattatgtggagtgaaagttacaccgtggcggattgacttctaaggactcttggtacatgaggaagaaacccggaaggggaagaggaaagcaaaggcgtcaggaatggttcttcctcagggtctattgacattcagggatgtggccatagaattctctcaggaggagtggaaatgcctggaccctgctcagaggactctatacagagatgtgatgttggagaattataggaacctggtctccctggatgttctgcgttcttcatgatagctcagtgggggttccagaagtaaagaaggcttaaaaccttatggctggcaaggcgtggtgactcatgcctgtaatcccagcactttgggaggccaaagcttgtggatcacttcagtggagtgcagtggcacaatctcggctcaccaccacctccgcctcccgggttcaagcgattctcccgcctcagcctcagaagttgctggaattacaggtattttttctaaatgtgagatcaaggaattaccaccaaaaaaggagagtaatacaggagaaatattccagacagtaatgttggaaagacatgaaagccacgacatacaagatttttgcttcagagaaacccagaaaaatgtacatgactctcagtgtctgtggaaacatgattgaagacattataagcgagtgcgtgtgacctataaggaaagtctcattggtagaagagacatgcatggtagaaaggatgatgcacaaaagcagcctgttaaaaatcagcttggattaaacccgcagtcacatctaccagaactgcagctatttcaagctgaagggaaaatatataaatatgatcacatggaaaaatctgtcaacagtagttccttagtttccccaccccaacgtatttcttctactgtcaaaacccacatttctcatacatatgaatgtaattttgtggattcattattcacacaaaaagagaaagcaaatattgggacagaacactacaaatgtaatgagcgtggcaaggcctttcatcaaggcttacattttactatacatcaaataatccatactaaagagacgcaatttaaatgtgatatatgtggcaagatcttcaataaaaaatcaaaccttgcaagtcatcaaagaattcatactggagagaagccatataaatgtaatgaatgtggcaaggtcttccataatatgtcacaccttgcacagcatcgcaggattcatactggagagaaaccatataaatgtaatgaatgtggcaaggtctttaatcaaatttcacaccttgcacaacatcaaagaattcataccggagagaaaccttataaatgtaatgaatgtggaaaggtcttccatcaaatttcacaccttgcacaacatcggacaattcatactggagaaaaaccttacgaatgtaacaaatgtggcaaggtgttcagtcgcaattcctaccttgtacaacatctgatcattcatactggagagaaaccttacagatgtaatgtatgtggaaaggtcttccatcatatttcacaccttgcacaacatcagagaatccacactggagagaaaccttacaaatgtaatgagtgtggcaaggtcttcagtcacaagtcatccctagtaaatcactggagaattcatactggagagaaaccttacaaatgtaatgagtgtggcaaggtcttcagtcacaagtcatccctagtaaatcactggagaatccacactggagagaaaccttacaaatgtaatgaatgtggcaaggtcttcagtcgcaattcataccttgcccaacatctgataattcatgccggtgagaaaccttataagtgtgatgaatgtgacaaagcattcagtcaaaattcacatcttgtacaacatcacagaatccatactggagagaaaccttacaaatgtgatgaatgtggcaaagtcttcagtcaaaattcataccttgcatatcattggagaattcatactggagaaaaagcttataaatgtaatgaatgtgggaaggtcttcggtctaaactcatccctagcacatcatcggaaaattcacactggagagaaacctttcaaatgtaatgaatgtggcaaagcttttagtatgcgttcaagcctcactaatcatcatgcgatccacactggagagaaacatttcaaatgtaatgaatgtggcaaactcttccgcgacaattcatatcttgtacgtcatcagagatttcatgccggaaagaaatctaacacatgtaattaatgtggcagagtgttcagttagcattaaagccttgtaagacatacaataatttatactggagaaaaactttgcaagtataatgaatgtagcagagcctttagtttttgttcaaggcttaataaccgttagctagaccatagaggacagaaactttactaatgtactgaatgtggcaaggtcttaaggtaaaatctgagaccaggatttttcaaagaattcttgctggtgagaaacctaacaaatgtaatgaatgtggcaaggtcttctggcacaattctcacattgtacaatattgcaaaaattcatgcttgagagaaacaaaaacactgagagtgggaaaccattatgacttcaaacattcatcaacatcagagaatccatactaaagagcatttataataattatatgtgatagagattttccgcaggccaaagtctcactaggcatcaaaaacttttttgatgaaaccatacaaatgtaacgtgcatgcttaagcttttacccaggcatcaaaaccggaacatcacagggtttatactggagagtaactacacaaagataatgtaataagcctttcagtgtaatattcatgattttgtcgtgagagatccactcaataaaaaccaggcaaatgtaaaaaaaaaaaaggttactaatctaagatgcatcctcagggttcattaaaaattcatagtggagggccggacccagtgactcatgcctgtaatcccagaactttgggagaccgaggcaggtggatcatgaagtcaagagattgagaccatcctagccaaccaacatggtgaaatcccgtctctactaaaaattcaaaaattagctgggggtggtggcacacgcctgtagtccacactgcttgggagaccgaggcaggagagtcacttgaacccggcaggcagaggttgcagtgagccgagatcacaccactgcactccagcctggtcgacagagcgagattctgtctcaaaaaaaaaaa

SEQ ID NO: 357975 - DNA, 2777 bp, Homo sapiens
ggcttctgtactgcgcgcgcacatgcgcgcaaacccggaagcggattatgtggagtgaaagttacaccgtggcggattgacttctaaggactcttggtacatgaggaagaaacccggaaggggaagaggaaagcaaaggcgtcaggaatggttcttcctcagggtctattgacattcagggatgtggccatagaattctctcaggaggagtggaaatgcctggaccctgctcagaggactctatacagagatgtgatgttggagaattataggaacctggtctccctggatgttctgcgttcttcatgatagctcagtgggggttccagaagtaaagaaggcttaaaaccttatggctggcaaggcgtggtgactcatgcctgtaatcccagcactttgggaggccaaagcttgtggatcacttcagtggagtgcagtggcacaatctcggctcaccaccacctccgcctcccgggttcaagcgattctcccgcctcagcctcagaagttgctggaattacaggtattttttctaaatgtgagatcaaggaattaccaccaaaaaaggagagtaatacaggagaaatattccagacagtaatgttggaaagacatgaaagccacgacatacaagatttttgcttcagagaaacccagaaaaatgtacatgactctcagtgtctgtggaaacatgattgaagacattataagcgagtgcgtgtgacctataaggaaagtctcattggtagaagagacatgcatggtagaaaggatgatgcacaaaagcagcctgttaaaaatcagcttggattaaacccgcagtcacatctaccagaactgcagctatttcaagctgaagggaaaatatataaatatgatcacatggaaaaatctgtcaacagtagttccttagtttccccaccccaacgtatttcttctactgtcaaaacccacatttctcatacatatgaatgtaattttgtggattcattattcacacaaaaagagaaagcaaatattgggacagaacactacaaatgtaatgagcgtggcaaggcctttcatcaaggcttacattttactatacatcaaataatccatactaaagagacgcaatttaaatgtgatatatgtggcaagatcttcaataaaaaatcaaaccttgcaagtcatcaaagaattcatactggagagaagccatataaatgtaatgaatgtggcaaggtcttccataatatgtcacaccttgcacagcatcgcaggattcatactggagagaaaccatataaatgtaatgaatgtggcaaggtctttaatcaaatttcacaccttgcacaacatcaaagaattcataccggagagaaaccttataaatgtaatgaatgtggaaaggtcttccatcaaatttcacaccttgcacaacatcggacaattcatactggagaaaaaccttacgaatgtaacaaatgtggcaaggtgttcagtcgcaattcctaccttgtacaacatctgatcattcatactggagagaaaccttacagatgtaatgtattgtggcaaggtcttcagtcacaagtcatccctagtaaatcactggagaatccacactggagagaaaccttacaaatgtaatgaatgtggcaaggtcttcagtcgcaattcataccttgcccaacatctgataattcatgccggtgagaaaccttataagtgtgatgaatgtgacaaagcattcagtcaaaattcacatcttgtacaacatcacagaatccatactggagagaaaccttacaaatgtgatgaatgtggcaaagtcttcagtcaaaattcataccttgcatatcattggagaattcatactggagaaaaagcttataaatgtaatgaatgtgggaaggtcttcggtctaaactcatccctagcacatcatcggaaaattcacactggagagaaacctttcaaatgtaatgaatgtggcaaagcttttagtatgcgttcaagcctcactaatcatcatgcgatccacactggagagaaacatttcaaatgtaatgaatgtggcaaactcttccgcgacaattcatatcttgtacgtcatcagagatttcatgccggaaagaaatctaacacatgtaattaatgtggcagagtgttcagttagcattaaagccttgtaagacatacaataatttatactggagaaaaactttgcaagtataatgaatgtagcagagcctttagtttttgttcaaggcttaataaccgttagctagaccatagaggacagaaactttactaatgtactgaatgtggcaaggtcttaaggtaaaatctgagaccaggatttttcaaagaattcttgctggtgagaaacctaacaaatgtaatgaatgtggcaaggtcttctggcacaattctcacattgtacaatattgcaaaaattcatgcttgagagaaacaaaaacactgagagtgggaaaccattatgacttcaaacattcatcaacatcagagaatccatactaaagagcatttataataattatatgtgatagagattttccgcaggccaaagtctcactaggcatcaaaaacttttttgatgaaaccatacaaatgtaacgtgcatgcttaagcttttacccaggcatcaaaaccggaacatcacagggtttatactggagagtaactacacaaagataatgtaataagcctttcagtgtaatattcatgattttgtcgtgagagatccactcaataaaaaccaggcaaatgta

SEQ ID NO: 357976 - DNA, 1216 bp, Homo sapiens
ctctctctctctcttttctgactctctgtctctttctccctctctactggagagaaaccttacaaatgtaatgaatgtggcaaggtcttcagtcgcaattcataccttgcccaacatctgataattcatgccggtgagaaaccttataagtgtgatgaatgtgacaaagcattcagtcaaaattcacatcttgtacaacatcacagaatccatactggagagaaaccttacaaatgtgatgaatgtggcaaagtcttcagtcaaaattcataccttgcatatcattggagaattcatactggagaaaaagcttataaatgtaatgaatgtgggaaggtcttcggtctaaactcatccctagcacatcatcggaaaattcacactggagagaaacctttcaaatgtaatgaatgtggcaaagcttttagtatgcgttcaagcctcactaatcatcatgcgatccacactggagagaaacatttcaaatgtaatgaatgtggcaaactcttccgcgacaattcatatcttgtacgtcatcagagatttcatgccggaaagaaatctaacacatgtaattaatgtggcagagtgttcagttagcattaaagccttgtaagacatacaataatttatactggagaaaaactttgcaagtataatgaatgtagcagagcctttagtttttgttcaaggcttaataaccgttagctagaccatagaggacagaaactttactaatgtactgaatgtggcaaggtcttaaggtaaaatctgagaccaggatttttcaaagaattcttgctggtgagaaacctaacaaatgtaatgaatgtggcaaggtcttctggcacaattctcacattgtacaatattgcaaaaattcatgcttgagagaaacaaaaacactgagagtgggaaaccattatgacttcaaacattcatcaacatcagagaatccatactaaagagcatttataataattatatgtgatagagattttccgcaggccaaagtctcactaggcatcaaaaacttttttgatgaaaccatacaaatgtaacgtgcatgcttaagcttttacccaggcatcaaaaccggaacatcacagggtttatactggagagtaactacacaaagataatgtaataagcctttcagtgtaatattcatgattttgtcgtgagagatccactcaataaaaaccaggcaaatgta

SEQ ID NO: 357977 - DNA, 1794 bp, Homo sapiens
ggcttctgtactgcgcgcgcacatgcgcgcaaacccggaagcggattatgtggagtgaaagttacaccgtggcggattgacttctaaggactcttggtacatgaggaagaaacccggaaggggaagaggaaagcaaaggcgtcaggaatggttcttcctcagggtctattgacattcagggatgtggccatagaattctctcaggaggagtggaaatgcctggaccctgctcagaggactctatacagagatgtgatgttggagaattataggaacctggtctccctggatgttctgcgttcttcatgatagctcagtgggggttccagaagtaaagaaggcttaaaaccttatggctggcaaggcgtggtgactcatgcctgtaatcccagcactttgggaggccaaagcttgtggatcacttcagtggagtgcagtggcacaatctcggctcaccaccacctccgcctcccgggttcaagcgattctcccgcctcagcctcagaagttgctggaattacaggtattttttctaaatgtgagatcaaggaattaccaccaaaaaaggagagtaatacaggagaaatattccagacagtaatgttggaaagacatgaaagccacgacatacaagatttttgcttcagagaaacccagaaaaatgtacatgactctcagtgtctgtggaaacatgattgaagacattataagcgagtgcgtgtgacctataaggaaagtctcattggtagaagagacatgcatggtagaaaggatgatgcacaaaagcagcctgttaaaaatcagcttggattaaacccgcagtcacatctaccagaactgcagctatttcaagctgaagggaaaatatataaatatgatcacatggaaaaatctgtcaacagtagttccttagtttccccaccccaacgtatttcttctactgtcaaaacccacatttctcatacatatgaatgtaattttgtggattcattattcacacaaaaagagaaagcaaatattgggacagaacactacaaatgtaatgagcgtggcaaggcctttcatcaaggcttacattttactatacatcaaataatccatactaaagagacgcaatttaaatgtgatatatgtggcaagatcttcaataaaaaatcaaaccttgcaagtcatcaaagaattcatactggagagaagccatataaatgtaatgaatgtggcaaggtcttccataatatgtcacaccttgcacagcatcgcaggattcatactggagagaaaccatataaatgtaatgaatgtggcaaggtctttaatcaaatttcacaccttgcacaacatcaaagaattcataccggagagaaaccttataaatgtaatgaatgtggaaaggtcttccatcaaatttcacaccttgcacaacatcggacaattcatactggagaaaaaccttacgaatgtaacaaatgtggcaaggtgttcagtcgcaattcctaccttgtacaacatctgatcattcatactggagagaaaccttacagatgtaatgtatgtggaaaggtcttccatcatatttcacaccttgcacaacatcagagaatccacactggagagaaaccttacaaacatacaaatgtaacgtgcatgcttaagcttttacccaggcatcaaaaccggaacatcacagggtttatactggagagtaactacacaaagataatgtaataagcctttcagtgtaatattcatgattttgtcgtgagagatccactcaataaaaaccaggcaaatgta

SEQ ID NO: 357978 - DNA, 2515 bp, Homo sapiens
  misc_feature (1)..(1): n is a, c, g, or t
nggtgcagtggctcacgcctgtaatcccagcactctgggaggctgatgagggcagatcacaaggtcaggagatcaagaccatcctggtgaacacggtggggccctgtctctactgaaaatacaaaaaaaaatcagctcagaagttgctggaattaaccgggttattttttccttaattgtggtggagactcagggaattaccaccaaaaaaggagagtaatacaggagaaatattccagacagtaatgttggaaagacatgaaagccacgacatacaagatttttgcttcagagaaacccagaaaaatgtacatgactctcagtgtctgtggaaacatgattgaagacattataagcgagtgcgtgtgacctataaggaaagtctcattggtagaagagacatgcatggtagaaaggatgatgcacaaaagcagcctgttaaaaatcagcttggattaaacccgcagtcacatctaccagaactgcagctatttcaagctgaagggaaaatatataaatatgatcacatggaaaaatctgtcaacagtagttccttagtttccccaccccaacgtatttcttctactgtcaaaacccacatttctcatacatatgaatgtaattttgtggattcattattcacacaaaaagagaaagcaaatattgggacagaacactacaaatgtaatgagcgtggcaaggcctttcatcaaggcttacattttactatacatcaaataatccatactaaagagacgcaatttaaatgtgatatatgtggcaagatcttcaataaaaaatcaaaccttgcaagtcatcaaagaattcatactggagagaagccatataaatgtaatgaatgtggcaaggtcttccataatatgtcacaccttgcacagcatcgcaggattcatactggagagaaaccatataaatgtaatgaatgtggcaaggtctttaatcaaatttcacaccttgcacaacatcaaagaattcataccggagagaaaccttataaatgtaatgaatgtggaaaggtcttccatcaaatttcacaccttgcacaacatcggacaattcatactggagaaaaaccttacgaatgtaacaaatgtggcaaggtgttcagtcgcaattcctaccttgtacaacatctgatcattcatactggagagaaaccttacagatgtaatgtattgtaatgagtgtggcaaggtcttcagtcacaagtcatccctagtaaatcactggagaattcatactggagagaaaccttacaaatgtaatgagtgtggcaaggtcttcagtcacaagtcatccctagtaaatcactggagaatccacactggagagaaaccttacaaatgtaatgaatgtggcaaggtcttcagtcgcaattcataccttgcccaacatctgataattcatgccggtgagaaaccttataagtgtgatgaatgtgacaaagcattcagtcaaaattcacatcttgtacaacatcacagaatccatactggagagaaaccttacaaatgtgatgaatgtggcaaagtcttcagtcaaaattcataccttgcatatcattggagaattcatactggagaaaaagcttataaatgtaatgaatgtgggaaggtcttcggtctaaactcatccctagcacatcatcggaaaattcacactggagagaaacctttcaaatgtaatgaatgtggcaaagcttttagtatgcgttcaagcctcactaatcatcatgcgatccacactggagagaaacatttcaaatgtaatgaatgtggcaaactcttccgcgacaattcatatcttgtacgtcatcagagatttcatgccggaaagaaatctaacacatgtaattaatgtggcagagtgttcagttagcattaaagccttgtaagacatacaataatttatactggagaaaaactttgcaagtataatgaatgtagcagagcctttagtttttgttcaaggcttaataaccgttagctagaccatagaggacagaaactttactaatgtactgaatgtggcaaggtcttaaggtaaaatctgagaccaggatttttcaaagaattcttgctggtgagaaacctaacaaatgtaatgaatgtggcaaggtcttctggcacaattctcacattgtacaatattgcaaaaattcatgcttgagagaaacaaaaacactgagagtgggaaaccattatgacttcaaacattcatcaacatcagagaatccatactaaagagcatttataataattatatgtgatagagattttccgcaggccaaagtctcactaggcatcaaaaacttttttgatgaaaccatacaaatgtaacgtgcatgcttaagcttttacccaggcatcaaaaccggaacatcacagggtttatactggagagtaactacacaaagataatgtaataagcctttcagtgtaatattcatgattttgtcgtgagagatccactcaataaaaaccaggcaaatgta

SEQ ID NO: 357979 - DNA, 305 bp, Homo sapiens
ttgtcttcagctgatcgccatacattgctctctgcctaagaactggaggctttgcaggacttggggaggccaaggagggcagatcacctgaggtcaggagttcaagaccagcctggccaaaatggtgaaaccccacctctactaaaaatacaaaaattagctggatgtggtggcatgcacctgtaatcccagctactcaggaggctgaggctggagaatcacttgaatccaggaggcggaggtttcagtgagcagagatcacgccactgcactcctgccttggcgacagagcaagactctgtctc

SEQ ID NO: 357980 - DNA, 243 bp, Homo sapiens
gcggcgcctactactactaaattcgcggccgcgtcgaccccctcaacatgaggggcttccattttctgtgttttgtaagggaactgtttccttcatgccgccatgttcctgatattagttctgatttctttttaacaaatgttatcatgattaagaaaatttccagcactttaatggccaattaactgagaatgtaagaaaattgatgctgtacaaggcaaataaagctgtttattaaccttg

SEQ ID NO: 357981 - DNA, 5400 bp, Homo sapiens
aaagggccagaggtagacattgaaggtcctgaagggaagctcaaaggtcccaagtttaagatgcctgatgtacatttcaaaagcccacaaatctccatgagtgacattgatttgaatttgaaaggacctaagataaaaggagatatggacatttccgttcctaaactggagggagatctgaaaggtcccaaagtggatgtcaaaggccctaaagtgggcattgacactcctgatattgacattcatggtccagaagggaaactgaagggccccaaatttaaaatgcctgacttacacctcaaggcaccgaagatctctatgcctgaagttgacctgaatctgaaaggtccaaaggtgaagggcgacatggacatttctctgcccaaagtggaaggcgacctcaagggccccgaagttgacatcaagggccccaaagtggacattgatgtcccagatgtggacgttcaaggcccagactggcacctaaaaatgcccaaagtgaaaatgcccaagttcagcatgcctggcttcaaaggagagggcccagatgtggatgtgaacctgcccaaggctgacattgatgtctcaggacccaaagtggacgttgatgttcctgatgtgaatatcgaaggtccagatgcgaaactaaagggccccaagttcaagatgcctgagatgagcatcaaagcccccaagatctccatgcctgatattgacttaaacctgaaaggacccaaagtgaagggcgatgtggatgttacccttcctaaagtggaaggtgacctcaagggcccagaagctgacatcaagggcccaaaagtggacatcaacacccctgatgtggatgttcatggcccagactggcacctgaagatgcccaaggtgaaaatgcccaaattcagcatgcctggcttcaaaggagaaggtccagatgtggatgtgagcctgcccaaggccgacatcgatgtctcgggacccaaggtggacgttgatattccagatgtgaatatcgaaggtccagacgcaaaactgaagggccccaagttcaagatgcctgaaataaatatcaaagctcccaagatctccatacctgatgttgacctggatttgaaaggacccaaagtaaaaggagattttgatgtgtctgtccctaaggttgaagggactttgaaaggcccagaagtagatcttaaaggtccacgtctggatttcgaaggccctgatgccaaactcagtggcccatctttgaagatgccatcgctggagatatctgctcctaaagtaactgctcctgatgttgatttgcatctcaaggcaccaaaaattggattttcaggtccgaagttagaaggtggtgaagtggacctcaagggacccaaagttgaagctccaagcttagatgtacacatggacagcccagatattaacatcgaagggccagatgttaaaatccccaaatttaagaaacccaagtttggatttggggcaaaaagccccaaagctgacatcaagtcaccttcactggatgtcactgttcctgaggcagagctgaaccttgagactcctgaaattagtgttggtggcaagggcaagaaaagtaagtttaaaatgcctaaaattcatatgagtggtcctaagattaaggccaaaaaacagggatttgacctgaatgttcctgggggtgaaattgatgccagcctcaaggctccggatgtagatgtcaacatcgcagggccggatgctgcactcaaagtcgacgtgaaatcgcccaaaaccaagaaaacgatgtttggaaaaatgtacttcccagatgtagagtttgacattaaatcacctaaatttaaagctgaggcccctctccctagccccaaactggagggtgaactccaggcacctgatctggaactttctttgccagcgattcacgtcgaaggtcttgacatcaaggcgaaggctcccaaggtcaagatgccagatgtggacatctcagtgccaaaaatagagggtgacctgaaaggccccaaagtgcaggcaaacttgggtgcacctgacatcaacatcgaaggcctagatgctaaagtcaaaacaccgtccttcggcatttctgcccctcaagtctccatccctgatgtgaatgtaaacttgaaaggaccaaagataaagggtgatgtccccagcgtgggactggaaggaccagatgtagatctgcaaggtccagaagcaaaaattaagttccccaagttttccatgcccaagatcggcatcccaggtgtgaaaatggagggtgggggagccgaggtccatgcccagctaccctctcttgaaggagacttgagaggaccagatgttaagctcgaagggcccgatgtttctctaaaggggccaggagtagacttgccttcagtgaacctctctatgccaaaagtctctgggcctgaccttgatctgaacttgaaaggaccaagtttgaagggagacctggatgcatctgttcccagcatgaaggtgcatgctccagggctcaacctcagtggtgtcggtggcaaaatgcaggtgggaggagacggtgtgaaagtgccagggatcgatgccacaacaaagcttaacgttggggcaccagatgtgacactgaggggaccaagcctgcagggagatctggctgtctctggtgacatcaaatgccctaaagtatccgtaggagctcctgatctaagcttggaggcatccgaaggcagcattaaacttcccaaaatgaagctgccccaatttggcatctctactccggggtccgacttgcacgtcaatgccaaggggccacaggtttctggcgaactgaaggggccaggtgtggatgtgaacctgaaagggcctcggatttcagcaccgaatgtggactttaacttggaaggaccaaaagtgaaagggagccttggggccactggtgagatcaaaggccccactgtcggaggaggtcttccaggcattggtgttcaaggcctagaaggaaacctccagatgcctggaattaagtcctctggatgtgatgtgaacctgccaggcgtgaatgtgaaactcccaactgggcagatttctgggcctgaaatcaaaggtggtctgaaaggttcagaagtaggtttccatggggctgctcctgatatcagtgtgaaggggcctgcctttaatatggcatctcctgagtcagattttggcatcaacttgaagggcccaaaaatcaaaggaggtgcggatgtttcagggggtgtcagtgccccagacatcagccttggtgaagggcatttgagtgttaaaggttccgggggtgagtggaagggaccccaagtctcctctgctctcaacttggacacatctaagtttgctgggggccttcatttctcaggaccaaaggtggaaggaggtgtgaaaggaggtcagattggactccaggctcctgggctgagtgtgtctgggcctcaaggtcacttggaaagtggatctggaaaagtaacattccctaaaatgaagatccccaaatttaccttctctggccgtgagctggttggcagagaaatgggggtggatgttcacttccctaaagcagaggccagcatccaagctggtgctggagacggcgagtgggaagagtctgaagtcaaactgaaaaagtccaagatcaaaatgcccaagtttaatttttccaaacctaaagggaaaggtggtgtcactggctcaccagaagcatcaatttctgggtccaaaggtgacctgaaaagttcaaaggccagcctgggctctctggaaggagaggcagaggccgaagcctcttcaccgaaaggcaaattctccttatttaaaagtaagaagccacggcaccgctcaaattcattcagtgatgaaagagagttctctggaccttccaccccgacggggacgctggagtttgaaggtggggaagtgtctctggaaggtgggaaagttaaagggaaacacgggaagctgaaattcggtacctttggtggattggggtcaaagagcaaaggtcattatgaggtgactgggagcgatgatgagacaggcaagttacaggggagtggggtgtccctggcctctaagaagtcccgactgtcctcctcttctagcaatgacagtgggaataaggttggcatccagcttcccgaggtggagctgtcagtttccacaaagaaagagtagcaggcctttgtatgtgtgtacatatatatatatataacaaaacatcagccttgggtggtgtgttcctatataaactccaaagggaaacacaccgactgcctcagcaatcatgcaaagaccttgcctggcccggtggcaagcgctgaaaaaccgaccgcctgtaggctcctggaactatacagataggtaaagagttccaagttcgtccagcccatgtgcaaagtcaacagtatttgccttaagatttcatatatatatatttttttgcattgactgctgagagctcctgtttactaagcaagcttttgtgtttattatcctcatttttactgaacattgttagttttggggtaatggaaacccactttttcattgtaatgactttgggggcttttgttagtaagggtgggtggggtgatgggttgcagacggaggtcaggtcttcctctttcctgagactggatctgttcaaacagcaaacgcccacagatggcccagaggtggtggtagtcagggtgtgtgggtgtttttagggttctttagtgttgtttctttcacccaggggtggtggtcccagccagtttggtgctgacggtgagaggaaattagaatctgtttgcaaattgtccaacccaccccctcaacatgaggggcttccattttctgtgttttgtaagggaactgtttccttcatgccgccatgttcctgatattagttctgatttctttttaacaaatgttatcatgattaagaaaatttccagcactttaatggccaattaactgagaatgtaagaaaattgatgctgtacaaggcaaataaagctgtttattaaccttgaaaaaaaaaaaaaaaaaaaaaaaaaaaaaaaaaaagaaaaaaaaacaaaacaaaacagaaaaaaaaaaaaagggggggggggcgccctcgcacacagaaaaaattctaaacacacagggggggggggccggcgacccatggggtaaaagctaacatgggccaagcgtgtccaaaggaacaccggggacaagagaacggggggtcgcggcatcctcacaacaaaaagaaacagcggcgccggagaacacgccgcgcgtgcttgagacaacaccgcgagaggggagcctgcacgggcgtacacgcggccactacacacacagagcggaccccccgagagacagaaaaaaggg

SEQ ID NO: 357982 - DNA, 5579 bp, Homo sapiens
  misc_feature (5126)..(5126): n is a, c, g, or t
  misc_feature (5134)..(5135): n is a, c, g, or t
  misc_feature (5137)..(5137): n is a, c, g, or t
  misc_feature (5140)..(5140): n is a, c, g, or t
  misc_feature (5279)..(5279): n is a, c, g, or t
aaagggccagaggtagacattgaaggtcctgaagggaagctcaaaggtcccaagtttaagatgcctgatgtacatttcaaaagcccacaaatctccatgagtgacattgatttgaatttgaaaggacctaagataaaaggagatatggacatttccgttcctaaactggagggagatctgaaaggtcccaaagtggatgtcaaaggccctaaagtgggcattgacactcctgatattgacattcatggtccagaagggaaactgaagggccccaaatttaaaatgcctgacttacacctcaaggcaccgaagatctctatgcctgaagttgacctgaatctgaaaggtccaaaggtgaagggcgacatggacatttctctgcccaaagtggaaggcgacctcaagggccccgaagttgacatcaagggccccaaagtggacattgatgtcccagatgtggacgttcaaggcccagactggcacctaaaaatgcccaaagtgaaaatgcccaagttcagcatgcctggcttcaaaggagagggcccagatgtggatgtgaacctgcccaaggctgacattgatgtctcaggacccaaagtggacgttgatgttcctgatgtgaatatcgaaggtccagatgcgaaactaaagggccccaagttcaagatgcctgagatgagcatcaaagcccccaagatctccatgcctgatattgacttaaacctgaaaggacccaaagtgaagggcgatgtggatgttacccttcctaaagtggaaggtgacctcaagggcccagaagctgacatcaagggcccaaaagtggacatcaacacccctgatgtggatgttcatggcccagactggcacctgaagatgcccaaggtgaaaatgcccaaattcagcatgcctggcttcaaaggagaaggtccagatgtggatgtgagcctgcccaaggccgacatcgatgtctcgggacccaaggtggacgttgatattccagatgtgaatatcgaaggtccagacgcaaaactgaagggccccaagttcaagatgcctgaaataaatatcaaagctcccaagatctccatacctgatgttgacctggatttgaaaggacccaaagtaaaaggagattttgatgtgtctgtccctaaggttgaagggactttgaaaggcccagaagtagatcttaaaggtccacgtctggatttcgaaggccctgatgccaaactcagtggcccatctttgaagatgccatcgctggagatatctgctcctaaagtaactgctcctgatgttgatttgcatctcaaggcaccaaaaattggattttcaggtccgaagttagaaggtggtgaagtggacctcaagggacccaaagttgaagctccaagcttagatgtacacatggacagcccagatattaacatcgaagggccagatgttaaaatccccaaatttaagaaacccaagtttggatttggggcaaaaagccccaaagctgacatcaagtcaccttcactggatgtcactgttcctgaggcagagctgaaccttgagactcctgaaattagtgttggtggcaagggcaagaaaagtaagtttaaaatgcctaaaattcatatgagtggtcctaagattaaggccaaaaaacagggatttgacctgaatgttcctgggggtgaaattgatgccagcctcaaggctccggatgtagatgtcaacatcgcagggccggatgctgcactcaaagtcgacgtgaaatcgcccaaaaccaagaaaacgatgtttggaaaaatgtacttcccagatgtagagtttgacattaaatcacctaaatttaaagctgaggcccctctccctagccccaaactggagggtgaactccaggcacctgatctggaactttctttgccagcgattcacgtcgaaggtcttgacatcaaggcgaaggctcccaaggtcaagatgccagatgtggacatctcagtgccaaaaatagagggtgacctgaaaggccccaaagtgcaggcaaacttgggtgcacctgacatcaacatcgaaggcctagatgctaaagtcaaaacaccgtccttcggcatttctgcccctcaagtctccatccctgatgtgaatgtaaacttgaaaggaccaaagataaagggtgatgtccccagcgtgggactggaaggaccagatgtagatctgcaaggtccagaagcaaaaattaagttccccaagttttccatgcccaagatcggcatcccaggtgtgaaaatggagggtgggggagccgaggtccatgcccagctaccctctcttgaaggagacttgagaggaccagatgttaagctcgaagggcccgatgtttctctaaaggggccaggagtagacttgccttcagtgaacctctctatgccaaaagtctctgggcctgaccttgatctgaacttgaaaggaccaagtttgaagggagacctggatgcatctgttcccagcatgaaggtgcatgctccagggctcaacctcagtggtgtcggtggcaaaatgcaggtgggaggagacggtgtgaaagtgccagggatcgatgccacaacaaagcttaacgttggggcaccagatgtgacactgaggggaccaagcctgcagggagatctggctgtctctggtgacatcaaatgccctaaagtatccgtaggagctcctgatctaagcttggaggcatccgaaggcagcattaaacttcccaaaatgaagctgccccaatttggcatctctactccggggtccgacttgcacgtcaatgccaaggggccacaggtttctggcgaactgaaggggccaggtgtggatgtgaacctgaaagggcctcggatttcagcaccgaatgtggactttaacttggaaggaccaaaagtgaaagggagccttggggccactggtgagatcaaaggccccactgtcggaggaggtcttccaggcattggtgttcaaggcctagaaggaaacctccagatgcctggaattaagtcctctggatgtgatgtgaacctgccaggcgtgaatgtgaaactcccaactgggcagatttctgggcctgaaatcaaaggtggtctgaaaggttcagaagtaggtttccatggggctgctcctgatatcagtgtgaaggggcctgcctttaatatggcatctcctgagtcagattttggcatcaacttgaagggcccaaaaatcaaaggaggtgcggatgtttcagggggtgtcagtgccccagacatcagccttggtgaagggcatttgagtgttaaaggttccgggggtgagtggaagggaccccaagtctcctctgctctcaacttggacacatctaagtttgctgggggccttcatttctcaggaccaaaggtggaaggaggtgtgaaaggaggtcagattggactccaggctcctgggctgagtgtgtctgggcctcaaggtcacttggaaagtggatctggaaaagtaacattccctaaaatgaagatccccaaatttaccttctctggccgtgagctggttggcagagaaatgggggtggatgttcacttccctaaagcagaggccagcatccaagctggtgctggagacggcgagtgggaagagtctgaagtcaaactgaaaaagtccaagatcaaaatgcccaagtttaatttttccaaacctaaagggaaaggtggtgtcactggctcaccagaagcatcaatttctgggtccaaaggtgacctgaaaagttcaaaggccagcctgggctctctggaaggagaggcagaggccgaagcctcttcaccgaaaggcaaattctccttatttaaaagtaagaagccacggcaccgctcaaattcattcagtgatgaaagagagttctctggaccttccaccccgacggggacgctggagtttgaaggtggggaagtgtctctggaaggtgggaaagttaaagggaaacacgggaagctgaaattcggtacctttggtggattggggtcaaagagcaaaggtcattatgaggtgactgggagcgatgatgagacaggcaagttacaggggagtggggtgtccctggcctctaagaagtcccgactgtcctcctcttctagcaatgacagtgggaataaggttggcatccagcttcccgaggtggagctgtcagtttccacaaagaaagagtagcaggcctttgtatgtgtgtacatatatatatatataacaaaacatcagccttgggtggtgtgttcctatataaactccaaagggaaacacaccgactgcctcagcaatcatgcaaagaccttgcctggcccggtggcaagcgctgaaaaaccgaccgcctgtaggctcctggaactatacagataggtaaagagttccaagttcgtccagcccatgtgcaaagtcaacagtatttgccttaagatttcatatatatatatttttttgcattgactgctgagagctcctgtttactaagcaagcttttgtgtttattatcctcatttttactgaacattgttagttttggggtaatggaaacccactttttcattgtaatgactttgggggcttttgttagtaagggtgggtggggtgatgggttgcagacggaggtcaggtcttcctctttcctgagactggatctgttcaaacagcaaacgcccacagatggcccagaggtggtggtagtcagggtgtgtgggtgtttttagggttctttagtgttgtttctttcacccaggggtggtggtcccagccagtttggtgctgacggtgagaggaaattagaatctgtttgcaaattgtccaacccaccccctcaacatgaggggcttccattttctgtgttttgtaagggaactgtttccttcatgccgccatgttcctgatattagttctgatttctttttaacaaatgttatcatgattaagaaaatttccagcactttaatggccaattaactgagaatgtaagaaaattgatgctgtacaaggcaaataaagctgtttattaaccttgaaaaaaaaaaaaaaaaaaaaaaaaaaaaaaaaaaagaaaaaaaaacaaaacaaaacagaaaaaaaaaaaaaaaaanaaataaannanaanaaaatataaataaaaaaaaatttaaaaatataataaaaaaattaatataattaaaaaaattattataatattattaaaattaataatttattaaattttttataaaaatattttaaaatttaataaatttttaaattanaaaaataaaatttttttaaaaataattattttttatataatatattatataataaaaaatatttaaattttattgtttttttaaaattttaaaatatttattttataaatatattttgtaaattttttatttatatatattttatataattttttataaattaattaaatttttaatttatatatataatttaaaaaattattttttatttattatattatattataaaattttaattattttaatatttttatataattattaattttattaaaatttttatttataattatttataaa

SEQ ID NO: 357983 - DNA, 5452 bp, Homo sapiens
  misc_feature (5090)..(5090): n is a, c, g, or t
  misc_feature (5098)..(5099): n is a, c, g, or t
  misc_feature (5101)..(5101): n is a, c, g, or t
  misc_feature (5104)..(5104): n is a, c, g, or t
  misc_feature (5205)..(5205): n is a, c, g, or t
  misc_feature (5214)..(5214): n is a, c, g, or t
  misc_feature (5349)..(5349): n is a, c, g, or t
  misc_feature (5371)..(5372): n is a, c, g, or t
  misc_feature (5382)..(5382): n is a, c, g, or t
  misc_feature (5430)..(5430): n is a, c, g, or t
aaagggccagaggtagacattgaaggtcctgaagggaagctcaaaggtcccaagtttaagatgcctgatgtacatttcaaaagcccacaaatctccatgagtgacattgatttgaatttgaaaggacctaagataaaaggagatatggacatttccgttcctaaactggagggagatctgaaaggtcccaaagtggatgtcaaaggccctaaagtgggcattgacactcctgatattgacattcatggtccagaagggaaactgaagggccccaaatttaaaatgcctgacttacacctcaaggcaccgaagatctctatgcctgaagttgacctgaatctgaaaggtccaaaggtgaagggcgacatggacatttctctgcccaaagtggaaggcgacctcaagggccccgaagttgacatcaagggccccaaagtggacattgatgtcccagatgtggacgttcaaggcccagactggcacctaaaaatgcccaaagtgaaaatgcccaagttcagcatgcctggcttcaaaggagagggcccagatgtggatgtgaacctgcccaaggctgacattgatgtctcaggacccaaagtggacgttgatgttcctgatgtgaatatcgaaggtccagatgcgaaactaaagggccccaagttcaagatgcctgagatgagcatcaaagcccccaagatctccatgcctgatattgacttaaacctgaaaggacccaaagtgaagggcgatgtggatgttacccttcctaaagtggaaggtgacctcaagggcccagaagctgacatcaagggcccaaaagtggacatcaacacccctgatgtggatgttcatggcccagactggcacctgaagatgcccaaggtgaaaatgcccaaattcagcatgcctggcttcaaaggagaaggtccagatgtggatgtgagcctgcccaaggccgacatcgatgtctcgggacccaaggtggacgttgatattccagatgtgaatatcgaaggtccagacgcaaaactgaagggccccaagttcaagatgcctgaaataaatatcaaagctcccaagatctccatacctgatgttgacctggatttgaaaggacccaaagtaaaaggagattttgatgtgtctgtccctaaggttgaagggactttgaaaggcccagaagtagatcttaaaggtccacgtctggatttcgaaggccctgatgccaaactcagtggcccatctttgaagatgccatcgctggagatatctgctcctaaagtaactgctcctgatgttgatttgcatctcaaggcaccaaaaattggattttcaggtccgaagttagaaggtggtgaagtggacctcaagggacccaaagttgaagctccaagcttagatgtacacatggacagcccagatattaacatcgaagggccagatgttaaaatccccaaatttaagaaacccaagtttggatttggggcaaaaagccccaaagctgacatcaagtcaccttcactggatgtcactgttcctgaggcagagctgaaccttgagactcctgaaattagtgttggtggcaagggcaagaaaagtaagtttaaaatgcctaaaattcatatgagtggtcctaagattaaggccaaaaaacagggatttgacctgaatgttcctgggggtgaaattgatgccagcctcaaggctccggatgtagatgtcaacatcgcagggccggatgctgcactcaaagtcgacgtgaaatcgcccaaaaccaagaaaacgatgtttggaaaaatgtacttcccagatgtagagtttgacattaaatcacctaaatttaaagctgaggcccctctccctagccccaaactggagggtgaactccaggcacctgatctggaactttctttgccagcgattcacgtcgaaggtcttgacatcaaggcgaaggctcccaaggtcaagatgccagatgtggacatctcagtgccaaaaatagagggtgacctgaaaggccccaaagtgcaggcaaacttgggtgcacctgacatcaacatcgaaggcctagatgctaaagtcaaaacaccgtccttcggcatttctgcccctcaagtctccatccctgatgtgaatgtaaacttgaaaggaccaaagataaagggtgatgtccccagcgtgggactggaaggaccagatgtagatctgcaaggtccagaagcaaaaattaagttccccaagttttccatgcccaagatcggcatcccaggtgtgaaaatggagggtgggggagccgaggtccatgcccagctaccctctcttgaaggagacttgagaggaccagatgttaagctcgaagggcccgatgtttctctaaaggggccaggagtagacttgccttcagtgaacctctctatgccaaaagtctctgggcctgaccttgatctgaacttgaaaggaccaagtttgaagggagacctggatgcatctgttcccagcatgaaggtgcatgctccagggctcaacctcagtggtgtcggtggcaaaatgcaggtgggaggagacggtgtgaaagtgccagggatcgatgccacaacaaagcttaacgttggggcaccagatgtgacactgaggggaccaagcctgcagggagatctggctgtctctggtgacatcaaatgccctaaagtatccgtaggagctcctgatctaagcttggaggcatccgaaggcagcattaaacttcccaaaatgaagctgccccaatttggcatctctactccggggtccgacttgcacgtcaatgccaaggggccacaggtttctggcgaactgaaggggccaggtgtggatgtgaacctgaaagggcctcggatttcagcaccgaatgtggactttaacttggaaggaccaaaagtgaaagggagccttggggccactggtgagatcaaaggccccactgtcggaggaggtcttccaggcattggtgttcaaggcctagaaggaaacctccagatgcctggaattaagtcctctggatgtgatgtgaacctgccaggcgtgaatgtgaaactcccaactgggcagatttctgggcctgaaatcaaaggtggtctgaaaggttcagaagtaggtttccatggggctgctcctgatatcagtgtgaaggggcctgcctttaatatggcatctcctgagtcagattttggcatcaacttgaagggcccaaaaatcaaaggaggtgcggatgtttcagggggtgtcagtgccccagacatcagccttggtgaagggcatttgagtgttaaaggttccgggggtgagtggaagggaccccaagtctcctctgctctcaacttggacacatctaagtttgctgggggccttcatttctcaggaccaaaggtggaaggaggtgtgaaaggaggtcagattggactccaggctcctgggctgagtgtgtctgggcctcaaggtcacttggaaagtggatctggaaaagtaacattccctaaaatgaagatccccaaatttaccttctctggccgtgagctggttggcagagaaatgggggtggatgttcacttccctaaagcagaggccagcatccaagctggtgctggagacggcgagtgggaagagtctgaagtcaaactgaaaaagtccaagatcaaaatgcccaagtttaatttttccaaacctaaagggaaaggtggtgtcactggctcaccagaagcatcaatttctgggtccaaaggtgacctgaaaagttcaaaggccagcctgggctctctggaaggagaggcagaggccgaagcctcttcaccgaaaggcaaattctccttatttaaaagtaagaagccacggcaccgctcaaattcattcagtgatgaaagagagttctctggaccttccaccccgacggggacgctggagtttgaaggtggggaagtgtctctggaaggtgggaaagttaaagggaaacacgggaagctgaaattcggtacctttggtggattggggtcaaagagcaaaggtcattatgaggtgactgggagcgatgatgagacaggcaagttacaggggagtggggtgtccctggcctctaagaagtcccgactgtcctcctcttctagcaatgacagtgggaataaggttggcatccagcttcccgaggtggagctgtcagtttccacaaagaaagagtagcaggcctttgtatgtgtgtacatatatatatatataacaaaacatcagccttgggtggtgtgttcctatataaactccaaagggaaacacaccgactgcctcagcaatcatgcaaagaccttgcctggcccggtggcaagcgctgaaaaaccgaccgcctgtaggctcctggaactatacagataggtaaagagttccaagttcgtccagcccatgtgcaaagtcaacagtatttgccttaagatttcatatatatatatttttttgcattgactgctgagagctcctgtttactaagcaagcttttgtgtttattatcctcatttttactgaacattgttagttttggggtaatggaaacccactttttcattgtaatgactttgggggcttttgttagtaagggtgggtggggtgatgggttgcagacggaggtcaggtcttcctctttcctgagactggatctgttcaaacagcaaacgcccacagatggcccagaggtggtggtagtcagggtgtgtgggtgtttttagggttctttagtgttgtttctttcacccaggggtggtggtcccagccagtttggtgctgacggtgagaggaaattagaatctgtttgcaaattgtccaacccaccccctcaacatgaggggcttccattttctgtgttttgtaagggaactgtttccttcatgccgccatgttcctgatattagttctgatttctttttaacaaatgttatcatgattaagaaaatttccagcactttaatggccaattaactgagaatgtaagaaaattgatgctgtacaaggcaaataaagctgtttattaaccttgaaaaaaaaaaaaaaaaaaaaaaaaaaaaaaaaaaaaaaanaaataaannanaanaaaataaatttaacatccatttttctaatcctaccaattctcaccctactcccgactaatctccactcctacatacttccccctttattcctataaccatnccacctgcnactcctttacaacaacaatctaacccaacttccccattgtacccaccattcctattctaattacctcacaatatttctgacacttcttaacctaccccacattccaccttaaaaccccataaaaattcccaatcnataatccaaaccaattttaacnntaaaaaaccncccatctctctaaaataaaacccctcaaaaactttcaataaaatcccnatttaccaattaaacccctttt

SEQ ID NO: 357984 - DNA, 5211 bp, Homo sapiens
aaagggccagaggtagacattgaaggtcctgaagggaagctcaaaggtcccaagtttaagatgcctgatgtacatttcaaaagcccacaaatctccatgagtgacattgatttgaatttgaaaggacctaagataaaaggagatatggacatttccgttcctaaactggagggagatctgaaaggtcccaaagtggatgtcaaaggccctaaagtgggcattgacactcctgatattgacattcatggtccagaagggaaactgaagggccccaaatttaaaatgcctgacttacacctcaaggcaccgaagatctctatgcctgaagttgacctgaatctgaaaggtccaaaggtgaagggcgacatggacatttctctgcccaaagtggaaggcgacctcaagggccccgaagttgacatcaagggccccaaagtggacattgatgtcccagatgtggacgttcaaggcccagactggcacctaaaaatgcccaaagtgaaaatgcccaagttcagcatgcctggcttcaaaggagagggcccagatgtggatgtgaacctgcccaaggctgacattgatgtctcaggacccaaagtggacgttgatgttcctgatgtgaatatcgaaggtccagatgcgaaactaaagggccccaagttcaagatgcctgagatgagcatcaaagcccccaagatctccatgcctgatattgacttaaacctgaaaggacccaaagtgaagggcgatgtggatgttacccttcctaaagtggaaggtgacctcaagggcccagaagctgacatcaagggcccaaaagtggacatcaacacccctgatgtggatgttcatggcccagactggcacctgaagatgcccaaggtgaaaatgcccaaattcagcatgcctggcttcaaaggagaaggtccagatgtggatgtgagcctgcccaaggccgacatcgatgtctcgggacccaaggtggacgttgatattccagatgtgaatatcgaaggtccagacgcaaaactgaagggccccaagttcaagatgcctgaaataaatatcaaagctcccaagatctccatacctgatgttgacctggatttgaaaggacccaaagtaaaaggagattttgatgtgtctgtccctaaggttgaagggactttgaaaggcccagaagtagatcttaaaggtccacgtctggatttcgaaggccctgatgccaaactcagtggcccatctttgaagatgccatcgctggagatatctgctcctaaagtaactgctcctgatgttgatttgcatctcaaggcaccaaaaattggattttcaggtccgaagttagaaggtggtgaagtggacctcaagggacccaaagttgaagctccaagcttagatgtacacatggacagcccagatattaacatcgaagggccagatgttaaaatccccaaatttaagaaacccaagtttggatttggggcaaaaagccccaaagctgacatcaagtcaccttcactggatgtcactgttcctgaggcagagctgaaccttgagactcctgaaattagtgttggtggcaagggcaagaaaagtaagtttaaaatgcctaaaattcatatgagtggtcctaagattaaggccaaaaaacagggatttgacctgaatgttcctgggggtgaaattgatgccagcctcaaggctccggatgtagatgtcaacatcgcagggccggatgctgcactcaaagtcgacgtgaaatcgcccaaaaccaagaaaacgatgtttggaaaaatgtacttcccagatgtagagtttgacattaaatcacctaaatttaaagctgaggcccctctccctagccccaaactggagggtgaactccaggcacctgatctggaactttctttgccagcgattcacgtcgaaggtcttgacatcaaggcgaaggctcccaaggtcaagatgccagatgtggacatctcagtgccaaaaatagagggtgacctgaaaggccccaaagtgcaggcaaacttgggtgcacctgacatcaacatcgaaggcctagatgctaaagtcaaaacaccgtccttcggcatttctgcccctcaagtctccatccctgatgtgaatgtaaacttgaaaggaccaaagataaagggtgatgtccccagcgtgggactggaaggaccagatgtagatctgcaaggtccagaagcaaaaattaagttccccaagttttccatgcccaagatcggcatcccaggtgtgaaaatggagggtgggggagccgaggtccatgcccagctaccctctcttgaaggagacttgagaggaccagatgttaagctcgaagggcccgatgtttctctaaaggggccaggagtagacttgccttcagtgaacctctctatgccaaaagtctctgggcctgaccttgatctgaacttgaaaggaccaagtttgaagggagacctggatgcatctgttcccagcatgaaggtgcatgctccagggctcaacctcagtggtgtcggtggcaaaatgcaggtgggaggagacggtgtgaaagtgccagggatcgatgccacaacaaagcttaacgttggggcaccagatgtgacactgaggggaccaagcctgcagggagatctggctgtctctggtgacatcaaatgccctaaagtatccgtaggagctcctgatctaagcttggaggcatccgaaggcagcattaaacttcccaaaatgaagctgccccaatttggcatctctactccggggtccgacttgcacgtcaatgccaaggggccacaggtttctggcgaactgaaggggccaggtgtggatgtgaacctgaaagggcctcggatttcagcaccgaatgtggactttaacttggaaggaccaaaagtgaaagggagccttggggccactggtgagatcaaaggccccactgtcggaggaggtcttccaggcattggtgttcaaggcctagaaggaaacctccagatgcctggaattaagtcctctggatgtgatgtgaacctgccaggcgtgaatgtgaaactcccaactgggcagatttctgggcctgaaatcaaaggtggtctgaaaggttcagaagtaggtttccatggggctgctcctgatatcagtgtgaaggggcctgcctttaatatggcatctcctgagtcagattttggcatcaacttgaagggcccaaaaatcaaaggaggtgcggatgtttcagggggtgtcagtgccccagacatcagccttggtgaagggcatttgagtgttaaaggttccgggggtgagtggaagggaccccaagtctcctctgctctcaacttggacacatctaagtttgctgggggccttcatttctcaggaccaaaggtggaaggaggtgtgaaaggaggtcagattggactccaggctcctgggctgagtgtgtctgggcctcaaggtcacttggaaagtggatctggaaaagtaacattccctaaaatgaagatccccaaatttaccttctctggccgtgagctggttggcagagaaatgggggtggatgttcacttccctaaagcagaggccagcatccaagctggtgctggagacggcgagtgggaagagtctgaagtcaaactgaaaaagtccaagatcaaaatgcccaagtttaatttttccaaacctaaagggaaaggtggtgtcactggctcaccagaagcatcaatttctgggtccaaaggtgacctgaaaagttcaaaggccagcctgggctctctggaaggagaggcagaggccgaagcctcttcaccgaaaggcaaattctccttatttaaaagtaagaagccacggcaccgctcaaattcattcagtgatgaaagagagttctctggaccttccaccccgacggggacgctggagtttgaaggtggggaagtgtctctggaaggtgggaaagttaaagggaaacacgggaagctgaaattcggtacctttggtggattggggtcaaagagcaaaggtcattatgaggtgactgggagcgatgatgagacaggcaagttacaggggagtggggtgtccctggcctctaagaagtcccgactgtcctcctcttctagcaatgacagtgggaataaggttggcatccagcttcccgaggtggagctgtcagtttccacaaagaaagagtagcaggcctttgtatgtgtgtacatatatatatatataacaaaacatcagccttgggtggtgtgttcctatataaactccaaagggaaacacaccgactgcctcagcaatcatgcaaagaccttgcctggcccggtggcaagcgctgaaaaaccgaccgcctgtaggctcctggaactatacagataggtaaagagttccaagttcgtccagcccatgtgcaaagtcaacagtatttgccttaagatttcatatatatatatttttttgcattgactgctgagagctcctgtttactaagcaagcttttgtgtttattatcctcatttttactgaacattgttagttttggggtaatggaaacccactttttcattgtaatgactttgggggcttttgttagtaagggtgggtggggtgatgggttgcagacggaggtcaggtcttcctctttcctgagactggatctgttcaaacagcaaacgcccacagatggcccagaggtggtggtagtcagggtgtgtgggtgtttttagggttctttagtgttgtttctttcacccaggggtggtggtcccagccagtttggtgctgacggtgagaggaaattagaatctgtttgcaaattgtccaacccaccccctcaacatgaggggcttccattttctgtgttttgtaagggaactgtttccttcatgccgccatgttcctgatattagttctgatttctttttaacaaatgttatcatgattaagaaaatttccagcactttaatggccaattaactgagaatgtaagaaaattgatgctgtacaaggcaaataaagctgtttattaaccttgtacagcatcaattttcttacattttctgtgttttgtaagggaactgtttccttcatgccgccatgttcctgatattagttctgatttcttttttaacaaatgttatcatgattaagaaaatttccagcacttttaatggccaattaacctgagaatggtta

SEQ ID NO: 357985 - DNA, 3215 bp, Homo sapiens
  misc_feature (13)..(13): n is a, c, g, or t
gctgacctagagnatcccaggcaaagctctacccaaactggagggtgaactccaggcacctgatctggaactttctttgccagcgattcacgtcgaaggtcttgacatcaaggcgaaggctcccaaggtcaagatgccagatgtggacatctcagtgccaaaaatagagggtgacctgaaaggccccaaagtgcaggcaaacttgggtgcacctgacatcaacatcgaaggcctagatgctaaagtcaaaacaccgtccttcggcatttctgcccctcaagtctccatccctgatgtgaatgtaaacttgaaaggaccaaagataaagggtgatgtccccagcgtgggactggaaggaccagatgtagatctgcaaggtccagaagcaaaaattaagttccccaagttttccatgcccaagatcggcatcccaggtgtgaaaatggagggtgggggagccgaggtccatgcccagctaccctctcttgaaggagacttgagaggaccagatgttaagctcgaagggcccgatgtttctctaaaggggccaggagtagacttgccttcagtgaacctctctatgccaaaagtctctgggcctgaccttgatctgaacttgaaaggaccaagtttgaagggagacctggatgcatctgttcccagcatgaaggtgcatgctccagggctcaacctcagtggtgtcggtggcaaaatgcaggtgggaggagacggtgtgaaagtgccagggatcgatgccacaacaaagcttaacgttggggcaccagatgtgacactgaggggaccaagcctgcagggagatctggctgtctctggtgacatcaaatgccctaaagtatccgtaggagctcctgatctaagcttggaggcatccgaaggcagcattaaacttcccaaaatgaagctgccccaatttggcatctctactccggggtccgacttgcacgtcaatgccaaggggccacaggtttctggcgaactgaaggggccaggtgtggatgtgaacctgaaagggcctcggatttcagcaccgaatgtggactttaacttggaaggaccaaaagtgaaagggagccttggggccactggtgagatcaaaggccccactgtcggaggaggtcttccaggcattggtgttcaaggcctagaaggaaacctccagatgcctggaattaagtcctctggatgtgatgtgaacctgccaggcgtgaatgtgaaactcccaactgggcagatttctgggcctgaaatcaaaggtggtctgaaaggttcagaagtaggtttccatggggctgctcctgatatcagtgtgaaggggcctgcctttaatatggcatctcctgagtcagattttggcatcaacttgaagggcccaaaaatcaaaggaggtgcggatgtttcagggggtgtcagtgccccagacatcagccttggtgaagggcatttgagtgttaaaggttccgggggtgagtggaagggaccccaagtctcctctgctctcaacttggacacatctaagtttgctgggggccttcatttctcaggaccaaaggtggaaggaggtgtgaaaggaggtcagattggactccaggctcctgggctgagtgtgtctgggcctcaaggtcacttggaaagtggatctggaaaagtaacattccctaaaatgaagatccccaaatttaccttctctggccgtgagctggttggcagagaaatgggggtggatgttcacttccctaaagcagaggccagcatccaagctggtgctggagacggcgagtgggaagagtctgaagtcaaactgaaaaagtccaagatcaaaatgcccaagtttaatttttccaaacctaaagggaaaggtggtgtcactggctcaccagaagcatcaatttctgggtccaaaggtgacctgaaaagttcaaaggccagcctgggctctctggaaggagaggcagaggccgaagcctcttcaccgaaaggcaaattctccttatttaaaagtaagaagccacggcaccgctcaaattcattcagtgatgaaagagagttctctggaccttccaccccgacggggacgctggagtttgaaggtggggaagtgtctctggaaggtgggaaagttaaagggaaacacgggaagctgaaattcggtacctttggtggattggggtcaaagagcaaaggtcattatgaggtgactgggagcgatgatgagacaggcaagttacaggggagtggggtgtccctggcctctaagaagtcccgactgtcctcctcttctagcaatgacagtgggaataaggttggcatccagcttcccgaggtggagctgtcagtttccacaaagaaagagtagcaggcctttgtatgtgtgtacatatatatatatataacaaaacatcagccttgggtggtgtgttcctatataaactccaaagggaaacacaccgactgcctcagcaatcatgcaaagaccttgcctggcccggtggcaagcgctgaaaaaccgaccgcctgtaggctcctggaactatacagataggtaaagagttccaagttcgtccagcccatgtgcaaagtcaacagtatttgccttaagatttcatatatatatatttttttgcattgactgctgagagctcctgtttactaagcaagcttttgtgtttattatcctcatttttactgaacattgttagttttggggtaatggaaacccactttttcattgtaatgactttgggggcttttgttagtaagggtgggtggggtgatgggttgcagacggaggtcaggtcttcctctttcctgagactggatctgttcaaacagcaaacgcccacagatggcccagaggtggtggtagtcagggtgtgtgggtgtttttagggttctttagtgttgtttctttcacccaggggtggtggtcccagccagtttggtgctgacggtgagaggaaattagaatctgtttgcaaattgtccaacccaccccctcaacatgaggggcttccattttctgtgttttgtaagggaactgtttccttcatgccgccatgttcctgatattagttctgatttctttttaacaaatgttatcatgattaagaaaatttccagcactttaatggccaattaactgagaatgtaagaaaattgatgctgtacaaggcaaataaagctgtttattaaccttg

SEQ ID NO: 357986 - DNA, 2844 bp, Homo sapiens
ggcccaagatcggcatggaaaactggggaacttaatttttcatgcccaagatcggcatcccaggtgtgaaaatggagggtgggggagccgaggtccatgcccagctaccctctcttgaaggagacttgagaggaccagatgttaagctcgaagggcccgatgtttctctaaaggggccaggagtagacttgccttcagtgaacctctctatgccaaaagtctctgggcctgaccttgatctgaacttgaaaggaccaagtttgaagggagacctggatgcatctgttcccagcatgaaggtgcatgctccagggctcaacctcagtggtgtcggtggcaaaatgcaggtgggaggagacggtgtgaaagtgccagggatcgatgccacaacaaagcttaacgttggggcaccagatgtgacactgaggggaccaagcctgcagggagatctggctgtctctggtgacatcaaatgccctaaagtatccgtaggagctcctgatctaagcttggaggcatccgaaggcagcattaaacttcccaaaatgaagctgccccaatttggcatctctactccggggtccgacttgcacgtcaatgccaaggggccacaggtttctggcgaactgaaggggccaggtgtggatgtgaacctgaaagggcctcggatttcagcaccgaatgtggactttaacttggaaggaccaaaagtgaaagggagccttggggccactggtgagatcaaaggccccactgtcggaggaggtcttccaggcattggtgttcaaggcctagaaggaaacctccagatgcctggaattaagtcctctggatgtgatgtgaacctgccaggcgtgaatgtgaaactcccaactgggcagatttctgggcctgaaatcaaaggtggtctgaaaggttcagaagtaggtttccatggggctgctcctgatatcagtgtgaaggggcctgcctttaatatggcatctcctgagtcagattttggcatcaacttgaagggcccaaaaatcaaaggaggtgcggatgtttcagggggtgtcagtgccccagacatcagccttggtgaagggcatttgagtgttaaaggttccgggggtgagtggaagggaccccaagtctcctctgctctcaacttggacacatctaagtttgctgggggccttcatttctcaggaccaaaggtggaaggaggtgtgaaaggaggtcagattggactccaggctcctgggctgagtgtgtctgggcctcaaggtcacttggaaagtggatctggaaaagtaacattccctaaaatgaagatccccaaatttaccttctctggccgtgagctggttggcagagaaatgggggtggatgttcacttccctaaagcagaggccagcatccaagctggtgctggagacggcgagtgggaagagtctgaagtcaaactgaaaaagtccaagatcaaaatgcccaagtttaatttttccaaacctaaagggaaaggtggtgtcactggctcaccagaagcatcaatttctgggtccaaaggtgacctgaaaagttcaaaggccagcctgggctctctggaaggagaggcagaggccgaagcctcttcaccgaaaggcaaattctccttatttaaaagtaagaagccacggcaccgctcaaattcattcagtgatgaaagagagttctctggaccttccaccccgacggggacgctggagtttgaaggtggggaagtgtctctggaaggtgggaaagttaaagggaaacacgggaagctgaaattcggtacctttggtggattggggtcaaagagcaaaggtcattatgaggtgactgggagcgatgatgagacaggcaagttacaggggagtggggtgtccctggcctctaagaagtcccgactgtcctcctcttctagcaatgacagtgggaataaggttggcatccagcttcccgaggtggagctgtcagtttccacaaagaaagagtagcaggcctttgtatgtgtgtacatatatatatatataacaaaacatcagccttgggtggtgtgttcctatataaactccaaagggaaacacaccgactgcctcagcaatcatgcaaagaccttgcctggcccggtggcaagcgctgaaaaaccgaccgcctgtaggctcctggaactatacagataggtaaagagttccaagttcgtccagcccatgtgcaaagtcaacagtatttgccttaagatttcatatatatatatttttttgcattgactgctgagagctcctgtttactaagcaagcttttgtgtttattatcctcatttttactgaacattgttagttttggggtaatggaaacccactttttcattgtaatgactttgggggcttttgttagtaagggtgggtggggtgatgggttgcagacggaggtcaggtcttcctctttcctgagactggatctgttcaaacagcaaacgcccacagatggcccagaggtggtggtagtcagggtgtgtgggtgtttttagggttctttagtgttgtttctttcacccaggggtggtggtcccagccagtttggtgctgacggtgagaggaaattagaatctgtttgcaaattgtccaacccaccccctcaacatgaggggcttccattttctgtgttttgtaagggaactgtttccttcatgccgccatgttcctgatattagttctgatttctttttaacaaatgttatcatgattaagaaaatttccagcactttaatggccaattaactgagaatgtaagaaaattgatgctgtacaaggcaaataaagctgtttattaaccttg

SEQ ID NO: 357987 - DNA, 2012 bp, Homo sapiens
gtgagtggaagggaccccaagtctcctctgctctcaacttggacacatctaagtttgctgggggccttcatttctcaggaccaaaggtggaaggaggtgtgaaaggaggtcagattggactccaggctcctggaaaggggtgtctgggcctctctctccatcagatcggggcatcaacttgaagggcccaaaaatcaaaggaggtgcggatgtttcagggggtgtcagtgccccagacatcagccttggtgaagggcatttgagtgttaaaggttccgggggtgagtggaagggaccccaagtctcctctgctctcaacttggacacatctaagtttgctgggggccttcatttctcaggaccaaaggtggaaggaggtgtgaaaggaggtcagattggactccaggctcctgggctgagtgtgtctgggcctcaaggtcacttggaaagtggatctggaaaagtaacattccctaaaatgaagatccccaaatttaccttctctggccgtgagctggttggcagagaaatgggggtggatgttcacttccctaaagcagaggccagcatccaagctggtgctggagacggcgagtgggaagagtctgaagtcaaactgaaaaagtccaagatcaaaatgcccaagtttaatttttccaaacctaaagggaaaggtggtgtcactggctcaccagaagcatcaatttctgggtccaaaggtgacctgaaaagttcaaaggccagcctgggctctctggaaggagaggcagaggccgaagcctcttcaccgaaaggcaaattctccttatttaaaagtaagaagccacggcaccgctcaaattcattcagtgatgaaagagagttctctggaccttccaccccgacggggacgctggagtttgaaggtggggaagtgtctctggaaggtgggaaagttaaagggaaacacgggaagctgaaattcggtacctttggtggattggggtcaaagagcaaaggtcattatgaggtgactgggagcgatgatgagacaggcaagttacaggggagtggggtgtccctggcctctaagaagtcccgactgtcctcctcttctagcaatgacagtgggaataaggttggcatccagcttcccgaggtggagctgtcagtttccacaaagaaagagtagcaggcctttgtatgtgtgtacatatatatatatataacaaaacatcagccttgggtggtgtgttcctatataaactccaaagggaaacacaccgactgcctcagcaatcatgcaaagaccttgcctggcccggtggcaagcgctgaaaaaccgaccgcctgtaggctcctggaactatacagataggtaaagagttccaagttcgtccagcccatgtgcaaagtcaacagtatttgccttaagatttcatatatatatatttttttgcattgactgctgagagctcctgtttactaagcaagcttttgtgtttattatcctcatttttactgaacattgttagttttggggtaatggaaacccactttttcattgtaatgactttgggggcttttgttagtaagggtgggtggggtgatgggttgcagacggaggtcaggtcttcctctttcctgagactggatctgttcaaacagcaaacgcccacagatggcccagaggtggtggtagtcagggtgtgtgggtgtttttagggttctttagtgttgtttctttcacccaggggtggtggtcccagccagtttggtgctgacggtgagaggaaattagaatctgtttgcaaattgtccaacccaccccctcaacatgaggggcttccattttctgtgttttgtaagggaactgtttccttcatgccgccatgttcctgatattagttctgatttctttttaacaaatgttatcatgattaagaaaatttccagcactttaatggccaattaactgagaatgtaagaaaattgatgctgtacaaggcaaataaagctgtttattaaccttg

SEQ ID NO: 357988 - DNA, 1166 bp, Homo sapiens
agaagatgatatcttctacggatgctccatggtaggagttacctctccctactaagggaggctagactgttcaacctgttcccgctccgccttccactatagcagatccgagcaggagtaggagagagggtggtaagagtcagaagcttatattgtttatccggtgactgggagcgatgatgagacaggcaagttacaggggagtggggtgtccctggcctctaagaagtcccgactgtcctcctcttctagcaatgacagtgggaataaggttggcatccagcttcccgaggtggagctgtcagtttccacaaagaaagagtagcaggcctttgtatgtgtgtacatatatatatatataacaaaacatcagccttgggtggtgtgttcctatataaactccaaagggaaacacaccgactgcctcagcaatcatgcaaagaccttgcctggcccggtggcaagcgctgaaaaaccgaccgcctgtaggctcctggaactatacagataggtaaagagttccaagttcgtccagcccatgtgcaaagtcaacagtatttgccttaagatttcatatatatatatttttttgcattgactgctgagagctcctgtttactaagcaagcttttgtgtttattatcctcatttttactgaacattgttagttttggggtaatggaaacccactttttcattgtaatgactttgggggcttttgttagtaagggtgggtggggtgatgggttgcagacggaggtcaggtcttcctctttcctgagactggatctgttcaaacagcaaacgcccacagatggcccagaggtggtggtagtcagggtgtgtgggtgtttttagggttctttagtgttgtttctttcacccaggggtggtggtcccagccagtttggtgctgacggtgagaggaaattagaatctgtttgcaaattgtccaacccaccccctcaacatgaggggcttccattttctgtgttttgtaagggaactgtttccttcatgccgccatgttcctgatattagttctgatttctttttaacaaatgttatcatgattaagaaaatttccagcactttaatggccaattaactgagaatgtaagaaaattgatgctgtacaaggcaaataaagctgtttattaaccttg

SEQ ID NO: 357989 - DNA, 452 bp, Homo sapiens
gcggcgcctactactactaaattcgcggccgcgtcgacgacggaggtcaggtcttcctctttcctgagactggatctgttcaaacagcaaacgcccacagatggcccagaggtggtggtagtcagggtgtgtgggtgtttttagggttctttagtgttgtttctttcacccaggggtggtggtcccagccagtttggtgctgacggtgagaggaaattagaatctgtttgcaaattgtccaacccaccccctcaacatgaggggcttccattttctgtgttttgtaagggaactgtttccttcatgccgccatgttcctgatattagttctgatttctttttaacaaatgttatcatgattaagaaaatttccagcactttaatggccaattaactgagaatgtaagaaaattgatgctgtacaaggcaaataaagctgtttattaaccttg

SEQ ID NO: 357990 - DNA, 431 bp, Homo sapiens
tccttctcacctgtgtatcaacatattgggatcagtaatttagatgaaagtatactacaaaaggagcaaacgcccacagatggcccagaggtggtggtagtcagggtgtgtgggtgtttttagggttctttagtgttgtttctttcacccaggggtggtggtcccagccagtttggtgctgacggtgagaggaaattagaatctgtttgcaaattgtccaacccaccccctcaacatgaggggcttccattttctgtgttttgtaagggaactgtttccttcatgccgccatgttcctgatattagttctgatttctttttaacaaatgttatcatgattaagaaaatttccagcactttaatggccaattaactgagaatgtaagaaaattgatgctgtacaaggcaaataaagctgtttattaaccttg

SEQ ID NO: 357991 - DNA, 5050 bp, Homo sapiens
aaagggccagaggtagacattgaaggtcctgaagggaagctcaaaggtcccaagtttaagatgcctgatgtacatttcaaaagcccacaaatctccatgagtgacattgatttgaatttgaaaggacctaagataaaaggagatatggacatttccgttcctaaactggagggagatctgaaaggtcccaaagtggatgtcaaaggccctaaagtgggcattgacactcctgatattgacattcatggtccagaagggaaactgaagggccccaaatttaaaatgcctgacttacacctcaaggcaccgaagatctctatgcctgaagttgacctgaatctgaaaggtccaaaggtgaagggcgacatggacatttctctgcccaaagtggaaggcgacctcaagggccccgaagttgacatcaagggccccaaagtggacattgatgtcccagatgtggacgttcaaggcccagactggcacctaaaaatgcccaaagtgaaaatgcccaagttcagcatgcctggcttcaaaggagagggcccagatgtggatgtgaacctgcccaaggctgacattgatgtctcaggacccaaagtggacgttgatgttcctgatgtgaatatcgaaggtccagatgcgaaactaaagggccccaagttcaagatgcctgagatgagcatcaaagcccccaagatctccatgcctgatattgacttaaacctgaaaggacccaaagtgaagggcgatgtggatgttacccttcctaaagtggaaggtgacctcaagggcccagaagctgacatcaagggcccaaaagtggacatcaacacccctgatgtggatgttcatggcccagactggcacctgaagatgcccaaggtgaaaatgcccaaattcagcatgcctggcttcaaaggagaaggtccagatgtggatgtgagcctgcccaaggccgacatcgatgtctcgggacccaaggtggacgttgatattccagatgtgaatatcgaaggtccagacgcaaaactgaagggccccaagttcaagatgcctgaaataaatatcaaagctcccaagatctccatacctgatgttgacctggatttgaaaggacccaaagtaaaaggagattttgatgtgtctgtccctaaggttgaagggactttgaaaggcccagaagtagatcttaaaggtccacgtctggatttcgaaggccctgatgccaaactcagtggcccatctttgaagatgccatcgctggagatatctgctcctaaagtaactgctcctgatgttgatttgcatctcaaggcaccaaaaattggattttcaggtccgaagttagaaggtggtgaagtggacctcaagggacccaaagttgaagctccaagcttagatgtacacatggacagcccagatattaacatcgaagggccagatgttaaaatccccaaatttaagaaacccaagtttggatttggggcaaaaagccccaaagctgacatcaagtcaccttcactggatgtcactgttcctgaggcagagctgaaccttgagactcctgaaattagtgttggtggcaagggcaagaaaagtaagtttaaaatgcctaaaattcatatgagtggtcctaagattaaggccaaaaaacagggatttgacctgaatgttcctgggggtgaaattgatgccagcctcaaggctccggatgtagatgtcaacatcgcagggccggatgctgcactcaaagtcgacgtgaaatcgcccaaaaccaagaaaacgatgtttggaaaaatgtacttcccagatgtagagtttgacattaaatcacctaaatttaaagctgaggcccctctccctagccccaaactggagggtgaactccaggcacctgatctggaactttctttgccagcgattcacgtcgaaggtcttgacatcaaggcgaaggctcccaaggtcaagatgccagatgtggacatctcagtgccaaaaatagagggtgacctgaaaggccccaaagtgcaggcaaacttgggtgcacctgacatcaacatcgaaggcctagatgctaaagtcaaaacaccgtccttcggcatttctgcccctcaagtctccatccctgatgtgaatgtaaacttgaaaggaccaaagataaagggtgatgtccccagcgtgggactggaaggaccagatgtagatctgcaaggtccagaagcaaaaattaagttccccaagttttccatgcccaagatcggcatcccaggtgtgaaaatggagggtgggggagccgaggtccatgcccagctaccctctcttgaaggagacttgagaggaccagatgttaagctcgaagggcccgatgtttctctaaaggggccaggagtagacttgccttcagtgaacctctctatgccaaaagtctctgggcctgaccttgatctgaacttgaaaggaccaagtttgaagggagacctggatgcatctgttcccagcatgaaggtgcatgctccagggctcaacctcagtggtgtcggtggcaaaatgcaggtgggaggagacggtgtgaaagtgccagggatcgatgccacaacaaagcttaacgttggggcaccagatgtgacactgaggggaccaagcctgcagggagatctggctgtctctggtgacatcaaatgccctaaagtatccgtaggagctcctgatctaagcttggaggcatccgaaggcagcattaaacttcccaaaatgaagctgccccaatttggcatctctactccggggtccgacttgcacgtcaatgccaaggggccacaggtttctggcgaactgaaggggccaggtgtggatgtgaacctgaaagggcctcggatttcagcaccgaatgtggactttaacttggaaggaccaaaagtgaaagggagccttggggccactggtgagatcaaaggccccactgtcggaggaggtcttccaggcattggtgttcaaggcctagaaggaaacctccagatgcctggaattaagtcctctggatgtgatgtgaacctgccaggcgtgaatgtgaaactcccaactgggcagatttctgggcctgaaatcaaaggtggtctgaaaggttcagaagtaggtttccatggggctgctcctgatatcagtgtgaaggggcctgcctttaatatggcatctcctgagtcagattttggcatcaacttgaagggcccaaaaatcaaaggaggtgcggatgtttcagggggtgtcagtgccccagacatcagccttggtgaagggcatttgagtgttaaaggttccgggggtgagtggaagggaccccaagtctcctctgctctcaacttggacacatctaagtttgctgggggccttcatttctcaggaccaaaggtggaaggaggtgtgaaaggaggtcagattggactccaggctcctgggctgagtgtgtctgggcctcaaggtcacttggaaagtggatctggaaaagtaacattccctaaaatgaagatccccaaatttaccttctctggccgtgagctggttggcagagaaatgggggtggatgttcacttccctaaagcagaggccagcatccaagctggtgctggagacggcgagtgggaagagtctgaagtcaaactgaaaaagtccaagatcaaaatgcccaagtttaatttttccaaacctaaagggaaaggtggtgtcactggctcaccagaagcatcaatttctgggtccaaaggtgacctgaaaagttcaaaggccagcctgggctctctggaaggagaggcagaggccgaagcctcttcaccgaaaggcaaattctccttatttaaaagtaagaagccacggcaccgctcaaattcattcagtgatgaaagagagttctctggaccttccaccccgacggggacgctggagtttgaaggtggggaagtgtctctggaaggtgggaaagttaaagggaaacacgggaagctgaaattcggtacctttggtggattggggtcaaagagcaaaggtcattatgaggtgactgggagcgatgatgagacaggcaagttacaggggagtggggtgtccctggcctctaagaagtcccgactgtcctcctcttctagcaatgacagtgggaataaggttggcatccagcttcccgaggtggagctgtcagtttccacaaagaaagagtagcaggcctttgtatgtgtgtacatatatatatatataacaaaacatcagccttgggtggtgtgttcctatataaactccaaagggaaacacaccgactgcctcagcaatcatgcaaagaccttgcctggcccggtggcaagcgctgaaaaaccgaccgcctgtaggctcctggaactatacagataggtaaagagttccaagttcgtccagcccatgtgcaaagtcaacagtatttgccttaagatttcatatatatatatttttttgcattgactgctgagagctcctgtttactaagcaagcttttgtgtttattatcctcatttttactgaacattgttagttttggggtaatggaaacccactttttcattgtaatgactttgggggcttttgttagtaagggtgggtggggtgatgggttgcagacggaggtcaggtcttcctctttcctgagactggatctgttcaaacagcaaacgcccacagatggcccagaggtggtggtagtcagggtgtgtgggtgtttttagggttctttagtgttgtttctttcacccaggggtggtggtcccagccagtttggtgctgacggtgagaggaaattagaatctgtttgcaaattgtccaacccaccccctcaacatgaggggcttccattttctgtgttttgtaagggaactgtttccttcatgccgccatgttcctgatattagttctgatttctttttaacaaatgttatcatgattaagaaaatttccagcactttaatggccaattaactgagaatgtaagaaaattgatgctgtacaaggcaaataaagctgtttattaaccttg

SEQ ID NO: 357992 - DNA, 5651 bp, Homo sapiens
aaagggccagaggtagacattgaaggtcctgaagggaagctcaaaggtcccaagtttaagatgcctgatgtacatttcaaaagcccacaaatctccatgagtgacattgatttgaatttgaaaggacctaagataaaaggagatatggacatttccgttcctaaactggagggagatctgaaaggtcccaaagtggatgtcaaaggccctaaagtgggcattgacactcctgatattgacattcatggtccagaagggaaactgaagggccccaaatttaaaatgcctgacttacacctcaaggcaccgaagatctctatgcctgaagttgacctgaatctgaaaggtccaaaggtgaagggcgacatggacatttctctgcccaaagtggaaggcgacctcaagggccccgaagttgacatcaagggccccaaagtggacattgatgtcccagatgtggacgttcaaggcccagactggcacctaaaaatgcccaaagtgaaaatgcccaagttcagcatgcctggcttcaaaggagagggcccagatgtggatgtgaacctgcccaaggctgacattgatgtctcaggacccaaagtggacgttgatgttcctgatgtgaatatcgaaggtccagatgcgaaactaaagggccccaagttcaagatgcctgagatgagcatcaaagcccccaagatctccatgcctgatattgacttaaacctgaaaggacccaaagtgaagggcgatgtggatgttacccttcctaaagtggaaggtgacctcaagggcccagaagctgacatcaagggcccaaaagtggacatcaacacccctgatgtggatgttcatggcccagactggcacctgaagatgcccaaggtgaaaatgcccaaattcagcatgcctggcttcaaaggagaaggtccagatgtggatgtgagcctgcccaaggccgacatcgatgtctcgggacccaaggtggacgttgatattccagatgtgaatatcgaaggtccagacgcaaaactgaagggccccaagttcaagatgcctgaaataaatatcaaagctcccaagatctccatacctgatgttgacctggatttgaaaggacccaaagtaaaaggagattttgatgtgtctgtccctaaggttgaagggactttgaaaggcccagaagtagatcttaaaggtccacgtctggatttcgaaggccctgatgccaaactcagtggcccatctttgaagatgccatcgctggagatatctgctcctaaagtaactgctcctgatgttgatttgcatctcaaggcaccaaaaattggattttcaggtccgaagttagaaggtggtgaagtggacctcaagggacccaaagttgaagctccaagcttagatgtacacatggacagcccagatattaacatcgaagggccagatgttaaaatccccaaatttaagaaacccaagtttggatttggggcaaaaagccccaaagctgacatcaagtcaccttcactggatgtcactgttcctgaggcagagctgaaccttgagactcctgaaattagtgttggtggcaagggcaagaaaagtaagtttaaaatgcctaaaattcatatgagtggtcctaagattaaggccaaaaaacagggatttgacctgaatgttcctgggggtgaaattgatgccagcctcaaggctccggatgtagatgtcaacatcgcagggccggatgctgcactcaaagtcgacgtgaaatcgcccaaaaccaagaaaacgatgtttggaaaaatgtacttcccagatgtagagtttgacattaaatcacctaaatttaaagctgaggcccctctccctagccccaaactggagggtgaactccaggcacctgatctggaactttctttgccagcgattcacgtcgaaggtcttgacatcaaggcgaaggctcccaaggtcaagatgccagatgtggacatctcagtgccaaaaatagagggtgacctgaaaggccccaaagtgcaggcaaacttgggtgcacctgacatcaacatcgaaggcctagatgctaaagtcaaaacaccgtccttcggcatttctgcccctcaagtctccatccctgatgtgaatgtaaacttgaaaggaccaaagataaagggtgatgtccccagcgtgggactggaaggaccagatgtagatctgcaaggtccagaagcaaaaattaagttccccaagttttccatgcccaagatcggcatcccaggtgtgaaaatggagggtgggggagccgaggtccatgcccagctaccctctcttgaaggagacttgagaggaccagatgttaagctcgaagggcccgatgtttctctaaaggggccaggagtagacttgccttcagtgaacctctctatgccaaaagtctctgggcctgaccttgatctgaacttgaaaggaccaagtttgaagggagacctggatgcatctgttcccagcatgaaggtgcatgctccagggctcaacctcagtggtgtcggtggcaaaatgcaggtgggaggagacggtgtgaaagtgccagggatcgatgccacaacaaagcttaacgttggggcaccagatgtgacactgaggggaccaagcctgcagggagatctggctgtctctggtgacatcaaatgccctaaagtatccgtaggagctcctgatctaagcttggaggcatccgaaggcagcattaaacttcccaaaatgaagctgccccaatttggcatctctactccggggtccgacttgcacgtcaatgccaaggggccacaggtttctggcgaactgaaggggccaggtgtggatgtgaacctgaaagggcctcggatttcagcaccgaatgtggactttaacttggaaggaccaaaagtgaaagggagccttggggccactggtgagatcaaaggccccactgtcggaggaggtcttccaggcattggtgttcaaggcctagaaggaaacctccagatgcctggaattaagtcctctggatgtgatgtgaacctgccaggcgtgaatgtgaaactcccaactgggcagatttctgggcctgaaatcaaaggtggtctgaaaggttcagaagtaggtttccatggggctgctcctgatatcagtgtgaaggggcctgcctttaatatggcatctcctgagtcagattttggcatcaacttgaagggcccaaaaatcaaaggaggtgcggatgtttcagggggtgtcagtgccccagacatcagccttggtgaagggcatttgagtgttaaaggttccgggggtgagtggaagggaccccaagtctcctctgctctcaacttggacacatctaagtttgctgggggccttcatttctcaggaccaaaggtggaaggaggtgtgaaaggaggtcagattggactccaggctcctgggctgagtgtgtctgggcctcaaggtcacttggaaagtggatctggaaaagtaacattccctaaaatgaagatccccaaatttaccttctctggccgtgagctggttggcagagaaatgggggtggatgttcacttccctaaagcagaggccagcatccaagctggtgctggagacggcgagtgggaagagtctgaagtcaaactgaaaaagtccaagatcaaaatgcccaagtttaatttttccaaacctaaagggaaaggtggtgtcactggctcaccagaagcatcaatttctgggtccaaaggtgacctgaaaagttcaaaggccagcctgggctctctggaaggagaggcagaggccgaagcctcttcaccgaaaggcaaattctccttatttaaaagtaagaagccacggcaccgctcaaattcattcagtgatgaaagagagttctctggaccttccaccccgacggggacgctggagtttgaaggtggggaagtgtctctggaaggtgggaaagttaaagggaaacacgggaagctgaaattcggtacctttggtggattggggtcaaagagcaaaggtcattatgaggtgactgggagcgatgatgagacaggcaagttacaggggagtggggtgtccctggcctctaagaagtcccgactgtcctcctcttctagcaatgacagtgggaataaggttggcatccagcttcccgaggtggagctgtcagtttccacaaagaaagagtagcaggcctttgtatgtgtgtacatatatatatatataacaaaacatcagccttgggtggtgtgttcctatataaactccaaagggaaacacaccgactgcctcagcaatcatgcaaagaccttgcctggcccggtggcaagcgctgaaaaaccgaccgcctgtaggctcctggaactatacagataggtaaagagttccaagttcgtccagcccatgtgcaaagtcaacagtatttgccttaagatttcatatatatatatttttttgcattgactgctgagagctcctgtttactaagcaagcttttgtgtttattatcctcatttttactgaacattgttagttttggggtaatggaaacccactttttcattgtaatgactttgggggcttttgttagtaagggtgggtggggtgatgggttgcagacggaggtcaggtcttcctctttcctgagactggatctgttcaaacagcaaacgcccacagatggcccagaggtggtggtagtcagggtgtgtgggtgtttttagggttctttagtgttgtttctttcacccaggggtggtggtcccagccagtttggtgctgacggtgagaggaaattagaatctgtttgcaaattgtccaacccaccccctcaacatgaggggcttccattttctgtgttttgtaagggaactgtttccttcatgccgccatgttcctgatattagttctgatttctttttaacaaatgttatcatgattaagaaaatttccagcactttaatggccaattaactgagaatgtaagaaaattgatgctgtacaaggcaaataaagctgtttattaaccttgaaaaaaaaaaaaaaaaaaaaaaaaaaaaaaaaaaaagaggggggggggggaaaatttccccggagggggcaccacagtgttaccgttccccaccgcttttgttgatcaagaaggggggccccaatagaagggggcggcaatattataatacgaagaagacagacggggcgacggatgtttaacaaagcggtgtcgaggaggcggggaaaagccgtggtgaaaccggggacacatgtgggggagagagggagcccccttcaaaccttcgcgggagcggggagggcagaccacaagtggggcggcaagacactcttcctcgccaacgagaatatgttttagacaggcgcgccgagagagcggcagaatatatatatgaaaatttgtgtaccggacggtggtgtacatagagagcgtgctttggtagacaacacaaaggggatcaaataatatgactgtcgggaaggcaagcgaaagaagaaatttttgtggctccacagcgcggggaaattataatattttgtgagaaattgtattttttgtaacccggcgggcgtctgttttgttcttaataaacgggaaattgagaacaaccacaaaaaca

SEQ ID NO: 357993 - DNA, 4996 bp, Homo sapiens
aaagggccagaggtagacattgaaggtcctgaagggaagctcaaaggtcccaagtttaagatgcctgatgtacatttcaaaagcccacaaatctccatgagtgacattgatttgaatttgaaaggacctaagataaaaggagatatggacatttccgttcctaaactggagggagatctgaaaggtcccaaagtggatgtcaaaggccctaaagtgggcattgacactcctgatattgacattcatggtccagaagggaaactgaagggccccaaatttaaaatgcctgacttacacctcaaggcaccgaagatctctatgcctgaagttgacctgaatctgaaaggtccaaaggtgaagggcgacatggacatttctctgcccaaagtggaaggcgacctcaagggccccgaagttgacatcaagggccccaaagtggacattgatgtcccagatgtggacgttcaaggcccagactggcacctaaaaatgcccaaagtgaaaatgcccaagttcagcatgcctggcttcaaaggagagggcccagatgtggatgtgaacctgcccaaggctgacattgatgtctcaggacccaaagtggacgttgatgttcctgatgtgaatatcgaaggtccagatgcgaaactaaagggccccaagttcaagatgcctgagatgagcatcaaagcccccaagatctccatgcctgatattgacttaaacctgaaaggacccaaagtgaagggcgatgtggatgttacccttcctaaagtggaaggtgacctcaagggcccagaagctgacatcaagggcccaaaagtggacatcaacacccctgatgtggatgttcatggcccagactggcacctgaagatgcccaaggtgaaaatgcccaaattcagcatgcctggcttcaaaggagaaggtccagatgtggatgtgagcctgcccaaggccgacatcgatgtctcgggacccaaggtggacgttgatattccagatgtgaatatcgaaggtccagacgcaaaactgaagggccccaagttcaagatgcctgaaataaatatcaaagctcccaagatctccatacctgatgttgacctggatttgaaaggacccaaagtaaaaggagattttgatgtgtctgtccctaaggttgaagggactttgaaaggcccagaagtagatcttaaaggtccacgtctggatttcgaaggccctgatgccaaactcagtggcccatctttgaagatgccatcgctggagatatctgctcctaaagtaactgctcctgatgttgatttgcatctcaaggcaccaaaaattggattttcaggtccgaagttagaaggtggtgaagtggacctcaagggacccaaagttgaagctccaagcttagatgtacacatggacagcccagatattaacatcgaagggccagatgttaaaatccccaaatttaagaaacccaagtttggatttggggcaaaaagccccaaagctgacatcaagtcaccttcactggatgtcactgttcctgaggcagagctgaaccttgagactcctgaaattagtgttggtggcaagggcaagaaaagtaagtttaaaatgcctaaaattcatatgagtggtcctaagattaaggccaaaaaacagggatttgacctgaatgttcctgggggtgaaattgatgccagcctcaaggctccggatgtagatgtcaacatcgcagggccggatgctgcactcaaagtcgacgtgaaatcgcccaaaaccaagaaaacgatgtttggaaaaatgtacttcccagatgtagagtttgacattaaatcacctaaatttaaagctgaggcccctctccctagccccaaactggagggtgaactccaggcacctgatctggaactttctttgccagcgattcacgtcgaaggtcttgacatcaaggcgaaggctcccaaggtcaagatgccagatgtggacatctcagtgccaaaaatagagggtgacctgaaaggccccaaagtgcaggcaaacttgggtgcacctgacatcaacatcgaaggcctagatgctaaagtcaaaacaccgtccttcggcatttctgcccctcaagtctccatccctgatgtgaatgtaaacttgaaaggaccaaagataaagggtgatgtccccagcgtgggactggaaggaccagatgtagatctgcaaggtccagaagcaaaaattaagttccccaagttttccatgcccaagatcggcatcccaggtgtgaaaatggagggtgggggagccgaggtccatgcccagctaccctctcttgaaggagacttgagaggaccagatgttaagctcgaagggcccgatgtttctctaaaggggccaggagtagacttgccttcagtgaacctctctatgccaaaagtctctgggcctgaccttgatctgaacttgaaaggaccaagtttgaagggagacctggatgcatctgttcccagcatgaaggtgcatgctccagggctcaacctcagtggtgtcggtggcaaaatgcaggtgggaggagacggtgtgaaagtgccagggatcgatgccacaacaaagcttaacgttggggcaccagatgtgacactgaggggaccaagcctgcagggagatctggctgtctctggtgacatcaaatgccctaaagtatccgtaggagctcctgatctaagcttggaggcatccgaaggcagcattaaacttcccaaaatgaagctgccccaatttggcatctctactccggggtccgacttgcacgtcaatgccaaggggccacaggtttctggcgaactgaaggggccaggtgtggatgtgaacctgaaagggcctcggatttcagcaccgaatgtggactttaacttggaaggaccaaaagtgaaagggagccttggggccactggtgagatcaaaggccccactgtcggaggaggtcttccaggcattggtgttcaaggcctagaaggaaacctccagatgcctggaattaagtcctctggatgtgatgtgaacctgccaggcgtgaatgtgaaactcccaactgggcagatttctgggcctgaaatcaaaggtggtctgaaaggttcagaagtaggtttccatggggctgctcctgatatcagtgtgaaggggcctgcctttaatatggcatctcctgagtcagattttggcatcaacttgaagggcccaaaaatcaaaggaggtgcggatgtttcagggggtgtcagtgccccagacatcagccttggtgaagggcatttgagtgttaaaggttccgggggtgagtggaagggaccccaagtctcctctgctctcaacttggacacatctaagtttgctgggggccttcatttctcaggaccaaaggtggaaggaggtgtgaaaggaggtcagattggactccaggctcctgggctgagtgtgtctgggcctcaaggtcacttggaaagtggatctggaaaagtaacattccctaaaatgaagatccccaaatttaccttctctggccgtgagctggttggcagagaaatgggggtggatgttcacttccctaaagcagaggccagcatccaagctggtgctggagacggcgagtgggaagagtctgaagtcaaactgaaaaagtccaagatcaaaatgcccaagtttaatttttccaaacctaaagggaaaggtggtgtcactggctcaccagaagcatcaatttctgggtccaaaggtgacctgaaaagttcaaaggccagcctgggctctctggaaggagaggcagaggccgaagcctcttcaccgaaaggcaaattctccttatttaaaagtaagaagccacggcaccgctcaaattcattcagtgatgaaagagagttctctggaccttccaccccgacggggacgctggagtttgaaggtggggaagtgtctctggaaggtgggaaagttaaagggaaacacgggaagctgaaattcggtacctttggtggattggggtcaaagagcaaaggtcattatgaggtgactgggagcgatgatgagacaggcaagttacaggggagtggggtgtccctggcctctaagaagtcccgactgtcctcctcttctagcaatgacagtgggaataaggttggcatccagcttcccgaggtggagctgtcagtttccacaaagaaagagtagcaggcctttgtatgtgtgtacatatatatatatataacaaaacatcagccttgggtggtgtgttcctatataaactccaaagggaaacacaccgactgcctcagcaatcatgcaaagaccttgcctggcccggtggcaagcgctgagttcgtccagcccatgtgcaaagtcaacagtatttgccttaagatttcatatatatatatttttttgcattgactgctgagagctcctgtttactaagcaagcttttgtgtttattatcctcatttttactgaacattgttagttttggggtaatggaaacccactttttcattgtaatgactttgggggcttttgttagtaagggtgggtggggtgatgggttgcagacggaggtcaggtcttcctctttcctgagactggatctgttcaaacagcaaacgcccacagatggcccagaggtggtggtagtcagggtgtgtgggtgtttttagggttctttagtgttgtttctttcacccaggggtggtggtcccagccagtttggtgctgacggtgagaggaaattagaatctgtttgcaaattgtccaacccaccccctcaacatgaggggcttccattttctgtgttttgtaagggaactgtttccttcatgccgccatgttcctgatattagttctgatttctttttaacaaatgttatcatgattaagaaaatttccagcactttaatggccaattaactgagaatgtaagaaaattgatgctgtacaaggcaaataaagctgtttattaaccttg

SEQ ID NO: 357994 - DNA, 2082 bp, Homo sapiens
gcaaacttagatgtgtccaagttgagagcagaggagacttggggtccttccactcacccccggaacctttaacactcaaatgcccttcaccaaggtcagccttgggcaggttcatatccatttctgggcctgaaatcaaaggtggtctgaaaggttcagaagtaggtttccatggggctgctcctgatatcagtgtgaaggggcctgcctttaatatggcatctcctgagtcagattttggcatcaacttgaagggcccaaaaatcaaaggaggtgcggatgtttcagggggtgtcagtgccccagacatcagccttggtgaagggcatttgagtgttaaaggttccgggggtgagtggaagggaccccaagtctcctctgctctcaacttggacacatctaagtttgctgggggccttcatttctcaggaccaaaggtggaaggaggtgtgaaaggaggtcagattggactccaggctcctgggctgagtgtgtctgggcctcaaggtcacttggaaagtggatctggaaaagtaacattccctaaaatgaagatccccaaatttaccttctctggccgtgagctggttggcagagaaatgggggtggatgttcacttccctaaagcagaggccagcatccaagctggtgctggagacggcgagtgggaagagtctgaagtcaaactgaaaaagtccaagatcaaaatgcccaagtttaatttttccaaacctaaagggaaaggtggtgtcactggctcaccagaagcatcaatttctgggtccaaaggtgacctgaaaagttcaaaggccagcctgggctctctggaaggagaggcagaggccgaagcctcttcaccgaaaggcaaattctccttatttaaaagtaagaagccacggcaccgctcaaattcattcagtgatgaaagagagttctctggaccttccaccccgacggggacgctggagtttgaaggtggggaagtgtctctggaaggtgggaaagttaaagggaaacacgggaagctgaaattcggtacctttggtggattggggtcaaagagcaaaggtcattatgaggtgactgggagcgatgatgagacaggcaagttacaggggagtggggtgtccctggcctctaagaagtcccgactgtcctcctcttctagcaatgacagtgggaataaggttggcatccagcttcccgaggtggagctgtcagtttccacaaagaaagagtagcaggcctttgtatgtgtgtacatatatatatatataacaaaacatcagccttgggtggtgtgttcctatataaactccaaagggaaacacaccgactgcctcagcaatcatgcaaagaccttgcctggcccggtggcaagcgctgaaaaaccgaccgcctgtaggctcctggaactatacagataggtaaagagttccaagttcgtccagcccatgtgcaaagtcaacagtatttgccttaagatttcatatatatatatttttttgcattgactgctgagagctcctgtttactaagcaagcttttgtgtttattatcctcatttttactgaacattgttagttttggggtaatggaaacccactttttcattgtaatgactttgggggcttttgttagtaagggtgggtggggtgatgggttgcagacggaggtcaggtcttcctctttcctgagactggatctgttcaaacagcaaacgcccacagatggcccagaggtggtggtagtcagggtgtgtgggtgtttttagggttctttagtgttgtttctttcacccaggggtggtggtcccagccagtttggtgctgacggtgagaggaaattagaatctgtttgcaaattgtccaacccaccccctcaacatgaggggcttccattttctgtgttttgtaagggaactgtttccttcatgccgccatgttcctgatattagttctgatttctttttaacaaatgttatcatgattaagaaaatttccagcactttaatggccaattaactgagaatgtaagaaaattgatgctgtacaaggcaaataaagctgtttattaaccttg

SEQ ID NO: 357995 - DNA, 4813 bp, Homo sapiens
aaagggccagaggtagacattgaaggtcctgaagggaagctcaaaggtcccaagtttaagatgcctgatgtacatttcaaaagcccacaaatctccatgagtgacattgatttgaatttgaaaggacctaagataaaaggagatatggacatttccgttcctaaactggagggagatctgaaaggtcccaaagtggatgtcaaaggccctaaagtgggcattgacactcctgatattgacattcatggtccagaagggaaactgaagggccccaaatttaaaatgcctgacttacacctcaaggcaccgaagatctctatgcctgaagttgacctgaatctgaaaggtccaaaggtgaagggcgacatggacatttctctgcccaaagtggaaggcgacctcaagggccccgaagttgacatcaagggccccaaagtggacattgatgtcccagatgtggacgttcaaggcccagactggcacctaaaaatgcccaaagtgaaaatgcccaagttcagcatgcctggcttcaaaggagagggcccagatgtggatgtgaacctgcccaaggctgacattgatgtctcaggacccaaagtggacgttgatgttcctgatgtgaatatcgaaggtccagatgcgaaactaaagggccccaagttcaagatgcctgagatgagcatcaaagcccccaagatctccatgcctgatattgacttaaacctgaaaggacccaaagtgaagggcgatgtggatgttacccttcctaaagtggaaggtgacctcaagggcccagaagctgacatcaagggcccaaaagtggacatcaacacccctgatgtggatgttcatggcccagactggcacctgaagatgcccaaggtgaaaatgcccaaattcagcatgcctggcttcaaaggagaaggtccagatgtggatgtgagcctgcccaaggccgacatcgatgtctcgggacccaaggtggacgttgatattccagatgtgaatatcgaaggtccagacgcaaaactgaagggccccaagttcaagatgcctgaaataaatatcaaagctcccaagatctccatacctgatgttgacctggatttgaaaggacccaaagtaaaaggagattttgatgtgtctgtccctaaggttgaagggactttgaaaggcccagaagtagatcttaaaggtccacgtctggatttcgaaggccctgatgccaaactcagtggcccatctttgaagatgccatcgctggagatatctgctcctaaagtaactgctcctgatgttgatttgcatctcaaggcaccaaaaattggattttcaggtccgaagttagaaggtggtgaagtggacctcaagggacccaaagttgaagctccaagcttagatgtacacatggacagcccagatattaacatcgaagggccagatgttaaaatccccaaatttaagaaacccaagtttggatttggggcaaaaagccccaaagctgacatcaagtcaccttcactggatgtcactgttcctgaggcagagctgaaccttgagactcctgaaattagtgttggtggcaagggcaagaaaagtaagtttaaaatgcctaaaattcatatgagtggtcctaagattaaggccaaaaaacagggatttgacctgaatgttcctgggggtgaaattgatgccagcctcaaggctccggatgtagatgtcaacatcgcagggccggatgctgcactcaaagtcgacgtgaaatcgcccaaaaccaagaaaacgatgtttggaaaaatgtacttcccagatgtagagtttgacattaaatcacctaaatttaaagctgaggcccctctccctagccccaaactggagggtgaactccaggcacctgatctggaactttctttgccagcgattcacgtcgaaggtcttgacatcaaggcgaaggctcccaaggtcaagatgccagatgtggacatctcagtgccaaaaatagagggtgacctgaaaggccccaaagtgcaggcaaacttgggtgcacctgacatcaacatcgaaggcctagatgctaaagtcaaaacaccgtccttcggcatttctgcccctcaagtctccatccctgatgtgaatgtaaacttgaaaggaccaaagataaagggtgatgtccccagcgtgggactggaaggaccagatgtagatctgcaaggtccagaagcaaaaattaagttccccaagttttccatgcccaagatcggcatcccaggtgtgaaaatggagggtgggggagccgaggtccatgcccagctaccctctcttgaaggagacttgagaggaccagatgttaagctcgaagggcccgatgtttctctaaaggggccaggagtagacttgccttcagtgaacctctctatgccaaaagtctctgggcctgaccttgatctgaacttgaaaggaccaagtttgaagggagacctggatgcatctgttcccagcatgaaggtgcatgctccagggctcaacctcagtggtgtcggtggcaaaatgcaggtgggaggagacggtgtgaaagtgccagggatcgatgccacaacaaagcttaacgttggggcaccagatgtgacactgaggggaccaagcctgcagggagatctggctgtctctggtgacatcaaatgccctaaagtatccgtaggagctcctgatctaagcttggaggcatccgaaggcagcattaaacttcccaaaatgaagctgccccaatttggcatctctactccggggtccgacttgcacgtcaatgccaaggggccacaggtttctggcgaactgaaggggccaggtgtggatgtgaacctgaaagggcctcggatttcagcaccgaatgtggactttaacttggaaggaccaaaagtgaaagggagccttggggccactggtgagatcaaaggccccactgtcggaggaggtcttccaggcattggtgttcaaggcctagaaggaaacctccagatgcctggaattaagtcctctggatgtgatgtgaacctgccaggcgtgaatgtgaaactcccaactgggcagatttctgggcctgaaatcaaaggtggtctgaaaggttcagaagtaggtttccatggggctgctcctgatatcagtgtgaaggggcctgcctttaatatggcatctcctgagtcagattttggcatcaacttgaagggcccaaaaatcaaaggaggtgcggatgtttcagggggtgtcagtgccccagacatcagccttggtgaagggcatttgagtgttaaaggttccgggggtgagtggaagggaccccaagtctcctctgctctcaacttggacacatctaagtttgctgggggccttcatttctcaggaccaaaggtggaaggaggtgtgaaaggaggtcagattggactccaggctcctgggctgagtgtgtctgggcctcaaggtcacttggaaagtggatctggaaaagtaacattccctaaaatgaagatccccaaatttaccttctctggccgtgagctggttggcagagaaatgggggtggatgttcacttccctaaagcagaggccagcatccaagctggtgctggagacggcgagtgggaagagtctgaagtcaaactgaaaaagtccaagatcaaaatgcccaagtttaatttttccaaacctaaagggaaaggtggtgtcactggctcaccagaagcatcaatttctgggtccaaaggtgacctgaaaagttcaaaggccagcctgggctctctggaaggagaggcagaggccgaagcctcttcaccgaaaggcaaattctccttatttaaaagtaagaagccacggcaccgctcaaattcattcagtgatgaaagagagttctctggaccttccaccccgacggggacgctggagtttgaaggtggggaagtgtctctggaaggtgggaaagttaaagggaaacacgggaagctgaaattcggtacctttggtggattggggtcaaagagcaaaggtcattatgaggtgactgggagcgatgatgagacaggcaagttacaggggagtggggtgtccctggcctctaagaagtcccgactgtcctcctcttctagcaatgacagtgggaataaggttggcatccagcttcccgaggtggagctgtcagtttccacaaagaaagagtagcaggcctttgtatgtgtgtacatatatatatatataacaaaacatcagccttgggtggtgtgttcctatataaactccaaagggaaacacaccgactgcctcagcaatcatgcaaagaccttgcctggcccggtggcaagcgctgaaaaaccgaccgcctgtaggctcctggaactatacagataggtaaagagttccaagttcgtccagcccatgtgcaaagtcaacagtatttgccttaagatttcatatatatatatttttttgcattgactgctgagagctcctgtttttagggttctttagtgttgtttctttcacccaggggtggtggtcccagccagtttggtgctgacggtgagaggaaattagaatctgtttgcaaattgtccaacccaccccctcaacatgaggggcttccattttctgtgttttgtaagggaactgtttccttcatgccgccatgttcctgatattagttctgatttctttttaacaaatgttatcatgattaagaaaatttccagcactttaatggccaattaactgagaatgtaagaaaattgatgctgtacaaggcaaataaagctgtttattaaccttg

SEQ ID NO: 357996 - DNA, 1730 bp, Homo sapiens
ccatgtgggcatcacgggatagccatgtggggcatcacggccatgtggggcatcacgggggggccttcatttctcaggaccaaaggtggaaggaggtgtgaaaggaggtcagattggactccaggctcctgggctgagtgtgtctgggcctcaaggtcacttggaaagtggatctggaaaagtaacattccctaaaatgaagatccccaaatttaccttctctggccgtgagctggttggcagagaaatgggggtggatgttcacttccctaaagcagaggccagcatccaagctggtgctggagacggcgagtgggaagagtctgaagtcaaactgaaaaagtccaagatcaaaatgcccaagtttaatttttccaaacctaaagggaaaggtggtgtcactggctcaccagaagcatcaatttctgggtccaaaggtgacctgaaaagttcaaaggccagcctgggctctctggaaggagaggcagaggccgaagcctcttcaccgaaaggcaaattctccttatttaaaagtaagaagccacggcaccgctcaaattcattcagtgatgaaagagagttctctggaccttccaccccgacggggacgctggagtttgaaggtggggaagtgtctctggaaggtgggaaagttaaagggaaacacgggaagctgaaattcggtacctttggtggattggggtcaaagagcaaaggtcattatgaggtgactgggagcgatgatgagacaggcaagttacaggggagtggggtgtccctggcctctaagaagtcccgactgtcctcctcttctagcaatgacagtgggaataaggttggcatccagcttcccgaggtggagctgtcagtttccacaaagaaagagtagcaggcctttgtatgtgtgtacatatatatatatataacaaaacatcagccttgggtggtgtgttcctatataaactccaaagggaaacacaccgactgcctcagcaatcatgcaaagaccttgcctggcccggtggcaagcgctgaaaaaccgaccgcctgtaggctcctggaactatacagataggtaaagagttccaagttcgtccagcccatgtgcaaagtcaacagtatttgccttaagatttcatatatatatatttttttgcattgactgctgagagctcctgtttactaagcaagcttttgtgtttattatcctcatttttactgaacattgttagttttggggtaatggaaacccactttttcattgtaatgactttgggggcttttgttagtaagggtgggtggggtgatgggttgcagacggaggtcaggtcttcctctttcctgagactggatctgttcaaacagcaaacgcccacagatggcccagaggtggtggtagtcagggtgtgtgggtgtttttagggttctttagtgttgtttctttcacccaggggtggtggtcccagccagtttggtgctgacggtgagaggaaattagaatctgtttgcaaattgtccaacccaccccctcaacatgaggggcttccattttctgtgttttgtaagggaactgtttccttcatgccgccatgttcctgatattagttctgatttctttttaacaaatgttatcatgattaagaaaatttccagcactttaatggccaattaactgagaatgtaagaaaattgatgctgtacaaggcaaataaagctgtttattaaccttg

SEQ ID NO: 357997 - DNA, 2147 bp, Homo sapiens
cattcaaagagagggagttagtgcagggtaccgagatcaggaagaggagtggtgcagaggtgggaggtgatgagactcaagactacagagagaagaaagggccggcagcccagatcccagccccacccctcctgccctgcattcaggcagagcacagagggataaagagggaggtgggttgggggacaaggcagagatgcatatacctgggacgtacacctgcgtggagcccagaaggaggcttctgtccgccacactgctagtccccagggcccccttgcaagtggacatcatgttaccccacatgcatgtgacttggccagaggagacagagtcttcatgtgaactggaaaaagatccccctctcccggtggatacatttgacaaacaaaaagtgggctggttttcagcccctgctcatctcattggcccaatacctgtgcagtgagcaacctgcacagctgtacttggtgatcatggtttcctcccagggtgctctggctaggggtgccgcccacccactgctatgaaccccctgcatgggatggtggttgtggttatgaaggaggtgtgttgctgtgttaggaacaggcctgggctgagagaaggggactcagtcaggcagctgggcagagacatggacagcagggctgaggtgataagagggacctccacggacatcaaagcaggtgatggagccaacagcctgctggtttggagcaggacctatgaccagaggtgagacgctcagaggggcctgggcccctccctttaacccaaggcactccaggcttcgctattgcacctgaggacacgtgcacccagtgtcacagcccatggggcctgtgacatccaggccagagacctcgggcggctccctccactcctcacccccctgtctccaggcatctcagggccatcctaaacccctgatcacccgtctttgtcccaaccctgagactcgggacactccacaggaggccactttggaagctcggaacatccccctgcccatctagcatcttatttgcataaaacaaaagggggctggcactcaggatatttcatgggctcatgacatggcgtgtggtggcgcattccagtacagtatccatcctctccgccatcgccggggactgccaggatgagacttgctgccaccggggctcccatgagctcagccacacctggaacccctctgacacccacacctaccataatgaaccccaaaaccctgtccagaaactcaggaggagggaatctcaaggacaggacaactgtctccagccagcagccttgcttggagaagatgcctcccgaccacctttctggccgtttagccctcatccatttccccatccaaggctccaccctaacccaccctggtaattcctgggcctgaacgcaccgtcaatgaccaaagcttgggaggatgctgtggccaggtgtgggcagcgtgatgtggaccccacaaatggattcagagggctgggtgccgtgactcatgcctggaatcccagcactttgggaggccaaggtggaaggatcacttgaggtcgggaattcgagagcagcctgaccaacatggtgcaaccctgtctgtactaaaaatacaaaaattagccgggcgcagtggcacgcacctgtaatcccagctactcaggaggctgaggcaggggaatcgcttgaacccgggaggcagaggtcgcagtgagctgagatcacatcattgcactccagcctgggcaacagagagagacgctgtctccaaaaaaaaaaaaaaaaaacaaaaacgcactcagagggttggatgaaggaggcggctccagcctggactagccggcaagagacagcatcactggggaccatcgtcccaggcccgatcctctcctgtagtcagtcctggtctggaccactcaaggacagagatggaagcttgaaccccattcagcagggcccacaggtctctgtccctggtggaaggacaagggatgagaggacagatacatctgccacccctcacccatcggcacctgtgccctctctagccacaggcccccgctcacggccagttctgcttagatatggattctcaccaaatcctgctatttccatatccatagatcctttcctggggatcagaaaaa

SEQ ID NO: 357998 - DNA, 560 bp, Homo sapiens
tttttttttctctcttttttttttgagacggagtcttgcctctgttgcccaggctggagtaaaatggcacaatcttggctcactgcaacctctgccttctgggttcaagcgattctcctgcctcagcctcccaaagtgctgggattacaggcatgagccactatgcctggccacctctcccactcttatgtcaacctcacaagggtaggtacttgtgtgtgccctgttcactgctgtgtctccaaacctgttacattcagtaggcgctcggtcaatactcatctagtaaaaagcagcccctcttagactcagcccaagcccaggaccactcaaggacagagatggaagcttgaaccccattcagcagggcccacaggtctctgtccctggtggaaggacaagggatgagaggacagatacatctgccacccctcacccatcggcacctgtgccctctctagccacaggcccccgctcacggccagttctgcttagatatggattctcaccaaatcctgctatttccatatccatagatcctttcctggggatcagaaaaa

SEQ ID NO: 357999 - DNA, 2803 bp, Homo sapiens
ccccttatggtcgcccctttgccggtctccccctggggaatttctttttgttcggcactaatgctgcttttaatggcggcgcaatagagaagtacaaggttttactagcttgagctactagaaggtgtaaaagatgcccgctgacactaccaagtagcctcttaatagaaatgtagaaaatatacaggacagggtggagatgagctcttgaatttagtagggtgaaagagttaactgccaacccggcactatcattgtacttgtttggagaaaatctgttttgttctggtgatgatggttttatcttcccttttagttgggtgggaagtaacagaaaatttgtttccccaaaagtttgacattttcttgttaatacacgtttcatttcagtacgatgccaactgttaagcctgcaggaatcctcctgggtatttctgaattgtgctgtgtgcatgtgtgtttgaaagctcaaacagcttgtcttcttacagcatcgagttgtttgctttattgttagacacaatattagcagtgtatcctttccgtattccctaccatcgaacccattaagatctaaaatccttgtcaagtatctggctttaaaagttgggagatggtagtttaaaaaaaaaaaaagctcttgcaaaaaccatccagtccctaagcatgggctatgttgcagcctcttccagaacagtttccactgcagtgatctttcagttctgcccacattaggttagcaggctgtggagagaagtgcctgtgtctacccttttcccaagacagtcctcatttccaaattctagttttgtcacaaaggctcatgctgttccgtgtcctcttcaaatctggaccgacagcaaagtcctctgactagagccatcgtgcttctcagctccgcttgtgtgtgccgtgtggactccgagtggcgtcgcgcggagggcgagtgggcaggagggctcaggccaactctaaggcacttttctctacatccaatggcaggttgtccccccggcacgctccacagctggtgacccgacagttcctggctccttgttcagacagcttgtcagtgaagaagacaacacgtctgcaccttcattattcaaacttggctggctctctagtatgactaagtaacatggcaacacatctgtctctccctaaataaatactaccacattatttcttctaaaggtgcctctgctcatctgattctcagccacaccaatctttccagtttcactgatggaatgtggccccctagttactgttgggggttactttaagcatcaagttaatccttgtcccaaaatttcacaatacttgttgctttagacatcagttcaggtagcttacattttatcagcgttcaacaacaccttaattgttgacactacaaggtggaattgtcaatgagatcatgtaagctgctgactgaccaagtttgtaggacaaaaagtcattacatattactttacttgcagaactgtgccatgtttcctactaaagtctgaggtgcagactctggtggaatagtgacacagaagttatctgggtatacaagaatctaaaagacattctccctggaaatacaaatatataacaaagagtagagactattattagggagtgtgcttcactgacagtctgaattggatctgattgttctcctgttacacaggagagagtactttcaatagaacatctacatactgagaggtagtatggcagttaatttcagtgcaagactgaatcaagcttcctatattttggaaaaaaacttatgttttttcatggaaactagatactctttactagtttattgaataaaaaaaattgaagatcccgcatttttaaaaggccctttacataaagtagagtttctagttgacagatttggaaatcagtctgaatgggacatactatggattcaacacacagaatgagttttcctcaaaccactaccttgacatagatttgataccctccctcaaaagaatcctataaaaaattgcttcaaagcccctttgaaattgcaatagtgcagcaaaaccacaagtaaacaactgcctgttaacctgttatttcaaatatagactgaaaagccaacaggcatttttcgtgtgcaatttttcttttaaaacaagttgtaagttgaaatatcaaatctgcacagcgctgtcccttcacagaaggcaagaaactgccggcacatcatgtcagaggccgccctcggtgctgtaggctgtggaagtgggcctccctcagggtctggttgatgtggaagtagaggccttggcacagcgcggactgctcgggcacgggctgaggcgtgttagggctggatccggccatggtctggctcaagctgccttccggcccgctggccctgtccgggctgttgatgctgctgctgctgctgctgctgctcccaccactgtcactgcctgaagactctgtgtcccaggaatcctgaaagacagggtttctgctacttcttttggtctgggggggaagatggttgtcttcttcgttgccattccttctccttttcctgggacggaggcgctcgctcatggcagctggcggatggaagctacgcggcgccgctccgcgaagagagggaacagagggggttgtgtttcggcggccgccacgcccaccccctcgggccttggctctcgcagccgctcgggtggacgcagccggtggcgagtacccctcagtcggacccgtaccaccactacttccggcgtctgctccgcgcccccccatgtcgctgccgccgtggtaccgccct

SEQ ID NO: 358000 - DNA, 1018 bp, Homo sapiens
ccagattgtgtcactgcactccagcctgggcaacaaggcgagactctatctcaaaacaaacaaacaaacaaacaaacaaaaacccaagaaggaacaaatcctgattttggaaagaattcagtaagtcttctctaatgagcctcctcaaaacacttctccttcaggcaaggagcctttttttcccctttagaacaaccatttacagcatctgaggccttttttaagggccaggtctcttccctgctgttaggtttttaattttaaggtcaagtttctaacaaaatttgttttgttgttgtgagattaaactggccatatgagcattaaaaccatctgcttctgaaatagcaagctgaaactcaaccggggaccgggaattcatttgcagaaagaaggtgcatttccagtcacccagaaccgggcgctgcagctgctttatgatctgcgttacctcaacattgttctgacagccaagggtgacgaggtgaagagtggccggagcaagccagactccagaattgagaaagtgactgaccacctggaagccctcattgatccatttgacctggacgttttcacgccacacctcaacagcaaccttcatcgcctggtgcagcgaacttctgttctgtttggattggtgactggtacagagaatcagctcgccccccggagcagtacgttcaactcccaagaaccccataacatcctgccactggcatccagtcagatcaggtaaaggctgccaagaggcttctgcggggcacttcgggaggccaaggtggacggatcacgtcaggagatcgagaccatcctggctaacatggtgaaaccctgtctctactaaaaaaaatacaaaaaattagctggcctggtggcaggtgcctatagtcccagctattcaggaggctgaggcaggagaatggcgtgaacccaggaggcggagcttgcagtgagccgagattgcgccactgcactccagcctgggcgacagaacgagactctgtctcaaaaaaaa

SEQ ID NO: 358001 - DNA, 465 bp, Homo sapiens
tggcttgtatggatatctgccttttattaccaggttttgattcatggattcacccagtcattacttctagatgatgctggctcagttctggccacagccaccagctgggatgagctagaaattcaggaggaggcagagtctggcagcagtgtcacatccaagatccgactccctgcacaggtgagcagggaccatgggctgaaaaagggaataaactgctccgtggaaaagaagaaagattttagaaaatcattcaacatacaacttctgaggaatagctgaaagtaacatctgtaattttctactgtgggggcatagtagatgtagggctaagtaaatggcagactgttcaagaagtcagttaaccattctttccttttgtagcataggctctgtgctaattagggaaccacttacttgccgtgaaatcagcagcataaaacacaggcacctcttcgagatcag

SEQ ID NO: 358002 - DNA, 6030 bp, Homo sapiens
agcgggcgggcgccaggcgcgcggagagcggcggctgcgcctgcgccaacgccgtcagtccgcggggcccgatcccgacacctaactccacagagaagctctgctcctaagggaaagggaagacttcagccacagtttcgcagccaacctggcgacctcacctctctggcgacctcacttcccagccggctccgtttaagaaaaccccgcgcaggaccgcgcccgccccgcctcctcgcgcccgccccctcgggtaacaaacatggcccccggcggggcggaagcgcttccgcccccaacgaagatggcggagggggggcgggactaaaagggggtaggtggatcgccgggggctgacgagtgcaccatggccaccgcggcaacctcacccgcgctgaagcggctggatctgcgcgaccctgcggctcttttcgagacgcatggagcggaggagatccgcgggctggagcgccaggttcgggccgagatcgagcacaagaaggaggagctgcggcagatggtgggcgaacggtaccgcgacctgatcgaggcggccgacaccatcggccagatgcgccgctgcgccgtggggctagtggacgccgtgaaggccaccgaccagtactgcgcccgcctccgccaggccggctcggccgcgccccggccaccgcgggcccagcagccacagcagccatcccaagagaagttctacagcatggctgcccagatcaagctactcttagaaattccggagaagatctggagctcgatggaagcctctcagtgtctccacgccacacagctctacctgctctgctgccacctccacagcctgctccagctggattcttctagttcccgatacagtcccgtcctctcccggtttcctatactcatccggcaggtggcggccgccagccacttccggtcaactattctgcatgaaagcaagatgttgctcaaatgccaaggtgtgtctgaccaagctgtggccgaggccctgtgctctataatgctcttagaagagagttctcctcgccaagccctcacagacttcctgctggccagaaaggcaactattcagaaacttctcaaccagccacaccatggtgctggtatcaaggctcagatttgctcattagtggagttgctggccaccactctgaagcaagctcatgcccttttctacactttgccagaaggactgctgccagatccagccctgccatgtggcttgctcttctctactctggagaccatcacaggccagcatcctgccggaaagggcactggtgtcctgcaggaagagatgaaactctgcagctggtttaaacacctgccagcatccatcgtcgagttccagccaacactccgaacccttgcacatcccatcagtcaggaatacctgaaagacacgctgcagaaatggatccacatgtgtaatgaagacattaaaaatgggatcaccaacctgctcatgtacgtgaagagcatgaagggtctcgcgggaatccgggacgccatgtgggagttacttaccagtgagtccaccaatcacagctgggatgtgctatgtcggcggcttctggagaagccgctcttgttctgggaagatatgatgcagcaactgttccttgaccgattacagactctgacaaaagaaggctttgactccatctccagtagctccaaggagctcttggtttcagctttgcaggaacttgaaagcagcaccagcaactccccttcaaataagcacatccactttgagtacaacatgtcgctcttcctctggtctgagagtcctaatgacctgccttccgatgcggcctgggtcagcgtggcaaaccggggtcagtttgccagtagcggcctctccatgaaagcacaagccatcagcccttgtgtacagaacttctgttctgccctggattctaagctgaaggttaaactagatgacctcctggcttacctcccctctgatgactcatcactgcccaaggacgtttctcccacacaggccaagagttctgcctttgacagatacgcagatgcggggaccgtgcaggagatgctgcggactcagtccgtggcatgcatcaagcacatcgtggactgcatccgggcagagctacagagcattgaagaaggtgtgcaagggcaacaggatgccctcaacagtgccaagctgcactcagttcttttcatggccagactctgccagtccctgggagagctgtgcccccatctgaagcagtgcatcctgggaaaatcagagagctcagagaaaccagcaagggagtttagggctctgagaaaacagggaaaggtgaaaactcaggaaatcattcctacacaggccaagtggcaagaggttaaagaagtactcctccagcagagcgtgatgggctaccaggtctggagcagtgcagttgtgaaagttttgattcatggattcacccagtcattacttctagatgatgctggctcagttctggccacagccaccagctgggatgagctagaaattcaggaggaggcagagtctggcagcagtgtcacatccaagatccgactccctgcacagccgtcctggtatgtacagtccttcctgtttagtttatgccaggaaattaatcgggttggaggccatgccttgccaaaggtgacattacaggagatgctgaaaagctgtatggttcaagtagtagctgcctatgagaaactctccgaagaaaaacagattaagaaagaaggtgcatttccagtcacccagaaccgggcgctgcagctgctttatgatctgcgttacctcaacattgttctgacagccaagggtgacgaggtgaagagtggccggagcaagccagactccagaattgagaaagtgactgaccacctggaagccctcattgatccatttgacctggacgttttcacgccacacctcaacagcaaccttcatcgcctggtgcagcgaacttctgttctgtttggattggtgactggtacagagaatcagctcgccccccggagcagtacgttcaactcccaagaaccccataacatcctgccactggcatccagtcagatcaggtttggacttctcccactgagcatgacaagcactcgaaaggctaaatcaaccagaaacatcgaaacaaaagctcaggttggtgccaagagcaagaggctcatccgtggatgggtccccacctcccaccgagccacccatgatcagctcccttttaaataactgattaagaactgaatgacaaaatgcactaatgctgcttttaatggcggcgcaatagagaagtacaaggttttactagcttgagctactagaaggtgtaaaagatgcccgctgacactaccaagtagcctcttaatagaaatgtagaaaatatacaggacagggtggagatgagctcttgaatttagtagggtgaaagagttaactgccaacccggcactatcattgtacttgtttggagaaaatctgttttgttctggtgatgatggttttatcttcccttttagttgggtgggaagtaacagaaaatttgtttccccaaaagtttgacattttcttgttaatacacgtttcatttcagtacgatgccaactgttaagcctgcaggaatcctcctgggtatttctgaattgtgctgtgtgcatgtgtgtttgaaagctcaaacagcttgtcttcttacagcatcgagttgtttgctttattgttagacacaatattagcagtgtatcctttccgtattccctaccatcgaacccattaagatctaaaatccttgtcaagtatctggctttaaaagttgggagatggtagtttaaaaaaaaaaaaagctcttgcaaaaaccatccagtccctaagcatgggctatgttgcagcctcttccagaacagtttccactgcagtgatctttcagttctgcccacattaggttagcaggctgtggagagaagtgcctgtgtctacccttttcccaagacagtcctcatttccaaattctagttttgtcacaaaggctcatgctgttccgtgtcctcttcaaatctggaccgacagcaaagtcctctgactagagccatcgtgcttctcagctccgcttgtgtgtgccgtgtggactccgagtggcgtcgcgcggagggcgagtgggcaggagggctcaggccaactctaaggcacttttctctacatccaatggcaggttgtccccccggcacgctccacagctggtgacccgacagttcctggctccttgttcagacagcttgtcagtgaagaagacaacacgtctgcaccttcattattcaaacttggctggctctctagtatgactaagtaacatggcaacacatctgtctctccctaaataaatactaccacattatttcttctaaaggtgcctctgctcatctgattctcagccacaccaatctttccagtttcactgatggaatgtggccccctagttactgttgggggttactttaagcatcaagttaatccttgtcccaaaatttcacaatacttgttgctttagacatcagttcaggtagcttacattttatcagcgttcaacaacaccttaattgttgacactacaaggtggaattgtcaatgagatcatgtaagctgctgactgaccaagtttgtaggacaaaaagtcattacatattactttacttgcagaactgtgccatgtttcctactaaagtctgaggtgcagactctggtggaatagtgacacagaagttatctgggtatacaagaatctaaaagacattctccctggaaatacaaatatataacaaagagtagagactattattagggagtgtgcttcactgacagtctgaattggatctgattgttctcctgttacacaggagagagtactttcaatagaacatctacatactgagaggtagtatggcagttaatttcagtgcaagactgaatcaagcttcctatattttggaaaaaaacttatgttttttcatggaaactagatactctttactagtttattgaataaaaaaaattgaagatcccgcatttttaaaaggccctttacataaagtagagtttctagttgacagatttggaaatcagtctgaatgggacatactatggattcaacacacagaatgagttttcctcaaaccactaccttgacatagatttgataccctccctcaaaagaatcctataaaaaattgcttcaaagcccctttgaaattgcaatagtgcagcaaaaccacaagtaaacaactgcctgttaacctgttatttcaaatatagactgaaaagccaacaggcatttttcgtgtgcaatttttcttttaaaacaagttgtaagttgaaatatcaaatctgcacagcgctgtcccttcacagaaggcaagaaactgccggcacatcatgtcagaggccgccctcggtgctgtaggctgtggaagtgggcctccctcagggtctggttgatgtggaagtagaggccttggcacagcgcggactgctcgggcacgggctgaggcgtgttagggctggatccggccatggtctggctcaagctgccttccggcccgctggccctgtccgggctgttgatgctgctgctgctgctgctgctgctcccaccactgtcactgcctgaagactctgtgtcccaggaatcctgaaagacagggtttctgctacttcttttggtctgggggggaagatggttgtcttcttcgttgccattccttctccttttcctgggacggaggcgctcgctcatggcagctggcggatggaagctacgcggcgccgctccgcgaagagagggaacagagggggttgtgtttcggcggccgccacgcccaccccctcgggccttggctctcgcagccgctcgggtggacgcagccggtggcgagtacccctcagtcggacccgtaccaccactacttccggcgtctgctccgcgcccccccatgtcgctgccgccgtggtaccgccct

SEQ ID NO: 358003 - DNA, 5345 bp, Homo sapiens
agcgggcgggcgccaggcgcgcggagagcggcggctgcgcctgcgccaacgccgtcagtccgcggggcccgatcccgacacctaactccacagagaagctctgctcctaagggaaagggaagacttcagccacagtttcgcagccaacctggcgacctcacctctctggcgacctcacttcccagccggctccgtttaagaaaaccccgcgcaggaccgcgcccgccccgcctcctcgcgcccgccccctcgggtaacaaacatggcccccggcggggcggaagcgcttccgcccccaacgaagatggcggagggggggcgggactaaaagggggtaggtggatcgccgggggctgacgagtgcaccatggccaccgcggcaacctcacccgcgctgaagcggctggatctgcgcgaccctgcggctcttttcgagacgcatggagcggaggagatccgcgggctggagcgccaggttcgggccgagatcgagcacaagaaggaggagctgcggcagatggtgggcgaacggtaccgcgacctgatcgaggcggccgacaccatcggccagatgcgccgctgcgccgtggggctagtggacgccgtgaaggccaccgaccagtactgcgcccgcctccgccaggccggctcggccgcgccccggccaccgcgggcccagcagccacagcagccatcccaagagaagttctacagcatggctgcccagatcaagctactcttagaaattccggagaagatctggagctcgatggaagcctctcagtgtctccacgccacacagctctacctgctctgctgccacctccacagcctgctccagctggattcttctagttcccgatacagtcccgtcctctcccggtttcctatactcatccggcaggtggcggccgccagccacttccggtcaactattctgcatgaaagcaagatgttgctcaaatgccaaggtgtgtctgaccaagctgtggccgaggccctgtgctctataatgctcttagaagagagttctcctcgccaagccctcacagacttcctgctggccagaaaggcaactattcagaaacttctcaaccagccacaccatggtgctggtatcaaggctcagatttgctcattagtggagttgctggccaccactctgaagcaagctcatgcccttttctacactttgccagaaggactgctgccagatccagccctgccatgtggcttgctcttctctactctggagaccatcacaggccagcatcctgccggaaagggcactggtgtcctgcaggaagagatgaaactctgcagctggtttaaacacctgccagcatccatcgtcgagttccagccaacactccgaacccttgcacatcccatcagtcaggaatacctgaaagacacgctgcagaaatggatccacatgtgtaatgaagacattaaaaatgggatcaccaacctgctcatgtacgtgaagagcatgaagggtctcgcgggaatccgggacgccatgtgggagttacttaccagtgagtccaccaatcacagctgggatgtgctatgtcggcggcttctggagaagccgctcttgttctgggaagatatgatgcagcaactgttccttgaccgattacagactctgacaaaagaaggctttgactccatctccagtagctccaaggagctcttggtttcagctttgcaggaacttgaaagcagcaccagcaactccccttcaaataagcacatccactttgagtacaacatgtcgctcttcctctggtctgagagtcctaatgacctgccttccgatgcggcctgggtcagcgtggcaaaccggggtcagtttgccagtagcggcctctccatgaaagcacaagccatcagcccttgtgtacagaacttctgttctgccctggattctaagctgaaggttaaactagatgacctcctggcttacctcccctctgatgactcatcactgcccaaggacgtttctcccacacaggccaagagttctgcctttgacagatacgcagatgcggggaccgtgcaggagatgctgcggactcagtccgtggcatgcatcaagcacatcgtggactgcatccgggcagagctacagagcattgaagaaggtgtgcaagggcaacaggatgccctcaacagtgccaagctgcactcagttcttttcatggccagactctgccagtccctgggagagctgtgcccccatctgaagcagtgcatcctgggaaaatcagagagctcagagaaaccagcaagggagtttagggctctgagaaaacagggaaaggtgaaaactcaggaaatcattcctacacaggccaagtggcaagaggttaaagaagtactcctccagcagagcgtgatgggctaccaggtctggagcagtgcagttgtgaaagttttgattcatggattcacccagtcattacttctagatgatgctggctcagttctggccacagccaccagctgggatgagctagaaattcaggaggaggcagagtctggcagcagtgtcacatccaagatccgactccctgcacagccgtcctggtatgtacagtccttcctgtttagtttatgccaggaaattaatcgggttggaggccatgccttgccaaaggtgacattacaggagatgctgaaaagctgtatggttcaagtagtagctgcctatgagaaactctccgaagaaaaacagattaagaaagaaggtgcatttccagtcacccagaaccgggcgctgcagctgctttatgatctgcgttacctcaacattgttctgacagccaagggtgacgaggtgaagagtggccggagcaagccagactccagaattgagaaagtgactgaccacctggaagccctcattgatccatttgacctggacgttttcacgccacacctcaacagcaaccttcatcgcctggtgcagcgaacttctgttctgtttggattggtgactggtacagagaatcagctcgccccccggagcagtacgttcaactcccaagaaccccataacatcctgccactggcatccagtcagatcaggtttggacttctcccactgagcatgacaagcactcgaaaggctaaatcaaccagaaacatcgaaacaaaagctcaggttggtgccaagagcaagaggctcatccgtggatgggtccccacctcccaccgagccacccatgatcagctcccttttaaataactgattaagaactgaatgacaaaatgcactaatgctgcttttaatggcggcgcaatagagaagtacaaggttttactagcttgagctactagaaggtgtaaaagatgcccgctgacactaccaagtagcctcttaatagaaatgtagaaaatatacaggacagggtggagatgagctcttgaatttagtagggtgaaagagttaactgccaacccggcactatcattgtacttgtttggagaaaatctgttttgttctggtgatgatggttttatcttcccttttagttgggtgggaagtaacagaaaatttgtttccccaaaagtttgacattttcttgttaatacacgtttcatttcagtacgatgccaactgttaagcctgcaggaatcctcctgggtatttctgaattgtgctgtgtgcatgtgtgtttgaaagctcaaacagcttgtcttcttacagcatcgagttgtttgctttattgttagacacaatattagcagtgtatcctttccgtattccctaccatcgaacccattaagatctaaaatccttgtcaagtatctggctttaaaagttgggagatggtagtttaaaaaaaaaaaaagctcttgcaaaaaccatccagtccctaagcatgggctatgttgcagcctcttccagaacagtttccactgcagtgatctttcagttctgcccacattaggttagcaggctgtggagagaagtgcctgtgtctacccttttcccaagacagtcctcatttccaaattctagttttgtcacaaaggctcatgctgttccgtgtcctcttcaaatctggaccgacagcaaagtcctctgactagagccatcgtgcttctcagctccgcttgtgtgtgccgtgtggactccgagtggcgtcgcgcggagggcgagtgggcaggagggctcaggccaactctaaggcacttttctctacatccaatggcaggttgtccccccggcacgctccacagctggtgacccgacagttcctggctccttgttcagacagcttgtcagtgaagaagacaacacgtctgcaccttcattattcaaacttggctggctctctagtatgactaagtaacatggcaacacatctgtctctccctaaataaatactaccacattatttcttctaaaggtgcctctgctcatctgattctcagccacaccaatctttccagtttcactgatggaatgtggccccctagttactgttgggggttactttaagcatcaagttaatccttgtcccaaaatttcacaatacttgttgctttagacatcagttcaggtagcttacattttatcagcgttcaacaacaccttaattgttgacactacaaggtggaattgtcaatgagatcatgtaagctgctgactgaccaagtttgtaggacaaaaagtcattacatattactttacttgcagaactgtgccatgtttcctactaaagtctgaggtgcagactctggtggaatagtgacacagaagttatctgggtatacaagaatctaaaagacattctccctggaaatacaaatatataacaaagagtagagactattattagggagtgtgcttcactgacagtctgaattggatctgattgttctcctgttacacaggagagagtactttcaatagaacatctacatactgagaggtagtatggcagttaatttcagtgcaagactgaatcaagcttcctatattttggaaaaaaacttatgttttttcatggaaactagatactctttactagtttattgaataaaaaaaattgaagatcccgcatttttaaaaggccctttacataaagtagagtttctagttgacagatttggaaatcagtctgaatgggacatactatggattcaacacacagaatgagttttcctcaaaccactaccttgacatagatttgataccctccctcaaaagaatcctataaaaaattgcttcaaagcccctttgaaattgcaatagtgcagcaaaaccacaagtaaacaactgcctgttaacctgttatttcaaatatagactgaaaagccaacaggca

SEQ ID NO: 358004 - DNA, 4804 bp, Homo sapiens
agcgggcgggcgccaggcgcgcggagagcggcggctgcgcctgcgccaacgccgtcagtccgcggggcccgatcccgacacctaactccacagagaagctctgctcctaagggaaagggaagacttcagccacagtttcgcagccaacctggcgacctcacctctctggcgacctcacttcccagccggctccgtttaagaaaaccccgcgcaggaccgcgcccgccccgcctcctcgcgcccgccccctcgggtaacaaacatggcccccggcggggcggaagcgcttccgcccccaacgaagatggcggagggggggcgggactaaaagggggtaggtggatcgccgggggctgacgagtgcaccatggccaccgcggcaacctcacccgcgctgaagcggctggatctgcgcgaccctgcggctcttttcgagacgcatggagcggaggagatccgcgggctggagcgccaggttcgggccgagatcgagcacaagaaggaggagctgcggcagatggtgggcgaacggtaccgcgacctgatcgaggcggccgacaccatcggccagatgcgccgctgcgccgtggggctagtggacgccgtgaaggccaccgaccagtactgcgcccgcctccgccaggccggctcggccgcgccccggccaccgcgggcccagcagccacagcagccatcccaagagaagttctacagcatggctgcccagatcaagctactcttagaaattccggagaagatctggagctcgatggaagcctctcagtgtctccacgccacacagctctacctgctctgctgccacctccacagcctgctccagctggattcttctagttcccgatacagtcccgtcctctcccggtttcctatactcatccggcaggtggcggccgccagccacttccggtcaactattctgcatgaaagcaagatgttgctcaaatgccaaggtgtgtctgaccaagctgtggccgaggccctgtgctctataatgctcttagaagagagttctcctcgccaagccctcacagacttcctgctggccagaaaggcaactattcagaaacttctcaaccagccacaccatggtgctggtatcaaggctcagatttgctcattagtggagttgctggccaccactctgaagcaagctcatgcccttttctacactttgccagaaggactgctgccagatccagccctgccatgtggcttgctcttctctactctggagaccatcacaggccagcatcctgccggaaagggcactggtgtcctgcaggaagagatgaaactctgcagctggtttaaacacctgccagcatccatcgtcgagttccagccaacactccgaacccttgcacatcccatcagtcaggaatacctgaaagacacgctgcagaaatggatccacatgtgtaatgaagacattaaaaatgggatcaccaacctgctcatgtacgtgaagagcatgaagggtctcgcgggaatccgggacgccatgtgggagttacttaccagtgagtccaccaatcacagctgggatgtgctatgtcggcggcttctggagaagccgctcttgttctgggaagatatgatgcagcaactgttccttgaccgattacagactctgacaaaagaaggctttgactccatctccagtagctccaaggagctcttggtttcagctttgcaggaacttgaaagcagcaccagcaactccccttcaaataagcacatccactttgagtacaacatgtcgctcttcctctggtctgagagtcctaatgacctgccttccgatgcggcctgggtcagcgtggcaaaccggggtcagtttgccagtagcggcctctccatgaaagcacaagccatcagcccttgtgtacagaacttctgttctgccctggattctaagctgaaggttaaactagatgacctcctggcttacctcccctctgatgactcatcactgcccaaggacgtttctcccacacaggccaagagttctgcctttgacagatacgcagatgcggggaccgtgcaggagatgctgcggactcagtccgtggcatgcatcaagcacatcgtggactgcatccgggcagagctacagagcattgaagaaggtgtgcaagggcaacaggatgccctcaacagtgccaagctgcactcagttcttttcatggccagactctgccagtccctgggagagctgtgcccccatctgaagcagtgcatcctgggaaaatcagagagctcagagaaaccagcaagggagtttagggctctgagaaaacagggaaaggtgaaaactcaggaaatcattcctacacaggccaagtggcaagaggttaaagaagtactcctccagcagagcgtgatgggctaccaggtctggagcagtgcagttgtgaaagttttgattcatggattcacccagtcattacttctagatgatgctggctcagttctggccacagccaccagctgggatgagctagaaattcaggaggaggcagagtctggcagcagtgtcacatccaagatccgactccctgcacagccgtcctggtatgtacagtccttcctgtttagtttatgccaggaaattaatcgggttggaggccatgccttgccaaaggtgacattacaggagatgctgaaaagctgtatggttcaagtagtagctgcctatgagaaactctccgaagaaaaacagattaagaaagaaggtgcatttccagtcacccagaaccgggcgctgcagctgctttatgatctgcgttacctcaacattgttctgacagccaagggtgacgaggtgaagagtggccggagcaagccagactccagaattgagaaagtgactgaccacctggaagccctcattgatccatttgacctggacgttttcacgccacacctcaacagcaaccttcatcgcctggtgcagcgaacttctgttctgtttggattggtgactggtacagagaatcagctcgccccccggagcagtacgttcaactcccaagaaccccataacatcctgccactggcatccagtcagatcaggtttggacttctcccactgagcatgacaagcactcgaaaggctaaatcaaccagaaacatcgaaacaaaagctcaggttggtgccaagagcaagaggctcatccgtggatgggtccccacctcccaccgagccacccatgatcagctcccttttaaataactgattaagaactgaatgacaaaatgcactaatgctgcttttaatggcggcgcaatagagaagtacaaggttttactagcttgagctactagaaggtgtaaaagatgcccgctgacactaccaagtagcctcttaatagaaatgtagaaaatatacaggacagggtggagatgagctcttgaatttagtagggtgaaagagttaactgccaacccggcactatcattgtacttgtttggagaaaatctgttttgttctggtgatgatggttttatcttcccttttagttgggtgggaagtaacagaaaatttgtttccccaaaagtttgacattttcttgttaatacacgtttcatttcagtacgatgccaactgttaagcctgcaggaatcctcctgggtatttctgaattgtgctgtgtgcatgtgtgtttgaaagctcaaacagcttgtcttcttacagcatcgagttgtttgctttattgttagacacaatattagcagtgtatcctttccgtattccctaccatcgaacccattaagatctaaaatccttgtcaagtatctggctttaaaagttgggagatggtagtttaaaaaaaaaaaaagctcttgcaaaaaccatccagtccctaagcatgggctatgttgcagcctcttccagaacagtttccactgcagtgatctttcagttctgcccacattaggttagcaggctgtggagagaagtgcctgtgtctacccttttcccaagacagtcctcatttccaaattctagttttgtcacaaaggctcatgctgttccgtgtcctcttcaaatctggaccgacagcaaagtcctctgactagagccatcgtgcttctcagctccgcttgtgtgtgccgtgtggactccgagtggcgtcgcgcggagggcgagtgggcaggagggctcaggccaactctaaggcacttttctctacatccaatggcaggttgtccccccggcacgctccacagctggtgacccgacagttcctggctccttgttcagacagcttgtcagtgaagaagacaacacgtctgcaccttcattattcaaacttggctggctctctagtatgactaagtaacatggcaacacatctgtctctccctaaataaatactaccacattatttcttctaaaggtgcctctgctcatctgattctcagccacaccaatctttccagtttcactgatggaatgtggccccctagttactgttgggggttactttaagcatcaagttaatccttgtcccaaaatttcacaatacttgttgctttagacatcagttcaggtagcttacattttatcagcgttcaacaacaccttaattgttgacactacaaggtggaattgtcttttagattcttgtatacccagataacttctgtgtcactattccaccagagtctgcacctcagactttagtaggaaacatggcacagtttctgcaagtaaagtaatatgtaatgactttttgtcctacaaacttggtcagtcagcagcttacatgatctcatg

SEQ ID NO: 358005 - DNA, 6918 bp, Homo sapiens
agcgggcgggcgccaggcgcgcggagagcggcggctgcgcctgcgccaacgccgtcagtccgcggggcccgatcccgacacctaactccacagagaagctctgctcctaagggaaagggaagacttcagccacagtttcgcagccaacctggcgacctcacctctctggcgacctcacttcccagccggctccgtttaagaaaaccccgcgcaggaccgcgcccgccccgcctcctcgcgcccgccccctcgggtaacaaacatggcccccggcggggcggaagcgcttccgcccccaacgaagatggcggagggggggcgggactaaaagggggtaggtggatcgccgggggctgacgagtgcaccatggccaccgcggcaacctcacccgcgctgaagcggctggatctgcgcgaccctgcggctcttttcgagacgcatggagcggaggagatccgcgggctggagcgccaggttcgggccgagatcgagcacaagaaggaggagctgcggcagatggtgggcgaacggtaccgcgacctgatcgaggcggccgacaccatcggccagatgcgccgctgcgccgtggggctagtggacgccgtgaaggccaccgaccagtactgcgcccgcctccgccaggccggctcggccgcgccccggccaccgcgggcccagcagccacagcagccatcccaagagaagttctacagcatggctgcccagatcaagctactcttagaaattccggagaagatctggagctcgatggaagcctctcagtgtctccacgccacacagctctacctgctctgctgccacctccacagcctgctccagctggattcttctagttcccgatacagtcccgtcctctcccggtttcctatactcatccggcaggtggcggccgccagccacttccggtcaactattctgcatgaaagcaagatgttgctcaaatgccaaggtgtgtctgaccaagctgtggccgaggccctgtgctctataatgctcttagaagagagttctcctcgccaagccctcacagacttcctgctggccagaaaggcaactattcagaaacttctcaaccagccacaccatggtgctggtatcaaggctcagatttgctcattagtggagttgctggccaccactctgaagcaagctcatgcccttttctacactttgccagaaggactgctgccagatccagccctgccatgtggcttgctcttctctactctggagaccatcacaggccagcatcctgccggaaagggcactggtgtcctgcaggaagagatgaaactctgcagctggtttaaacacctgccagcatccatcgtcgagttccagccaacactccgaacccttgcacatcccatcagtcaggaatacctgaaagacacgctgcagaaatggatccacatgtgtaatgaagacattaaaaatgggatcaccaacctgctcatgtacgtgaagagcatgaagggtctcgcgggaatccgggacgccatgtgggagttacttaccagtgagtccaccaatcacagctgggatgtgctatgtcggcggcttctggagaagccgctcttgttctgggaagatatgatgcagcaactgttccttgaccgattacagactctgacaaaagaaggctttgactccatctccagtagctccaaggagctcttggtttcagctttgcaggaacttgaaagcagcaccagcaactccccttcaaataagcacatccactttgagtacaacatgtcgctcttcctctggtctgagagtcctaatgacctgccttccgatgcggcctgggtcagcgtggcaaaccggggtcagtttgccagtagcggcctctccatgaaagcacaagccatcagcccttgtgtacagaacttctgttctgccctggattctaagctgaaggttaaactagatgacctcctggcttacctcccctctgatgactcatcactgcccaaggacgtttctcccacacaggccaagagttctgcctttgacagatacgcagatgcggggaccgtgcaggagatgctgcggactcagtccgtggcatgcatcaagcacatcgtggactgcatccgggcagagctacagagcattgaagaaggtgtgcaagggcaacaggatgccctcaacagtgccaagctgcactcagttcttttcatggccagactctgccagtccctgggagagctgtgcccccatctgaagcagtgcatcctgggaaaatcagagagctcagagaaaccagcaagggagtttagggctctgagaaaacagggaaaggtgaaaactcaggaaatcattcctacacaggccaagtggcaagaggttaaagaagtactcctccagcagagcgtgatgggctaccaggtctggagcagtgcagttgtgaaagttttgattcatggattcacccagtcattacttctagatgatgctggctcagttctggccacagccaccagctgggatgagctagaaattcaggaggaggcagagtctggcagcagtgtcacatccaagatccgactccctgcacagccgtcctggtatgtacagtccttcctgtttagtttatgccaggaaattaatcgggttggaggccatgccttgccaaaggtgacattacaggagatgctgaaaagctgtatggttcaagtagtagctgcctatgagaaactctccgaagaaaaacagattaaggtaggtgtctgaatgtttgcccattaaaaacacaaattaaacaaaagaaaaccttagcattgtcttgggtttgagcagttcacatcaaagactcaaactgttaaggatcacccagcccaggcatcgggtcctgtaaaaatgctctatcttaggagtagcacccagcgctgtgagtttacttacactcattctaaagggtcagcagatcttcgctaagaaggcagctcagcacagatggaaacaccaagacccagaactttgggaggctgaggtgggaggatggcttcagcttgggagttcacggctgcaatgagcagctatcatctcaccactgcactccagcctgggcgacaaagcaagaccctgtctcaagtcctctctcttcatgggtggggaccgggaattcatttgcagaaagaaggtgcatttccagtcacccagaaccgggcgctgcagctgctttatgatctgcgttacctcaacattgttctgacagccaagggtgacgaggtgaagagtggccggagcaagccagactccaggtgtcgtatcctctagggagctatgtcaaggcggtctcttccaaaagcaaatagtccctttgctgggaagccaccagagtcagcctgttatactgcacattcattgtgtttgttttgaacagtaagtgctcatattaccagcaagttaaataatggccgcctgctggataaatgcaatggtcaagtgaaataggtggactcttattcccctctcttctgagtcagcctagcagctgctgagtatcatttgagcccttagtgccctccttatagacagaacagggggaaagggtggacttcacttagacatcatgcttgagggtgacttaagcactatcatcagtgacaaacgtactaagccagcaactaagtagaataaaacccaactccaagatttctacagcagtaggatatcataagattgtttttgatcctaaaaaatgtggacagtaatgatcctaatccttttctcagaattgagaaagtgactgaccacctggaagccctcattgatccatttgacctggacgttttcacgccacacctcaacagcaaccttcatcgcctggtgcagcgaacttctgttctgtttggattggtgactggtacagagaatcagctcgccccccggagcagtacgttcaactcccaagaaccccataacatcctgccactggcatccagtcagatcaggtttggacttctcccactgagcatgacaagcactcgaaaggctaaatcaaccagaaacatcgaaacaaaagctcaggttggtgccaagagcaagaggctcatccgtggatgggtccccacctcccaccgagccacccatgatcagctcccttttaaataactgattaagaactgaatgacaaaatgcactaatgctgcttttaatggcggcgcaatagagaagtacaaggttttactagcttgagctactagaaggtgtaaaagatgcccgctgacactaccaagtagcctcttaatagaaatgtagaaaatatacaggacagggtggagatgagctcttgaatttagtagggtgaaagagttaactgccaacccggcactatcattgtacttgtttggagaaaatctgttttgttctggtgatgatggttttatcttcccttttagttgggtgggaagtaacagaaaatttgtttccccaaaagtttgacattttcttgttaatacacgtttcatttcagtacgatgccaactgttaagcctgcaggaatcctcctgggtatttctgaattgtgctgtgtgcatgtgtgtttgaaagctcaaacagcttgtcttcttacagcatcgagttgtttgctttattgttagacacaatattagcagtgtatcctttccgtattccctaccatcgaacccattaagatctaaaatccttgtcaagtatctggctttaaaagttgggagatggtagtttaaaaaaaaaaaaagctcttgcaaaaaccatccagtccctaagcatgggctatgttgcagcctcttccagaacagtttccactgcagtgatctttcagttctgcccacattaggttagcaggctgtggagagaagtgcctgtgtctacccttttcccaagacagtcctcatttccaaattctagttttgtcacaaaggctcatgctgttccgtgtcctcttcaaatctggaccgacagcaaagtcctctgactagagccatcgtgcttctcagctccgcttgtgtgtgccgtgtggactccgagtggcgtcgcgcggagggcgagtgggcaggagggctcaggccaactctaaggcacttttctctacatccaatggcaggttgtccccccggcacgctccacagctggtgacccgacagttcctggctccttgttcagacagcttgtcagtgaagaagacaacacgtctgcaccttcattattcaaacttggctggctctctagtatgactaagtaacatggcaacacatctgtctctccctaaataaatactaccacattatttcttctaaaggtgcctctgctcatctgattctcagccacaccaatctttccagtttcactgatggaatgtggccccctagttactgttgggggttactttaagcatcaagttaatccttgtcccaaaatttcacaatacttgttgctttagacatcagttcaggtagcttacattttatcagcgttcaacaacaccttaattgttgacactacaaggtggaattgtcaatgagatcatgtaagctgctgactgaccaagtttgtaggacaaaaagtcattacatattactttacttgcagaactgtgccatgtttcctactaaagtctgaggtgcagactctggtggaatagtgacacagaagttatctgggtatacaagaatctaaaagacattctccctggaaatacaaatatataacaaagagtagagactattattagggagtgtgcttcactgacagtctgaattggatctgattgttctcctgttacacaggagagagtactttcaatagaacatctacatactgagaggtagtatggcagttaatttcagtgcaagactgaatcaagcttcctatattttggaaaaaaacttatgttttttcatggaaactagatactctttactagtttattgaataaaaaaaattgaagatcccgcatttttaaaaggccctttacataaagtagagtttctagttgacagatttggaaatcagtctgaatgggacatactatggattcaacacacagaatgagttttcctcaaaccactaccttgacatagatttgataccctccctcaaaagaatcctataaaaaattgcttcaaagcccctttgaaattgcaatagtgcagcaaaaccacaagtaaacaactgcctgttaacctgttatttcaaatatagactgaaaagccaacaggcatttttcgtgtgcaatttttcttttaaaacaagttgtaagttgaaatatcaaatctgcacagcgctgtcccttcacagaaggcaagaaactgccggcacatcatgtcagaggccgccctcggtgctgtaggctgtggaagtgggcctccctcagggtctggttgatgtggaagtagaggccttggcacagcgcggactgctcgggcacgggctgaggcgtgttagggctggatccggccatggtctggctcaagctgccttccggcccgctggccctgtccgggctgttgatgctgctgctgctgctgctgctgctcccaccactgtcactgcctgaagactctgtgtcccaggaatcctgaaagacagggtttctgctacttcttttggtctgggggggaagatggttgtcttcttcgttgccattccttctccttttcctgggacggaggcgctcgctcatggcagctggcggatggaagctacgcggcgccgctccgcgaagagagggaacagagggggttgtgtttcggcggccgccacgcccaccccctcgggccttggctctcgcagccgctcgggtggacgcagccggtggcgagtacccctcagtcggacccgtaccaccactacttccggcgtctgctccgcgcccccccatgtcgctgccgccgtggtaccgccct

SEQ ID NO: 358006 - DNA, 4652 bp, Homo sapiens
tggtcccggtgttatttagtgacgagggcgggactattgctgtatgtgactagggcggcgagcctaccccgcgctgaagcggctggatctgcgcgaccctgcggctcttttcgagacgcatggagcggaggagatccgcgggctggagcgccaggttcgggccgagatcgagcacaagaaggaggagctgcggcagatggtgggcgaacggtaccgcgacctgatcgaggcggccgacaccatcggccagatgcgccgctgcgccgtggggctagtggacgccgtgaaggccaccgaccagtactgcgcccgcctccgccaggccggctcggccgcgccccggccaccgcgggcccagcagccacagcagccatcccaagagaagttctacagcatggctgcccagatcaagctactcttagaaattccggagaagatctggagctcgatggaagcctctcagtgtctccacgccacacagctctacctgctctgctgccacctccacagcctgctccagctggattcttctagttcccgatacagtcccgtcctctcccggtttcctatactcatccggcaggtggcggccgccagccacttccggtcaactattctgcatgaaagcaagatgttgctcaaatgccaaggtgtgtctgaccaagctgtggccgaggccctgtgctctataatgctcttagaagagagttctcctcgccaagccctcacagacttcctgctggccagaaaggcaactattcagaaacttctcaaccagccacaccatggtgctggtatcaaggctcagatttgctcattagtggagttgctggccaccactctgaagcaagctcatgcccttttctacactttgccagaaggactgctgccagatccagccctgccatgtggcttgctcttctctactctggagaccatcacaggccagcatcctgccggaaagggcactggtgtcctgcaggaagagatgaaactctgcagctggtttaaacacctgccagcatccatcgtcgagttccagccaacactccgaacccttgcacatcccatcagtcaggaatacctgaaagacacgctgcagaaatggatccacatgtgtaatgaagacattaaaaatgggatcaccaacctgctcatgtacgtgaagagcatgaagggtctcgcgggaatccgggacgccatgtgggagttacttaccagtgagtccaccaatcacagctgggatgtgctatgtcggcggcttctggagaagccgctcttgttctgggaagatatgatgcagcaactgttccttgaccgattacagactctgacaaaagaaggctttgactccatctccagtagctccaaggagctcttggtttcagctttgcaggaacttgaaagcagcaccagcaactccccttcaaataagcacatccactttgagtacaacatgtcgctcttcctctggtctgagagtcctaatgacctgccttccgatgcggcctgggtcagcgtggcaaaccggggtcagtttgccagtagcggcctctccatgaaagcacaagccatcagcccttgtgtacagaacttctgttctgccctggattctaagctgaaggttaaactagatgacctcctggcttacctcccctctgatgactcatcactgcccaaggacgtttctcccacacaggccaagagttctgcctttgacagatacgcagatgcggggaccgtgcaggagatgctgcggactcagtccgtggcatgcatcaagcacatcgtggactgcatccgggcagagctacagagcattgaagaaggtgtgcaagggcaacaggatgccctcaacagtgccaagctgcactcagttcttttcatggccagactctgccagtccctgggagagctgtgcccccatctgaagcagtgcatcctgggaaaatcagagagctcagagaaaccagcaagggagtttagggctctgagaaaacagggaaaggtgaaaactcaggaaatcattcctacacaggccaagtggcaagaggttaaagaagtactcctccagcagagcgtgatgggctaccaggtctggagcagtgcagttgtgaaagttttgattcatggattcacccagtcattacttctagatgatgctggctcagttctggccacagccaccagctgggatgagctagaaattcaggaggaggcagagtctggcagcagtgtcacatccaagatccgactccctgcacagccgtcctggtatgtacagtccttcctgtttagtttatgccaggaaattaatcgggttggaggccatgccttgccaaaggtgacattacaggagatgctgaaaagctgtatggttcaagtagtagctgcctatgagaaactctccgaagaaaaacagattaagaaagaaggtgcatttccagtcacccagaaccgggcgctgcagctgctttatgatctgcgttacctcaacattgttctgacagccaagggtgacgaggtgaagagtggccggagcaagccagactccagaattgagaaagtgactgaccacctggaagccctcattgatccatttgacctggacgttttcacgccacacctcaacagcaaccttcatcgcctggtgcagcgaacttctgttctgtttggattggtgactggtacagagaatcagctcgccccccggagcagtacgttcaactcccaagaaccccataacatcctgccactggcatccagtcagatcaggtttggacttctcccactgagcatgacaagcactcgaaaggctaaatcaaccagaaacatcgaaacaaaagctcaggttgtccccccggcacgctccacagctggtgacccgacagttcctggctccttgttcagacagcttgtcagtgaagaagacaacacgtctgcaccttcattattcaaacttggctggctctctagtatgactaagtaacatggcaacacatctgtctctccctaaataaatactaccacattatttcttctaaaggtgcctctgctcatctgattctcagccacaccaatctttccagtttcactgatggaatgtggccccctagttactgttgggggttactttaagcatcaagttaatccttgtcccaaaatttcacaatacttgttgctttagacatcagttcaggtagcttacattttatcagcgttcaacaacaccttaattgttgacactacaaggtggaattgtcaatgagatcatgtaagctgctgactgaccaagtttgtaggacaaaaagtcattacatattactttacttgcagaactgtgccatgtttcctactaaagtctgaggtgcagactctggtggaatagtgacacagaagttatctgggtatacaagaatctaaaagacattctccctggaaatacaaatatataacaaagagtagagactattattagggagtgtgcttcactgacagtctgaattggatctgattgttctcctgttacacaggagagagtactttcaatagaacatctacatactgagaggtagtatggcagttaatttcagtgcaagactgaatcaagcttcctatattttggaaaaaaacttatgttttttcatggaaactagatactctttactagtttattgaataaaaaaaattgaagatcccgcatttttaaaaggccctttacataaagtagagtttctagttgacagatttggaaatcagtctgaatgggacatactatggattcaacacacagaatgagttttcctcaaaccactaccttgacatagatttgataccctccctcaaaagaatcctataaaaaattgcttcaaagcccctttgaaattgcaatagtgcagcaaaaccacaagtaaacaactgcctgttaacctgttatttcaaatatagactgaaaagccaacaggcatttttcgtgtgcaatttttcttttaaaacaagttgtaagttgaaatatcaaatctgcacagcgctgtcccttcacagaaggcaagaaactgccggcacatcatgtcagaggccgccctcggtgctgtaggctgtggaagtgggcctccctcagggtctggttgatgtggaagtagaggccttggcacagcgcggactgctcgggcacgggctgaggcgtgttagggctggatccggccatggtctggctcaagctgccttccggcccgctggccctgtccgggctgttgatgctgctgctgctgctgctgctgctcccaccactgtcactgcctgaagactctgtgtcccaggaatcctgaaagacagggtttctgctacttcttttggtctgggggggaagatggttgtcttcttcgttgccattccttctccttttcctgggacggaggcgctcgctcatggcagctggcggatggaagctacgcggcgccgctccgcgaagagagggaacagagggggttgtgtttcggcggccgccacgcccaccccctcgggccttggctctcgcagccgctcgggtggacgcagccggtggcgagtacccctcagtcggacccgtaccaccactacttccggcgtctgctccgcgcccccccatgtcgctgccgccgtggtaccgccct

SEQ ID NO: 358007 - DNA, 5585 bp, Homo sapiens
agcgggcgggcgccaggcgcgcggagagcggcggctgcgcctgcgccaacgccgtcagtccgcggggcccgatcccgacacctaactccacagagaagctctgctcctaagggaaagggaagacttcagccacagtttcgcagccaacctggcgacctcacctctctggcgacctcacttcccagccggctccgtttaagaaaaccccgcgcaggaccgcgcccgccccgcctcctcgcgcccgccccctcgggtaacaaacatggcccccggcggggcggaagcgcttccgcccccaacgaagatggcggagggggggcgggactaaaagggggtaggtggatcgccgggggctgacgagtgcaccatggccaccgcggcaacctcacccgcgctgaagcggctggatctgcgcgaccctgcggctcttttcgagacgcatggagcggaggagatccgcgggctggagcgccaggttcgggccgagatcgagcacaagaaggaggagctgcggcagatggtgggcgaacggtaccgcgacctgatcgaggcggccgacaccatcggccagatgcgccgctgcgccgtggggctagtggacgccgtgaaggccaccgaccagtactgcgcccgcctccgccaggccggctcggccgcgccccggccaccgcgggcccagcagccacagcagccatcccaagagaagttctacagcatggctgcccagatcaagctactcttagaaattccggagaagatctggagctcgatggaagcctctcagtgtctccacgccacacagctctacctgctctgctgccacctccacagcctgctccagctggattcttctagttcccgatacagtcccgtcctctcccggtttcctatactcatccggcaggtggcggccgccagccacttccggtcaactattctgcatgaaagcaagatgttgctcaaatgccaaggtgtgtctgaccaagctgtggccgaggccctgtgctctataatgctcttagaagagagttctcctcgccaagccctcacagacttcctgctggccagaaaggcaactattcagaaacttctcaaccagccacaccatggtgctggtatcaaggctcagatttgctcattagtggagttgctggccaccactctgaagcaagctcatgcccttttctacactttgccagaaggactgctgccagatccagccctgccatgtggcttgctcttctctactctggagaccatcacaggccagcatcctgccggaaagggcactggtgtcctgcaggaagagatgaaactctgcagctggtttaaacacctgccagcatccatcgtcgagttccagccaacactccgaacccttgcacatcccatcagtcaggaatacctgaaagacacgctgcagaaatggatccacatgtgtaatgaagacattaaaaatgggatcaccaacctgctcatgtacgtgaagagcatgaagggtctcgcgggaatccgggacgccatgtgggagttacttaccagtgagtccaccaatcacagctgggatgtgctatgtcggcggcttctggagaagccgctcttgttctgggaagatatgatgcagcaactgttccttgaccgattacagactctgacaaaagaaggctttgactccatctccagtagctccaaggagctcttggtttcagctttgcaggaacttgaaagcagcaccagcaactccccttcaaataagcacatccactttgagtacaacatgtcgctcttcctctggtctgagagtcctaatgacctgccttccgatgcggcctgggtcagcgtggcaaaccggggtcagtttgccagtagcggcctctccatgaaagcacaagccatcagcccttgtgtacagaacttctgttctgccctggattctaagctgaaggttaaactagatgacctcctggcttacctcccctctgatgactcatcactgcccaaggacgtttctcccacacaggccaagagttctgcctttgacagatacgcagatgcggggaccgtgcaggagatgctgcggactcagtccgtggcatgcatcaagcacatcgtggactgcatccgggcagagctacagagcattgaagaaggtgtgcaagggcaacaggatgccctcaacagtgccaagctgcactcagttcttttcatggccagactctgccagtccctgggagagctgtgcccccatctgaagcagtgcatcctgggaaaatcagagagctcagagaaaccagcaagggagtttagggctctgagaaaacagggaaaggtgaaaactcaggaaatcattcctacacaggccaagtggcaagaggttaaagaagtactcctccagcagagcgtgatgggctaccaggtctggagcagtgcagttgtgaaagttttgattcatggattcacccagtcattacttctagatgatgctggctcagttctggccacagccaccagctgggatgagctagaaattcaggaggaggcagagtctggcagcagtgtcacatccaagatccgactccctgcacagccgtcctggtatgtacagtccttcctgtttagtttatgccaggaaattaatcgggttggaggccatgccttgccaaaggtgacattacaggagatgctgaaaagctgtatggttcaagtagtagctgcctatgagaaactctccgaagaaaaacagattaagaaagaaggtgcatttccagtcacccagaaccgggcgctgcagctgctttatgatctgcgttacctcaacattgttctgacagccaagggtgacgaggtgaagagtggccggagcaagccagactccagaattgagaaagtgactgaccacctggaagccctcattgatccatttgacctggacgttttcacgccacacctcaacagcaaccttcatcgcctggtgcagcgaacttctgttctgtttggattggtgactggtacagagaatcagctcgccccccggagcagtacgttcaactcccaagaaccccataacatcctgccactggcatccagtcagatcaggtttggacttctcccactgagcatgacaagcactcgaaaggctaaatcaaccagaaacatcgaaacaaaagctcagtacgatgccaactgttaagcctgcaggaatcctcctgggtatttctgaattgtgctgtgtgcatgtgtgtttgaaagctcaaacagcttgtcttcttacagcatcgagttgtttgctttattgttagacacaatattagcagtgtatcctttccgtattccctaccatcgaacccattaagatctaaaatccttgtcaagtatctggctttaaaagttgggagatggtagtttaaaaaaaaaaaaagctcttgcaaaaaccatccagtccctaagcatgggctatgttgcagcctcttccagaacagtttccactgcagtgatctttcagttctgcccacattaggttagcaggctgtggagagaagtgcctgtgtctacccttttcccaagacagtcctcatttccaaattctagttttgtcacaaaggctcatgctgttccgtgtcctcttcaaatctggaccgacagcaaagtcctctgactagagccatcgtgcttctcagctccgcttgtgtgtgccgtgtggactccgagtggcgtcgcgcggagggcgagtgggcaggagggctcaggccaactctaaggcacttttctctacatccaatggcaggttgtccccccggcacgctccacagctggtgacccgacagttcctggctccttgttcagacagcttgtcagtgaagaagacaacacgtctgcaccttcattattcaaacttggctggctctctagtatgactaagtaacatggcaacacatctgtctctccctaaataaatactaccacattatttcttctaaaggtgcctctgctcatctgattctcagccacaccaatctttccagtttcactgatggaatgtggccccctagttactgttgggggttactttaagcatcaagttaatccttgtcccaaaatttcacaatacttgttgctttagacatcagttcaggtagcttacattttatcagcgttcaacaacaccttaattgttgacactacaaggtggaattgtcaatgagatcatgtaagctgctgactgaccaagtttgtaggacaaaaagtcattacatattactttacttgcagaactgtgccatgtttcctactaaagtctgaggtgcagactctggtggaatagtgacacagaagttatctgggtatacaagaatctaaaagacattctccctggaaatacaaatatataacaaagagtagagactattattagggagtgtgcttcactgacagtctgaattggatctgattgttctcctgttacacaggagagagtactttcaatagaacatctacatactgagaggtagtatggcagttaatttcagtgcaagactgaatcaagcttcctatattttggaaaaaaacttatgttttttcatggaaactagatactctttactagtttattgaataaaaaaaattgaagatcccgcatttttaaaaggccctttacataaagtagagtttctagttgacagatttggaaatcagtctgaatgggacatactatggattcaacacacagaatgagttttcctcaaaccactaccttgacatagatttgataccctccctcaaaagaatcctataaaaaattgcttcaaagcccctttgaaattgcaatagtgcagcaaaaccacaagtaaacaactgcctgttaacctgttatttcaaatatagactgaaaagccaacaggcatttttcgtgtgcaatttttcttttaaaacaagttgtaagttgaaatatcaaatctgcacagcgctgtcccttcacagaaggcaagaaactgccggcacatcatgtcagaggccgccctcggtgctgtaggctgtggaagtgggcctccctcagggtctggttgatgtggaagtagaggccttggcacagcgcggactgctcgggcacgggctgaggcgtgttagggctggatccggccatggtctggctcaagctgccttccggcccgctggccctgtccgggctgttgatgctgctgctgctgctgctgctgctcccaccactgtcactgcctgaagactctgtgtcccaggaatcctgaaagacagggtttctgctacttcttttggtctgggggggaagatggttgtcttcttcgttgccattccttctccttttcctgggacggaggcgctcgctcatggcagctggcggatggaagctacgcggcgccgctccgcgaagagagggaacagagggggttgtgtttcggcggccgccacgcccaccccctcgggccttggctctcgcagccgctcgggtggacgcagccggtggcgagtacccctcagtcggacccgtaccaccactacttccggcgtctgctccgcgcccccccatgtcgctgccgccgtggtaccgccct

SEQ ID NO: 358008 - DNA, 5011 bp, Homo sapiens
agcgggcgggcgccaggcgcgcggagagcggcggctgcgcctgcgccaacgccgtcagtccgcggggcccgatcccgacacctaactccacagagaagctctgctcctaagggaaagggaagacttcagccacagtttcgcagccaacctggcgacctcacctctctggcgacctcacttcccagccggctccgtttaagaaaaccccgcgcaggaccgcgcccgccccgcctcctcgcgcccgccccctcgggtaacaaacatggcccccggcggggcggaagcgcttccgcccccaacgaagatggcggagggggggcgggactaaaagggggtaggtggatcgccgggggctgacgagtgcaccatggccaccgcggcaacctcacccgcgctgaagcggctggatctgcgcgaccctgcggctcttttcgagacgcatggagcggaggagatccgcgggctggagcgccaggttcgggccgagatcgagcacaagaaggaggagctgcggcagatggtgggcgaacggtaccgcgacctgatcgaggcggccgacaccatcggccagatgcgccgctgcgccgtggggctagtggacgccgtgaaggccaccgaccagtactgcgcccgcctccgccaggccggctcggccgcgccccggccaccgcgggcccagcagccacagcagccatcccaagagaagttctacagcatggctgcccagatcaagctactcttagaaattccggagaagatctggagctcgatggaagcctctcagtgtctccacgccacacagctctacctgctctgctgccacctccacagcctgctccagctggattcttctagttcccgatacagtcccgtcctctcccggtttcctatactcatccggcaggtggcggccgccagccacttccggtcaactattctgcatgaaagcaagatgttgctcaaatgccaaggtgtgtctgaccaagctgtggccgaggccctgtgctctataatgctcttagaagagagttctcctcgccaagccctcacagacttcctgctggccagaaaggcaactattcagaaacttctcaaccagccacaccatggtgctggtatcaaggctcagatttgctcattagtggagttgctggccaccactctgaagcaagctcatgcccttttctacactttgccagaaggactgctgccagatccagccctgccatgtggcttgctcttctctactctggagaccatcacaggccagcatcctgccggaaagggcactggtgtcctgcaggaagagatgaaactctgcagctggtttaaacacctgccagcatccatcgtcgagttccagccaacactccgaacccttgcacatcccatcagtcaggaatacctgaaagacacgctgcagaaatggatccacatgtgtaatgaagacattaaaaatgggatcaccaacctgctcatgtacgtgaagagcatgaagggtctcgcgggaatccgggacgccatgtgggagttacttaccagtgagtccaccaatcacagctgggatgtgctatgtcggcggcttctggagaagccgctcttgttctgggaagatatgatgcagcaactgttccttgaccgattacagactctgacaaaagaaggctttgactccatctccagtagctccaaggagctcttggtttcagctttgcaggaacttgaaagcagcaccagcaactccccttcaaataagcacatccactttgagtacaacatgtcgctcttcctctggtctgagagtcctaatgacctgccttccgatgcggcctgggtcagcgtggcaaaccggggtcagtttgccagtagcggcctctccatgaaagcacaagccatcagcccttgtgtacagaacttctgttctgccctggattctaagctgaaggttaaactagatgacctcctggcttacctcccctctgatgactcatcactgcccaaggacgtttctcccacacaggccaagagttctgcctttgacagatacgcagatgcggggaccgtgcaggagatgctgcggactcagtccgtggcatgcatcaagcacatcgtggactgcatccgggcagagctacagagcattgaagaaggtgtgcaagggcaacaggatgccctcaacagtgccaagctgcactcagttcttttcatggccagactctgccagtccctgggagagctgtgcccccatctgaagcagtgcatcctgggaaaatcagagagctcagagaaaccagcaagggagtttagggctctgagaaaacagggaaaggtgaaaactcaggaaatcattcctacacaggccaagtggcaagaggttaaagaagtactcctccagcagagcgtgatgggctaccaggtctggagcagtgcagttgtgaaagttttgattcatggattcacccagtcattacttctagatgatgctggctcagttctggccacagccaccagctgggatgagctagaaattcaggaggaggcagagtctggcagcagtgtcacatccaagatccgactccctgcacagccgtcctggtatgtacagtccttcctgtttagtttatgccaggaaattaatcgggttggaggccatgccttgccaaaggtgacattacaggagatgctgaaaagctgtatggttcaagtagtagctgcctatgagaaactctccgaagaaaaacagattaagaaagaaggtgcatttccagtcacccagaaccgggcgctgcagctgctttatgatctgcgttacctcaacattgttctgacagccaagggtgacgaggtgaagagtggccggagcaagccagactccagaattgagaaagtgactgaccacctggaagccctcattgatccatttgacctggacgttttcacgccacacctcaacagcaaccttcatcgcctggtgcagcgaacttctgttctgtttggattggtgactggtacagagaatcagctcgccccccggagcagtacgttcaactcccaagaaccccataacatcctgccactggcatccagtcagatcaggtttggacttctcccactgagcatgacaagcactcgaaaggctaaatcaaccagaaacatcgaaacaaaagctcagtacgatgccaactgttaagcctgcaggaatcctcctgggttgtccccccggcacgctccacagctggtgacccgacagttcctggctccttgttcagacagcttgtcagtgaagaagacaacacgtctgcaccttcattattcaaacttggctggctctctagtatgactaagtaacatggcaacacatctgtctctccctaaataaatactaccacattatttcttctaaaggtgcctctgctcatctgattctcagccacaccaatctttccagtttcactgatggaatgtggccccctagttactgttgggggttactttaagcatcaagttaatccttgtcccaaaatttcacaatacttgttgctttagacatcagttcaggtagcttacattttatcagcgttcaacaacaccttaattgttgacactacaaggtggaattgtcaatgagatcatgtaagctgctgactgaccaagtttgtaggacaaaaagtcattacatattactttacttgcagaactgtgccatgtttcctactaaagtctgaggtgcagactctggtggaatagtgacacagaagttatctgggtatacaagaatctaaaagacattctccctggaaatacaaatatataacaaagagtagagactattattagggagtgtgcttcactgacagtctgaattggatctgattgttctcctgttacacaggagagagtactttcaatagaacatctacatactgagaggtagtatggcagttaatttcagtgcaagactgaatcaagcttcctatattttggaaaaaaacttatgttttttcatggaaactagatactctttactagtttattgaataaaaaaaattgaagatcccgcatttttaaaaggccctttacataaagtagagtttctagttgacagatttggaaatcagtctgaatgggacatactatggattcaacacacagaatgagttttcctcaaaccactaccttgacatagatttgataccctccctcaaaagaatcctataaaaaattgcttcaaagcccctttgaaattgcaatagtgcagcaaaaccacaagtaaacaactgcctgttaacctgttatttcaaatatagactgaaaagccaacaggcatttttcgtgtgcaatttttcttttaaaacaagttgtaagttgaaatatcaaatctgcacagcgctgtcccttcacagaaggcaagaaactgccggcacatcatgtcagaggccgccctcggtgctgtaggctgtggaagtgggcctccctcagggtctggttgatgtggaagtagaggccttggcacagcgcggactgctcgggcacgggctgaggcgtgttagggctggatccggccatggtctggctcaagctgccttccggcccgctggccctgtccgggctgttgatgctgctgctgctgctgctgctgctcccaccactgtcactgcctgaagactctgtgtcccaggaatcctgaaagacagggtttctgctacttcttttggtctgggggggaagatggttgtcttcttcgttgccattccttctccttttcctgggacggaggcgctcgctcatggcagctggcggatggaagctacgcggcgccgctccgcgaagagagggaacagagggggttgtgtttcggcggccgccacgcccaccccctcgggccttggctctcgcagccgctcgggtggacgcagccggtggcgagtacccctcagtcggacccgtaccaccactacttccggcgtctgctccgcgcccccccatgtcgctgccgccgtggtaccgccct

SEQ ID NO: 358009 - DNA, 4143 bp, Homo sapiens
ccagattgtgtcactgcactccagcctgggcaacaaggcgagactctatctcaaaacaaacaaacaaacaaacaaacaaaaacccaagaaggaacaaatcctgattttggaaagaattcagtaagtcttctctaatgagcctcctcaaaacacttctccttcaggcaaggagcctttttttcccctttagaacaaccatttacagcatctgaggccttttttaagggccaggtctcttccctgctgttaggtttttaattttaaggtcaagtttctaacaaaatttgttttgttgttgtgagattaaactggccatatgagcattaaaaccatctgcttctgaaatagcaagctgaaactcaaccaaaacttgaagctgtttattacgctcacataccaagtcctctctcttcatgggtggggaccgggaattcatttgcagaaagaaggtgcatttccagtcacccagaaccgggcgctgcagctgctttatgatctgcgttacctcaacattgttctgacagccaagggtgacgaggtgaagagtggccggagcaagccagactccaggtgtcgtatcctctagggagctatgtcaaggcggtctcttccacattcattgtgtttgttttgaacagtaagtgctcatattaccagcaagttaaataatggccgcctgctggataaatgcaatggtcaagtgaaataggtggactcttattcccctctcttctgagtcagcctagcagctgctgagtatcatttgagcccttagtgccctccttatagacagaacagggggaaagggtggacttcacttagacatcatgcttgagggtgacttaagcactatcatcagtgacaaacgtactaagccagcaactaagtagaataaaacccaactccaagatttctacagcagtaggatatcataagattgtttttgatcctaaaaaatgtggacagtaatgatcctaatccttttctcagaattgagaaagtgactgaccacctggaagccctcattgatccatttgacctggacgttttcacgccacacctcaacagcaaccttcatcgcctggtgcagcgaacttctgttctgtttggattggtgactggtacagagaatcagctcgccccccggagcagtacgttcaactcccaagaaccccataacatcctgccactggcatccagtcagatcaggtttggacttctcccactgagcatgacaagcactcgaaaggctaaatcaaccagaaacatcgaaacaaaagctcaggttggtgccaagagcaagaggctcatccgtggatgggtccccacctcccaccgagccacccatgatcagctcccttttaaataactgattaagaactgaatgacaaaatgcactaatgctgcttttaatggcggcgcaatagagaagtacaaggttttactagcttgagctactagaaggtgtaaaagatgcccgctgacactaccaagtagcctcttaatagaaatgtagaaaatatacaggacagggtggagatgagctcttgaatttagtagggtgaaagagttaactgccaacccggcactatcattgtacttgtttggagaaaatctgttttgttctggtgatgatggttttatcttcccttttagttgggtgggaagtaacagaaaatttgtttccccaaaagtttgacattttcttgttaatacacgtttcatttcagtacgatgccaactgttaagcctgcaggaatcctcctgggtatttctgaattgtgctgtgtgcatgtgtgtttgaaagctcaaacagcttgtcttcttacagcatcgagttgtttgctttattgttagacacaatattagcagtgtatcctttccgtattccctaccatcgaacccattaagatctaaaatccttgtcaagtatctggctttaaaagttgggagatggtagtttaaaaaaaaaaaaagctcttgcaaaaaccatccagtccctaagcatgggctatgttgcagcctcttccagaacagtttccactgcagtgatctttcagttctgcccacattaggttagcaggctgtggagagaagtgcctgtgtctacccttttcccaagacagtcctcatttccaaattctagttttgtcacaaaggctcatgctgttccgtgtcctcttcaaatctggaccgacagcaaagtcctctgactagagccatcgtgcttctcagctccgcttgtgtgtgccgtgtggactccgagtggcgtcgcgcggagggcgagtgggcaggagggctcaggccaactctaaggcacttttctctacatccaatggcaggttgtccccccggcacgctccacagctggtgacccgacagttcctggctccttgttcagacagcttgtcagtgaagaagacaacacgtctgcaccttcattattcaaacttggctggctctctagtatgactaagtaacatggcaacacatctgtctctccctaaataaatactaccacattatttcttctaaaggtgcctctgctcatctgattctcagccacaccaatctttccagtttcactgatggaatgtggccccctagttactgttgggggttactttaagcatcaagttaatccttgtcccaaaatttcacaatacttgttgctttagacatcagttcaggtagcttacattttatcagcgttcaacaacaccttaattgttgacactacaaggtggaattgtcaatgagatcatgtaagctgctgactgaccaagtttgtaggacaaaaagtcattacatattactttacttgcagaactgtgccatgtttcctactaaagtctgaggtgcagactctggtggaatagtgacacagaagttatctgggtatacaagaatctaaaagacattctccctggaaatacaaatatataacaaagagtagagactattattagggagtgtgcttcactgacagtctgaattggatctgattgttctcctgttacacaggagagagtactttcaatagaacatctacatactgagaggtagtatggcagttaatttcagtgcaagactgaatcaagcttcctatattttggaaaaaaacttatgttttttcatggaaactagatactctttactagtttattgaataaaaaaaattgaagatcccgcatttttaaaaggccctttacataaagtagagtttctagttgacagatttggaaatcagtctgaatgggacatactatggattcaacacacagaatgagttttcctcaaaccactaccttgacatagatttgataccctccctcaaaagaatcctataaaaaattgcttcaaagcccctttgaaattgcaatagtgcagcaaaaccacaagtaaacaactgcctgttaacctgttatttcaaatatagactgaaaagccaacaggcatttttcgtgtgcaatttttcttttaaaacaagttgtaagttgaaatatcaaatctgcacagcgctgtcccttcacagaaggcaagaaactgccggcacatcatgtcagaggccgccctcggtgctgtaggctgtggaagtgggcctccctcagggtctggttgatgtggaagtagaggccttggcacagcgcggactgctcgggcacgggctgaggcgtgttagggctggatccggccatggtctggctcaagctgccttccggcccgctggccctgtccgggctgttgatgctgctgctgctgctgctgctgctcccaccactgtcactgcctgaagactctgtgtcccaggaatcctgaaagacagggtttctgctacttcttttggtctgggggggaagatggttgtcttcttcgttgccattccttctccttttcctgggacggaggcgctcgctcatggcagctggcggatggaagctacgcggcgccgctccgcgaagagagggaacagagggggttgtgtttcggcggccgccacgcccaccccctcgggccttggctctcgcagccgctcgggtggacgcagccggtggcgagtacccctcagtcggacccgtaccaccactacttccggcgtctgctccgcgcccccccatgtcgctgccgccgtggtaccgccct

SEQ ID NO: 358010 - DNA, 4197 bp, Homo sapiens
ccagattgtgtcactgcactccagcctgggcaacaaggcgagactctatctcaaaacaaacaaacaaacaaacaaacaaaaacccaagaaggaacaaatcctgattttggaaagaattcagtaagtcttctctaatgagcctcctcaaaacacttctccttcaggcaaggagcctttttttcccctttagaacaaccatttacagcatctgaggccttttttaagggccaggtctcttccctgctgttaggtttttaattttaaggtcaagtttctaacaaaatttgttttgttgttgtgagattaaactggccatatgagcattaaaaccatctgcttctgaaatagcaagctgaaactcaaccaaaacttgaagctgtttattacgctcacataccaagtcctctctcttcatgggtggggaccgggaattcatttgcagaaagaaggtgcatttccagtcacccagaaccgggcgctgcagctgctttatgatctgcgttacctcaacattgttctgacagccaagggtgacgaggtgaagagtggccggagcaagccagactccaggtgtcgtatcctctagggagctatgtcaaggcggtctcttccaaaagcaaatagtccctttgctgggaagccaccagagtcagcctgttatactgcacattcattgtgtttgttttgaacagtaagtgctcatattaccagcaagttaaataatggccgcctgctggataaatgcaatggtcaagtgaaataggtggactcttattcccctctcttctgagtcagcctagcagctgctgagtatcatttgagcccttagtgccctccttatagacagaacagggggaaagggtggacttcacttagacatcatgcttgagggtgacttaagcactatcatcagtgacaaacgtactaagccagcaactaagtagaataaaacccaactccaagatttctacagcagtaggatatcataagattgtttttgatcctaaaaaatgtggacagtaatgatcctaatccttttctcagaattgagaaagtgactgaccacctggaagccctcattgatccatttgacctggacgttttcacgccacacctcaacagcaaccttcatcgcctggtgcagcgaacttctgttctgtttggattggtgactggtacagagaatcagctcgccccccggagcagtacgttcaactcccaagaaccccataacatcctgccactggcatccagtcagatcaggtttggacttctcccactgagcatgacaagcactcgaaaggctaaatcaaccagaaacatcgaaacaaaagctcaggttggtgccaagagcaagaggctcatccgtggatgggtccccacctcccaccgagccacccatgatcagctcccttttaaataactgattaagaactgaatgacaaaatgcactaatgctgcttttaatggcggcgcaatagagaagtacaaggttttactagcttgagctactagaaggtgtaaaagatgcccgctgacactaccaagtagcctcttaatagaaatgtagaaaatatacaggacagggtggagatgagctcttgaatttagtagggtgaaagagttaactgccaacccggcactatcattgtacttgtttggagaaaatctgttttgttctggtgatgatggttttatcttcccttttagttgggtgggaagtaacagaaaatttgtttccccaaaagtttgacattttcttgttaatacacgtttcatttcagtacgatgccaactgttaagcctgcaggaatcctcctgggtatttctgaattgtgctgtgtgcatgtgtgtttgaaagctcaaacagcttgtcttcttacagcatcgagttgtttgctttattgttagacacaatattagcagtgtatcctttccgtattccctaccatcgaacccattaagatctaaaatccttgtcaagtatctggctttaaaagttgggagatggtagtttaaaaaaaaaaaaagctcttgcaaaaaccatccagtccctaagcatgggctatgttgcagcctcttccagaacagtttccactgcagtgatctttcagttctgcccacattaggttagcaggctgtggagagaagtgcctgtgtctacccttttcccaagacagtcctcatttccaaattctagttttgtcacaaaggctcatgctgttccgtgtcctcttcaaatctggaccgacagcaaagtcctctgactagagccatcgtgcttctcagctccgcttgtgtgtgccgtgtggactccgagtggcgtcgcgcggagggcgagtgggcaggagggctcaggccaactctaaggcacttttctctacatccaatggcaggttgtccccccggcacgctccacagctggtgacccgacagttcctggctccttgttcagacagcttgtcagtgaagaagacaacacgtctgcaccttcattattcaaacttggctggctctctagtatgactaagtaacatggcaacacatctgtctctccctaaataaatactaccacattatttcttctaaaggtgcctctgctcatctgattctcagccacaccaatctttccagtttcactgatggaatgtggccccctagttactgttgggggttactttaagcatcaagttaatccttgtcccaaaatttcacaatacttgttgctttagacatcagttcaggtagcttacattttatcagcgttcaacaacaccttaattgttgacactacaaggtggaattgtcaatgagatcatgtaagctgctgactgaccaagtttgtaggacaaaaagtcattacatattactttacttgcagaactgtgccatgtttcctactaaagtctgaggtgcagactctggtggaatagtgacacagaagttatctgggtatacaagaatctaaaagacattctccctggaaatacaaatatataacaaagagtagagactattattagggagtgtgcttcactgacagtctgaattggatctgattgttctcctgttacacaggagagagtactttcaatagaacatctacatactgagaggtagtatggcagttaatttcagtgcaagactgaatcaagcttcctatattttggaaaaaaacttatgttttttcatggaaactagatactctttactagtttattgaataaaaaaaattgaagatcccgcatttttaaaaggccctttacataaagtagagtttctagttgacagatttggaaatcagtctgaatgggacatactatggattcaacacacagaatgagttttcctcaaaccactaccttgacatagatttgataccctccctcaaaagaatcctataaaaaattgcttcaaagcccctttgaaattgcaatagtgcagcaaaaccacaagtaaacaactgcctgttaacctgttatttcaaatatagactgaaaagccaacaggcatttttcgtgtgcaatttttcttttaaaacaagttgtaagttgaaatatcaaatctgcacagcgctgtcccttcacagaaggcaagaaactgccggcacatcatgtcagaggccgccctcggtgctgtaggctgtggaagtgggcctccctcagggtctggttgatgtggaagtagaggccttggcacagcgcggactgctcgggcacgggctgaggcgtgttagggctggatccggccatggtctggctcaagctgccttccggcccgctggccctgtccgggctgttgatgctgctgctgctgctgctgctgctcccaccactgtcactgcctgaagactctgtgtcccaggaatcctgaaagacagggtttctgctacttcttttggtctgggggggaagatggttgtcttcttcgttgccattccttctccttttcctgggacggaggcgctcgctcatggcagctggcggatggaagctacgcggcgccgctccgcgaagagagggaacagagggggttgtgtttcggcggccgccacgcccaccccctcgggccttggctctcgcagccgctcgggtggacgcagccggtggcgagtacccctcagtcggacccgtaccaccactacttccggcgtctgctccgcgcccccccatgtcgctgccgccgtggtaccgccct

SEQ ID NO: 358011 - DNA, 3723 bp, Homo sapiens
ccagattgtgtcactgcactccagcctgggcaacaaggcgagactctatctcaaaacaaacaaacaaacaaacaaacaaaaacccaagaaggaacaaatcctgattttggaaagaattcagtaagtcttctctaatgagcctcctcaaaacacttctccttcaggcaaggagcctttttttcccctttagaacaaccatttacagcatctgaggccttttttaagggccaggtctcttccctgctgttaggtttttaattttaaggtcaagtttctaacaaaatttgttttgttgttgtgagattaaactggccatatgagcattaaaaccatctgcttctgaaatagcaagctgaaactcaaccaaaacttgaagctgtttattacgctcacataccaagtcctctctcttcatgggtggggaccgggaattcatttgcagaaagaaggtgcatttccagtcacccagaaccgggcgctgcagctgctttatgatctgcgttacctcaacattgttctgacagccaagggtgacgaggtgaagagtggccggagcaagccagactccagaattgagaaagtgactgaccacctggaagccctcattgatccatttgacctggacgttttcacgccacacctcaacagcaaccttcatcgcctggtgcagcgaacttctgttctgtttggattggtgactggtacagagaatcagctcgccccccggagcagtacgttcaactcccaagaaccccataacatcctgccactggcatccagtcagatcaggtttggacttctcccactgagcatgacaagcactcgaaaggctaaatcaaccagaaacatcgaaacaaaagctcaggttggtgccaagagcaagaggctcatccgtggatgggtccccacctcccaccgagccacccatgatcagctcccttttaaataactgattaagaactgaatgacaaaatgcactaatgctgcttttaatggcggcgcaatagagaagtacaaggttttactagcttgagctactagaaggtgtaaaagatgcccgctgacactaccaagtagcctcttaatagaaatgtagaaaatatacaggacagggtggagatgagctcttgaatttagtagggtgaaagagttaactgccaacccggcactatcattgtacttgtttggagaaaatctgttttgttctggtgatgatggttttatcttcccttttagttgggtgggaagtaacagaaaatttgtttccccaaaagtttgacattttcttgttaatacacgtttcatttcagtacgatgccaactgttaagcctgcaggaatcctcctgggtatttctgaattgtgctgtgtgcatgtgtgtttgaaagctcaaacagcttgtcttcttacagcatcgagttgtttgctttattgttagacacaatattagcagtgtatcctttccgtattccctaccatcgaacccattaagatctaaaatccttgtcaagtatctggctttaaaagttgggagatggtagtttaaaaaaaaaaaaagctcttgcaaaaaccatccagtccctaagcatgggctatgttgcagcctcttccagaacagtttccactgcagtgatctttcagttctgcccacattaggttagcaggctgtggagagaagtgcctgtgtctacccttttcccaagacagtcctcatttccaaattctagttttgtcacaaaggctcatgctgttccgtgtcctcttcaaatctggaccgacagcaaagtcctctgactagagccatcgtgcttctcagctccgcttgtgtgtgccgtgtggactccgagtggcgtcgcgcggagggcgagtgggcaggagggctcaggccaactctaaggcacttttctctacatccaatggcaggttgtccccccggcacgctccacagctggtgacccgacagttcctggctccttgttcagacagcttgtcagtgaagaagacaacacgtctgcaccttcattattcaaacttggctggctctctagtatgactaagtaacatggcaacacatctgtctctccctaaataaatactaccacattatttcttctaaaggtgcctctgctcatctgattctcagccacaccaatctttccagtttcactgatggaatgtggccccctagttactgttgggggttactttaagcatcaagttaatccttgtcccaaaatttcacaatacttgttgctttagacatcagttcaggtagcttacattttatcagcgttcaacaacaccttaattgttgacactacaaggtggaattgtcaatgagatcatgtaagctgctgactgaccaagtttgtaggacaaaaagtcattacatattactttacttgcagaactgtgccatgtttcctactaaagtctgaggtgcagactctggtggaatagtgacacagaagttatctgggtatacaagaatctaaaagacattctccctggaaatacaaatatataacaaagagtagagactattattagggagtgtgcttcactgacagtctgaattggatctgattgttctcctgttacacaggagagagtactttcaatagaacatctacatactgagaggtagtatggcagttaatttcagtgcaagactgaatcaagcttcctatattttggaaaaaaacttatgttttttcatggaaactagatactctttactagtttattgaataaaaaaaattgaagatcccgcatttttaaaaggccctttacataaagtagagtttctagttgacagatttggaaatcagtctgaatgggacatactatggattcaacacacagaatgagttttcctcaaaccactaccttgacatagatttgataccctccctcaaaagaatcctataaaaaattgcttcaaagcccctttgaaattgcaatagtgcagcaaaaccacaagtaaacaactgcctgttaacctgttatttcaaatatagactgaaaagccaacaggcatttttcgtgtgcaatttttcttttaaaacaagttgtaagttgaaatatcaaatctgcacagcgctgtcccttcacagaaggcaagaaactgccggcacatcatgtcagaggccgccctcggtgctgtaggctgtggaagtgggcctccctcagggtctggttgatgtggaagtagaggccttggcacagcgcggactgctcgggcacgggctgaggcgtgttagggctggatccggccatggtctggctcaagctgccttccggcccgctggccctgtccgggctgttgatgctgctgctgctgctgctgctgctcccaccactgtcactgcctgaagactctgtgtcccaggaatcctgaaagacagggtttctgctacttcttttggtctgggggggaagatggttgtcttcttcgttgccattccttctccttttcctgggacggaggcgctcgctcatggcagctggcggatggaagctacgcggcgccgctccgcgaagagagggaacagagggggttgtgtttcggcggccgccacgcccaccccctcgggccttggctctcgcagccgctcgggtggacgcagccggtggcgagtacccctcagtcggacccgtaccaccactacttccggcgtctgctccgcgcccccccatgtcgctgccgccgtggtaccgccct

SEQ ID NO: 358012 - DNA, 4143 bp, Homo sapiens
ccagattgtgtcactgcactccagcctgggcaacaaggcgagactctatctcaaaacaaacaaacaaacaaacaaacaaaaacccaagaaggaacaaatcctgattttggaaagaattcagtaagtcttctctaatgagcctcctcaaaacacttctccttcaggcaaggagcctttttttcccctttagaacaaccatttacagcatctgaggccttttttaagggccaggtctcttccctgctgttaggtttttaattttaaggtcaagtttctaacaaaatttgttttgttgttgtgagattaaactggccatatgagcattaaaaccatctgcttctgaaatagcaagctgaaactcaaccggggaccgggaattcatttgcagaaagaaggtgcatttccagtcacccagaaccgggcgctgcagctgctttatgatctgcgttacctcaacattgttctgacagccaagggtgacgaggtgaagagtggccggagcaagccagactccaggtgtcgtatcctctagggagctatgtcaaggcggtctcttccaaaagcaaatagtccctttgctgggaagccaccagagtcagcctgttatactgcacattcattgtgtttgttttgaacagtaagtgctcatattaccagcaagttaaataatggccgcctgctggataaatgcaatggtcaagtgaaataggtggactcttattcccctctcttctgagtcagcctagcagctgctgagtatcatttgagcccttagtgccctccttatagacagaacagggggaaagggtggacttcacttagacatcatgcttgagggtgacttaagcactatcatcagtgacaaacgtactaagccagcaactaagtagaataaaacccaactccaagatttctacagcagtaggatatcataagattgtttttgatcctaaaaaatgtggacagtaatgatcctaatccttttctcagaattgagaaagtgactgaccacctggaagccctcattgatccatttgacctggacgttttcacgccacacctcaacagcaaccttcatcgcctggtgcagcgaacttctgttctgtttggattggtgactggtacagagaatcagctcgccccccggagcagtacgttcaactcccaagaaccccataacatcctgccactggcatccagtcagatcaggtttggacttctcccactgagcatgacaagcactcgaaaggctaaatcaaccagaaacatcgaaacaaaagctcaggttggtgccaagagcaagaggctcatccgtggatgggtccccacctcccaccgagccacccatgatcagctcccttttaaataactgattaagaactgaatgacaaaatgcactaatgctgcttttaatggcggcgcaatagagaagtacaaggttttactagcttgagctactagaaggtgtaaaagatgcccgctgacactaccaagtagcctcttaatagaaatgtagaaaatatacaggacagggtggagatgagctcttgaatttagtagggtgaaagagttaactgccaacccggcactatcattgtacttgtttggagaaaatctgttttgttctggtgatgatggttttatcttcccttttagttgggtgggaagtaacagaaaatttgtttccccaaaagtttgacattttcttgttaatacacgtttcatttcagtacgatgccaactgttaagcctgcaggaatcctcctgggtatttctgaattgtgctgtgtgcatgtgtgtttgaaagctcaaacagcttgtcttcttacagcatcgagttgtttgctttattgttagacacaatattagcagtgtatcctttccgtattccctaccatcgaacccattaagatctaaaatccttgtcaagtatctggctttaaaagttgggagatggtagtttaaaaaaaaaaaaagctcttgcaaaaaccatccagtccctaagcatgggctatgttgcagcctcttccagaacagtttccactgcagtgatctttcagttctgcccacattaggttagcaggctgtggagagaagtgcctgtgtctacccttttcccaagacagtcctcatttccaaattctagttttgtcacaaaggctcatgctgttccgtgtcctcttcaaatctggaccgacagcaaagtcctctgactagagccatcgtgcttctcagctccgcttgtgtgtgccgtgtggactccgagtggcgtcgcgcggagggcgagtgggcaggagggctcaggccaactctaaggcacttttctctacatccaatggcaggttgtccccccggcacgctccacagctggtgacccgacagttcctggctccttgttcagacagcttgtcagtgaagaagacaacacgtctgcaccttcattattcaaacttggctggctctctagtatgactaagtaacatggcaacacatctgtctctccctaaataaatactaccacattatttcttctaaaggtgcctctgctcatctgattctcagccacaccaatctttccagtttcactgatggaatgtggccccctagttactgttgggggttactttaagcatcaagttaatccttgtcccaaaatttcacaatacttgttgctttagacatcagttcaggtagcttacattttatcagcgttcaacaacaccttaattgttgacactacaaggtggaattgtcaatgagatcatgtaagctgctgactgaccaagtttgtaggacaaaaagtcattacatattactttacttgcagaactgtgccatgtttcctactaaagtctgaggtgcagactctggtggaatagtgacacagaagttatctgggtatacaagaatctaaaagacattctccctggaaatacaaatatataacaaagagtagagactattattagggagtgtgcttcactgacagtctgaattggatctgattgttctcctgttacacaggagagagtactttcaatagaacatctacatactgagaggtagtatggcagttaatttcagtgcaagactgaatcaagcttcctatattttggaaaaaaacttatgttttttcatggaaactagatactctttactagtttattgaataaaaaaaattgaagatcccgcatttttaaaaggccctttacataaagtagagtttctagttgacagatttggaaatcagtctgaatgggacatactatggattcaacacacagaatgagttttcctcaaaccactaccttgacatagatttgataccctccctcaaaagaatcctataaaaaattgcttcaaagcccctttgaaattgcaatagtgcagcaaaaccacaagtaaacaactgcctgttaacctgttatttcaaatatagactgaaaagccaacaggcatttttcgtgtgcaatttttcttttaaaacaagttgtaagttgaaatatcaaatctgcacagcgctgtcccttcacagaaggcaagaaactgccggcacatcatgtcagaggccgccctcggtgctgtaggctgtggaagtgggcctccctcagggtctggttgatgtggaagtagaggccttggcacagcgcggactgctcgggcacgggctgaggcgtgttagggctggatccggccatggtctggctcaagctgccttccggcccgctggccctgtccgggctgttgatgctgctgctgctgctgctgctgctcccaccactgtcactgcctgaagactctgtgtcccaggaatcctgaaagacagggtttctgctacttcttttggtctgggggggaagatggttgtcttcttcgttgccattccttctccttttcctgggacggaggcgctcgctcatggcagctggcggatggaagctacgcggcgccgctccgcgaagagagggaacagagggggttgtgtttcggcggccgccacgcccaccccctcgggccttggctctcgcagccgctcgggtggacgcagccggtggcgagtacccctcagtcggacccgtaccaccactacttccggcgtctgctccgcgcccccccatgtcgctgccgccgtggtaccgccct

SEQ ID NO: 358013 - DNA, 3478 bp, Homo sapiens
agcgggcgggcgccaggcgcgcggagagcggcggctgcgcctgcgccaacgccgtcagtccgcggggcccgatcccgacacctaactccacagagaagctctgctcctaagggaaagggaagacttcagccacagtttcgcagccaacctggcgacctcacctctctggcgacctcacttcccagccggctccgtttaagaaaaccccgcgcaggaccgcgcccgccccgcctcctcgcgcccgccccctcgggtaacaaacatggcccccggcggggcggaagcgcttccgcccccaacgaagatggcggagggggggcgggactaaaagggggtaggtggatcgccgggggctgacgagtgcaccatggccaccgcggcaacctcacccgcgctgaagcggctggatctgcgcgaccctgcggctcttttcgagacgcatggagcggaggagatccgcgggctggagcgccaggttcgggccgagatcgagcacaagaaggaggagctgcggcagatggtgggcgaacggtaccgcgacctgatcgaggcggccgacaccatcggccagatgcgccgctgcgccgtggggctagtggacgccgtgaaggccaccgaccagtactgcgcccgcctccgccaggccggctcggccgcgccccggccaccgcgggcccagcagccacagcagccatcccaagagaagttctacagcatggctgcccagatcaagctactcttagaaattccggagaagatctggagctcgatggaagcctctcagtgtctccacgccacacagctctacctgctctgctgccacctccacagcctgctccagctggattcttctagttcccgatacagtcccgtcctctcccggtttcctatactcatccggcaggtggcggccgccagccacttccggtcaactattctgcatgaaagcaagatgttgctcaaatgccaaggtgtgtctgaccaagctgtggccgaggccctgtgctctataatgctcttagaagagagttctcctcgccaagccctcacagacttcctgctggccagaaaggcaactattcagaaacttctcaaccagccacaccatggtgctggtatcaaggctcagatttgctcattagtggagttgctggccaccactctgaagcaagctcatgcccttttctacactttgccagaaggactgctgccagatccagccctgccatgtggcttgctcttctctactctggagaccatcacaggccagcatcctgccggaaagggcactggtgtcctgcaggaagagatgaaactctgcagctggtttaaacacctgccagcatccatcgtcgagttccagccaacactccgaacccttgcacatcccatcagtcaggaatacctgaaagacacgctgcagaaatggatccacatgtgtaatgaagacattaaaaatgggatcaccaacctgctcatgtacgtgaagagcatgaagggtctcgcgggaatccgggacgccatgtgggagttacttaccagtgagtccaccaatcacagctgggatgtgctatgtcggcggcttctggagaagccgctcttgttctgggaagatatgatgcagcaactgttccttgaccgattacagactctgacaaaagaaggctttgactccatctccagtagctccaaggagctcttggtttcagctttgcaggaacttgaaagcagcaccagcaactccccttcaaataagcacatccactttgagtacaacatgtcgctcttcctctggtctgagagtcctaatgacctgccttccgatgcggcctgggtcagcgtggcaaaccggggtcagtttgccagtagcggcctctccatgaaagcacaagccatcagcccttgtgtacagaacttctgttctgccctggattctaagctgaaggttaaactagatgacctcctggcttacctcccctctgatgactcatcactgcccaaggacgtttctcccacacaggccaagagttctgcctttgacagatacgcagatgcggggaccgtgcaggagatgctgcggactcagtccgtggcatgcatcaagcacatcgtggactgcatccgggcagagctacagagcattgaagaaggtgtgcaagggcaacaggatgccctcaacagtgccaagctgcactcagttcttttcatggccagactctgccagtccctgggagagctgtgcccccatctgaagcagtgcatcctgggaaaatcagagagctcagagaaaccagcaagggagtttagggctctgagaaaacagggaaaggtgaaaactcaggaaatcattcctacacaggccaagtggcaagaggttaaagaagtactcctccagcagagcgtgatgggctaccaggtctggagcagtgcagttgtgaaagttttgattcatggattcacccagtcattacttctagatgatgctggctcagttctggccacagccaccagctgggatgagctagaaattcaggaggaggcagagtctggcagcagtgtcacatccaagatccgactccctgcacagccgtcctggtatgtacagtccttcctgtttagtttatgccaggaaattaatcgggttggaggccatgccttgccaaaggtgacattacaggagatgctgaaaagctgtatggttcaagtagtagctgcctatgagaaactctccgaagaaaaacagattaaggtaggtgtctgaatgtttgcccattaaaaacacaaattaaacaaaagaaaaccttagcattgtcttgggtttgagcagttcacatcaaagactcaaactgttaaggatcacccagcccaggcatcgggtcctgtaaaaatgctctatcttaggagtagcacccagcgctgtgagtttacttacactcattctaaagggtcagcagatcttcgctaagaaggcagctcagcacagatggaaacaccaagacccagaactttgggaggctgaggtgggaggatggcttcagcttgggagttcacggctgcaatgagcagctatcatctcaccactgcactccagcctgggcgacaaagcaagaccctgtctcaagtcctctctcttcatgggtggggaccgggaattcatttgcagaaagaaggtgcatttccagtcacccagaaccgggcgctgcagctgctttatgatctgcgttacctcaacattgttctgacagccaagggtgacgaggtgaagagtggccggagcaagccagactccaggtgtcgtatcctctagggagctatgtcaaggcggtctcttccaaaagcaaatagtccctttgctgggaagccaccagagtcagcctgttatactgcacattcattgtgtttgttttgaacagtaagtgctcatattaccagcaagttaaataatggccgcctgtttgtgctactaaattctttcctc

SEQ ID NO: 358014 - DNA, 3145 bp, Homo sapiens
agcgggcgggcgccaggcgcgcggagagcggcggctgcgcctgcgccaacgccgtcagtccgcggggcccgatcccgacacctaactccacagagaagctctgctcctaagggaaagggaagacttcagccacagtttcgcagccaacctggcgacctcacctctctggcgacctcacttcccagccggctccgtttaagaaaaccccgcgcaggaccgcgcccgccccgcctcctcgcgcccgccccctcgggtaacaaacatggcccccggcggggcggaagcgcttccgcccccaacgaagatggcggagggggggcgggactaaaagggggtaggtggatcgccgggggctgacgagtgcaccatggccaccgcggcaacctcacccgcgctgaagcggctggatctgcgcgaccctgcggctcttttcgagacgcatggagcggaggagatccgcgggctggagcgccaggttcgggccgagatcgagcacaagaaggaggagctgcggcagatggtgggcgaacggtaccgcgacctgatcgaggcggccgacaccatcggccagatgcgccgctgcgccgtggggctagtggacgccgtgaaggccaccgaccagtactgcgcccgcctccgccaggccggctcggccgcgccccggccaccgcgggcccagcagccacagcagccatcccaagagaagttctacagcatggctgcccagatcaagctactcttagaaattccggagaagatctggagctcgatggaagcctctcagtgtctccacgccacacagctctacctgctctgctgccacctccacagcctgctccagctggattcttctagttcccgatacagtcccgtcctctcccggtttcctatactcatccggcaggtggcggccgccagccacttccggtcaactattctgcatgaaagcaagatgttgctcaaatgccaaggtgtgtctgaccaagctgtggccgaggccctgtgctctataatgctcttagaagagagttctcctcgccaagccctcacagacttcctgctggccagaaaggcaactattcagaaacttctcaaccagccacaccatggtgctggtatcaaggctcagatttgctcattagtggagttgctggccaccactctgaagcaagctcatgcccttttctacactttgccagaaggactgctgccagatccagccctgccatgtggcttgctcttctctactctggagaccatcacaggccagcatcctgccggaaagggcactggtgtcctgcaggaagagatgaaactctgcagctggtttaaacacctgccagcatccatcgtcgagttccagccaacactccgaacccttgcacatcccatcagtcaggaatacctgaaagacacgctgcagaaatggatccacatgtgtaatgaagacattaaaaatgggatcaccaacctgctcatgtacgtgaagagcatgaagggtctcgcgggaatccgggacgccatgtgggagttacttaccagtgagtccaccaatcacagctgggatgtgctatgtcggcggcttctggagaagccgctcttgttctgggaagatatgatgcagcaactgttccttgaccgattacagactctgacaaaagaaggctttgactccatctccagtagctccaaggagctcttggtttcagctttgcaggaacttgaaagcagcaccagcaactccccttcaaataagcacatccactttgagtacaacatgtcgctcttcctctggtctgagagtcctaatgacctgccttccgatgcggcctgggtcagcgtggcaaaccggggtcagtttgccagtagcggcctctccatgaaagcacaagccatcagcccttgtgtacagaacttctgttctgccctggattctaagctgaaggttaaactagatgacctcctggcttacctcccctctgatgactcatcactgcccaaggacgtttctcccacacaggccaagagttctgcctttgacagatacgcagatgcggggaccgtgcaggagatgctgcggactcagtccgtggcatgcatcaagcacatcgtggactgcatccgggcagagctacagagcattgaagaaggtgtgcaagggcaacaggatgccctcaacagtgccaagctgcactcagttcttttcatggccagactctgccagtccctgggagagctgtgcccccatctgaagcagtgcatcctgggaaaatcagagagctcagagaaaccagcaagggagtttagggctctgagaaaacagggaaaggtgaaaactcaggaaatcattcctacacaggccaagtggcaagaggttaaagaagtactcctccagcagagcgtgatgggctaccaggtctggagcagtgcagttgtgaaagttttgattcatggattcacccagtcattacttctagatgatgctggctcagttctggccacagccaccagctgggatgagctagaaattcaggaggaggcagagtctggcagcagtgtcacatccaagatccgactccctgcacagccgtcctggtatgtacagtccttcctgtttagtttatgccaggaaattaatcgggttggaggccatgccttgccaaaggtgacattacaggagatgctgaaaagctgtatggttcaagtagtagctgcctatgagaaactctccgaagaaaaacagattaaggtaggtgtctgaatgtttgcccattaaaaacacaaattaaacaaaagaaaaccttagcattgtcttgggtttgagcagttcacatcaaagactcaaactgttaaggatcacccagcccaggcatcgggtcctgtaaaaatgctctatcttaggagtagcacccagcgctgtgagtttacttacactcattctaaagggtcagcagatcttcgctaagaaggcagctcagcacagatggaaacaccaagacccagaactttgggaggctgaggtgggaggatggcttcagcttgggagttcacggctgcaatgagcagctatcatctcaccactgcactccagcctgggcgacaaagcaagaccctgtctcttaaaaagacaaaacaaaaaaatcaa

SEQ ID NO: 358015 - DNA, 2751 bp, Homo sapiens
cgatgaaactgccttgggaaaagggtagacacaggcacttctctccacagtctgctaacctaatgtgggcagaactgaaagatcactgcagtggaaactgttctggaagaggctgcaacatagcccatgcttagggacagggtggagatgagctcttgaatttagtagggtgaaagagttaactgccaacccggcactatcattgtacttgtttggagaaaatctgttttgttctggtgatgatggttttatcttcccttttagttgggtgggaagtaacagaaaatttgtttccccaaaagtttgacattttcttgttaatacacgtttcatttcagtacgatgccaactgttaagcctgcaggaatcctcctgggtatttctgaattgtgctgtgtgcatgtgtgtttgaaagctcaaacagcttgtcttcttacagcatcgagttgtttgctttattgttagacacaatattagcagtgtatcctttccgtattccctaccatcgaacccattaagatctaaaatccttgtcaagtatctggctttaaaagttgggagatggtagtttaaaaaaaaaaaaagctcttgcaaaaaccatccagtccctaagcatgggctatgttgcagcctcttccagaacagtttccactgcagtgatctttcagttctgcccacattaggttagcaggctgtggagagaagtgcctgtgtctacccttttcccaagacagtcctcatttccaaattctagttttgtcacaaaggctcatgctgttccgtgtcctcttcaaatctggaccgacagcaaagtcctctgactagagccatcgtgcttctcagctccgcttgtgtgtgccgtgtggactccgagtggcgtcgcgcggagggcgagtgggcaggagggctcaggccaactctaaggcacttttctctacatccaatggcaggttgtccccccggcacgctccacagctggtgacccgacagttcctggctccttgttcagacagcttgtcagtgaagaagacaacacgtctgcaccttcattattcaaacttggctggctctctagtatgactaagtaacatggcaacacatctgtctctccctaaataaatactaccacattatttcttctaaaggtgcctctgctcatctgattctcagccacaccaatctttccagtttcactgatggaatgtggccccctagttactgttgggggttactttaagcatcaagttaatccttgtcccaaaatttcacaatacttgttgctttagacatcagttcaggtagcttacattttatcagcgttcaacaacaccttaattgttgacactacaaggtggaattgtcaatgagatcatgtaagctgctgactgaccaagtttgtaggacaaaaagtcattacatattactttacttgcagaactgtgccatgtttcctactaaagtctgaggtgcagactctggtggaatagtgacacagaagttatctgggtatacaagaatctaaaagacattctccctggaaatacaaatatataacaaagagtagagactattattagggagtgtgcttcactgacagtctgaattggatctgattgttctcctgttacacaggagagagtactttcaatagaacatctacatactgagaggtagtatggcagttaatttcagtgcaagactgaatcaagcttcctatattttggaaaaaaacttatgttttttcatggaaactagatactctttactagtttattgaataaaaaaaattgaagatcccgcatttttaaaaggccctttacataaagtagagtttctagttgacagatttggaaatcagtctgaatgggacatactatggattcaacacacagaatgagttttcctcaaaccactaccttgacatagatttgataccctccctcaaaagaatcctataaaaaattgcttcaaagcccctttgaaattgcaatagtgcagcaaaaccacaagtaaacaactgcctgttaacctgttatttcaaatatagactgaaaagccaacaggcatttttcgtgtgcaatttttcttttaaaacaagttgtaagttgaaatatcaaatctgcacagcgctgtcccttcacagaaggcaagaaactgccggcacatcatgtcagaggccgccctcggtgctgtaggctgtggaagtgggcctccctcagggtctggttgatgtggaagtagaggccttggcacagcgcggactgctcgggcacgggctgaggcgtgttagggctggatccggccatggtctggctcaagctgccttccggcccgctggccctgtccgggctgttgatgctgctgctgctgctgctgctgctcccaccactgtcactgcctgaagactctgtgtcccaggaatcctgaaagacagggtttctgctacttcttttggtctgggggggaagatggttgtcttcttcgttgccattccttctccttttcctgggacggaggcgctcgctcatggcagctggcggatggaagctacgcggcgccgctccgcgaagagagggaacagagggggttgtgtttcggcggccgccacgcccaccccctcgggccttggctctcgcagccgctcgggtggacgcagccggtggcgagtacccctcagtcggacccgtaccaccactacttccggcgtctgctccgcgcccccccatgtcgctgccgccgtggtaccgccct

SEQ ID NO: 358016 - DNA, 1935 bp, Homo sapiens
ctgtcgcccgcagtaaggtttgtcgaccacgcgtcggcatggcatcagtcagatcaaggtttggacttctcccactgagcatgacaagcactcgaaaggctaaatcaaccagaaacatcgaaacaaaagctcaggttgtccccccggcacgctccacagctggtgacccgacagttcctggctccttgttcagacagcttgtcagtgaagaagacaacacgtctgcaccttcattattcaaacttggctggctctctagtatgactaagtaacatggcaacacatctgtctctccctaaataaatactaccacattatttcttctaaaggtgcctctgctcatctgattctcagccacaccaatctttccagtttcactgatggaatgtggccccctagttactgttgggggttactttaagcatcaagttaatccttgtcccaaaatttcacaatacttgttgctttagacatcagttcaggtagcttacattttatcagcgttcaacaacaccttaattgttgacactacaaggtggaattgtcaatgagatcatgtaagctgctgactgaccaagtttgtaggacaaaaagtcattacatattactttacttgcagaactgtgccatgtttcctactaaagtctgaggtgcagactctggtggaatagtgacacagaagttatctgggtatacaagaatctaaaagacattctccctggaaatacaaatatataacaaagagtagagactattattagggagtgtgcttcactgacagtctgaattggatctgattgttctcctgttacacaggagagagtactttcaatagaacatctacatactgagaggtagtatggcagttaatttcagtgcaagactgaatcaagcttcctatattttggaaaaaaacttatgttttttcatggaaactagatactctttactagtttattgaataaaaaaaattgaagatcccgcatttttaaaaggccctttacataaagtagagtttctagttgacagatttggaaatcagtctgaatgggacatactatggattcaacacacagaatgagttttcctcaaaccactaccttgacatagatttgataccctccctcaaaagaatcctataaaaaattgcttcaaagcccctttgaaattgcaatagtgcagcaaaaccacaagtaaacaactgcctgttaacctgttatttcaaatatagactgaaaagccaacaggcatttttcgtgtgcaatttttcttttaaaacaagttgtaagttgaaatatcaaatctgcacagcgctgtcccttcacagaaggcaagaaactgccggcacatcatgtcagaggccgccctcggtgctgtaggctgtggaagtgggcctccctcagggtctggttgatgtggaagtagaggccttggcacagcgcggactgctcgggcacgggctgaggcgtgttagggctggatccggccatggtctggctcaagctgccttccggcccgctggccctgtccgggctgttgatgctgctgctgctgctgctgctgctcccaccactgtcactgcctgaagactctgtgtcccaggaatcctgaaagacagggtttctgctacttcttttggtctgggggggaagatggttgtcttcttcgttgccattccttctccttttcctgggacggaggcgctcgctcatggcagctggcggatggaagctacgcggcgccgctccgcgaagagagggaacagagggggttgtgtttcggcggccgccacgcccaccccctcgggccttggctctcgcagccgctcgggtggacgcagccggtggcgagtacccctcagtcggacccgtaccaccactacttccggcgtctgctccgcgcccccccatgtcgctgccgccgtggtaccgccct

SEQ ID NO: 358017 - DNA, 1046 bp, Homo sapiens
tttttttgtttttcctgagacagcctcctgagtagctgcgatcccagctactcaggaggctgaggcaggagaatcactggaacccgggatgtttgattcccaaaataattgtgtatatttaccctaggagttctgaaggaagtcagtttaggcttgggttgttcttagtaaggagggaccttaagggcatgatgagatttggaatttaggtttcttagtccatttgtgctgccataacaaaatacctgagattgggcaatttataacacaagtgtatttttcacagttgtgggtctgggaagtccaagattaaggcactggcctttgatgtctggtgagggccttcttgctgtatcctcacgtgggggaaggtagaagaacctaaaagttgcctccagcccttttatgaggcactgatccatttgctgtggtttggatttgtgtcttgcccacatctcatgttgaattataatccccaatgttggaggtggggcctggtgggagacgaaagtttgcctcttcgtggggctgagcaaaaatgcacgcgtgtgtaggaaaaaccatgggatcttacaacactcctgactctggcaactcttctacactgggctttgatgacttgctgagttgtactgaacccagcttaatagaagttttgtatccttaaatacccccagatttcttcctaagcctacagaacactgagattgcttttgttcgttcttctggtttagttctgtgccttcccctgcagccacagcagccatcccaagagaagttctacagcatggctgcccagatcaagctactcttagaaattccggagaagatctggagctcgatggaagcctctcagtgtctccacgccacacagctctacctgctctgctgccacctccacagcctgctccagctggattcttctagttcccgatacagtcccgtcctctcccggtttcctatactcatccggcaggtggcggccgccagccacttccggtaagtggatccagcgcaaagagctgctctggtggtggccaggcttc

SEQ ID NO: 358018 - DNA, 982 bp, Homo sapiens
  misc_feature (971)..(971): n is a, c, g, or t
tttttttgtttttcctgagacagcctcctgagtagctgcgatcccagctactcaggaggctgaggcaggagaatcactggaacccgggatgtttgattcccaaaataattgtgtatatttaccctaggagttctgaaggaagtcagtttaggcttgggttgttcttagtaaggagggaccttaagggcatgatgagatttggaatttaggtttcttagtccatttgtgctgccataacaaaatacctgagattgggcaatttataacacaagtgtatttttcacagttgtgggtctgggaagtccaagattaaggcactggcctttgatgtctggtgagggccttcttgctgtatcctcacgtgggggaaggtagaagaacctaaaagttgcctccagcccttttatgaggcactgatccatttgctgtggtttggatttgtgtcttgcccacatctcatgttgaattataatccccaatgttggaggtggggcctggtgggagacgaaagtttgcctcttcgtggggctgagcaaaaatgcacgcgtgtgtaggaaaaaccatgggatcttacaacactcctgactctggcaactcttctacactgggctttgatgacttgctgagttgtactgaacccagcttaatagaagttttgtatccttaaatacccccagatttcttcctaagcctacagaacactgagattgcttttgttcgttcttctggtttagttctgtgccttcccctgcagccacagcagccatcccaagagaagttctacagcatggctgcccagatcaagctactcttagaaattccggagaagatctggagctcgatggaagcctctcagtgtctccacgccacacagctctacctgctctgctgccacctccacagcctgctccagctggattcattaataagttaccccgataacatgtgccctgtctctactacccagagtnaaacaagaaaa

SEQ ID NO: 358019 - DNA, 362 bp, Homo sapiens
ttggagacagggtctcaccttgttgcccaggcttgagtgtagtggcatgatcatgggtcactgcagcctcgacctcctgggctcaaatgatcctcctacctcagtctcccaagtagctgcaactacaggtgtgcaccatgacgcctggcaaattgtttcttttttgtagaggtgaggtttcactgtgttgcccaagctggcctggcctaactccctgtttcaatatgcacttcaaagggtggcctagatggcttctcacttggccttctctttaggaaagggcactggtgtcctgcaggaagagatgaaactctgcagctggtttaaacacctgccagcatccatcgtcgagttccagccaa

SEQ ID NO: 358020 - DNA, 5930 bp, Homo sapiens
agcgggcgggcgccaggcgcgcggagagcggcggctgcgcctgcgccaacgccgtcagtccgcggggcccgatcccgacacctaactccacagagaagctctgctcctaagggaaagggaagacttcagccacagtttcgcagccaacctggcgacctcacctctctggcgacctcacttcccagccggctccgtttaagaaaaccccgcgcaggaccgcgcccgccccgcctcctcgcgcccgccccctcgggtaacaaacatggcccccggcggggcggaagcgcttccgcccccaacgaagatggcggagggggggcgggactaaaagggggtaggtggatcgccgggggctgacgagtgcaccatggccaccgcggcaacctcacccgcgctgaagcggctggatctgcgcgaccctgcggctcttttcgagacgcatggagcggaggagatccgcgggctggagcgccaggttcgggccgagatcgagcacaagaaggaggagctgcggcagatggtgggcgaacggtaccgcgacctgatcgaggcggccgacaccatcggccagatgcgccgctgcgccgtggggctagtggacgccgtgaaggccaccgaccagtactgcgcccgcctccgccaggccggctcggccgcgccccggccaccgcgggcccagcagccacagcagccatcccaagagaagttctacagcatggctgcccagatcaagctactcttagaaattccggagaagatctggagctcgatggaagcctctcagtgtctccacgccacacagctctacctgctctgctgccacctccacagcctgctccagctggattcttctagttcccgatacagtcccgtcctctcccggtttcctatactcatccggcaggtggcggccgccagccacttccggtcaactattctgcatgaaagcaagatgttgctcaaatgccaaggtgtgtctgaccaagctgtggccgaggccctgtgctctataatgctcttagaagagagttctcctcgccaagccctcacagacttcctgctggccagaaaggcaactattcagaaacttctcaaccagccacaccatggtgctggtatcaaggctcagatttgctcattagtggagttgctggccaccactctgaagcaagctcatgcccttttctacactttgccagaaggactgctgccagatccagccctgccatgtggcttgctcttctctactctggagaccatcacaggccagcatcctgccggaaagggcactggtgtcctgcaggaagagatgaaactctgcagctggtttaaacacctgccagcatccatcgtcgagttccagccaacactccgaacccttgcacatcccatcagtcaggaatacctgaaagacacgctgcagaaatggatccacatgtgtaatgaagacattaaaaatgggatcaccaacctgctcatgtacgtgaagagcatgaagggtctcgcgggaatccgggacgccatgtgggagttacttaccagtgagtccaccaatcacagctgggatgtgctatgtcggcggcttctggagaagccgctcttgttctgggaagatatgatgcagcaactgttccttgaccgattacagactctgacaaaagaaggctttgactccatctccagtagctccaaggagctcttggtttcagctttgcaggaacttgaaagcagcaccagcaactccccttcaaataagcacatccactttgagtacaacatgtcgctcttcctctggtctgagagtcctaatgacctgccttccgatgcggcctgggtcagcgtggcaaaccggggtcagtttgccagtagcggcctctccatgaaagcacaagccatcagcccttgtgtacagaacttctgttctgccctggattctaagctgaaggttaaactagatgacctcctggcttacctcccctctgatgactcatcactgcccaaggacgtttctcccacacaggccaagagttctgcctttgacagatacgcagatgcggggaccgtgcaggagatgctgcggactcagtccgtggcatgcatcaagcacatcgtggactgcatccgggcagagctacagagcattgaagaaggtgtgcaagggcaacaggatgccctcaacagtgccaagctgcactcagttcttttcatggccagactctgccagtccctgggagagctgtgcccccatctgaagcagtgcatcctgggaaaatcagagagctcagagaaaccagcaagggagtttagggctctgagaaaacagggaaaggtgaaaactcaggaaatcattcctacacaggccaagtggcaagaggttaaagaagtactcctccagcagagcgtgatgggctaccaggtctggagcagtgcagttgtgaaagttttgattcatggattcacccagtcattacttctagatgatgctggctcagttctggccacagccaccagctgggatgagctagaaattcaggaggaggcagagtctggcagcagtgtcacatccaagatccgactccctgcacagccgtcctggtatgtacagtccttcctgtttagtttatgccaggaaattaatcgggttggaggccatgccttgccaaaggtgacattacaggagatgctgaaaagctgtatggttcaagtagtagctgcctatgagaaactctccgaagaaaaacagattaagaaagaaggtgcatttccagtcacccagaaccgggcgctgcagctgctttatgatctgcgttacctcaacattgttctgacagccaagggtgacgaggtgaagagtggccggagcaagccagactccagaattgagaaagtgactgaccacctggaagccctcattgatccatttgacctggacgttttcacgccacacctcaacagcaaccttcatcgcctggtgcagcgaacttctgttctgtttggattggtgactggtacagagaatcagctcgccccccggagcagtacgttcaactcccaagaaccccataacatcctgccactggcatccagtcagatcaggtttggacttctcccactgagcatgacaagcactcgaaaggctaaatcaaccagaaacatcgaaacaaaagctcaggttggtgccaagagcaagaggctcatccgtggatgggtccccacctcccaccgagccacccatgatcagctcccttttaaataactgattaagaactgaatgacaaaatgcactaatgctgcttttaatggcggcgcaatagagaagtacaaggttttactagcttgagctactagaaggtgtaaaagatgcccgctgacactaccaagtagcctcttaatagaaatgtagaaaatatacaggacagggtggagatgagctcttgaatttagtagggtgaaagagttaactgccaacccggcactatcattgtacttgtttggagaaaatctgttttgttctggtgatgatggttttatcttcccttttagttgggtgggaagtaacagaaaatttgtttccccaaaagtttgacattttcttgttaatacacgtttcatttcagtacgatgccaactgttaagcctgcaggaatcctcctgggtatttctgaattgtgctgtgtgcatgtgtgtttgaaagctcaaacagcttgtcttcttacagcatcgagttgtttgctttattgttagacacaatattagcagtgtatcctttccgtattccctaccatcgaacccattaagatctaaaatccttgtcaagtatctggctttaaaagttgggagatggtagtttaaaaaaaaaaaaagctcttgcaaaaaccatccagtccctaagcatgggctatgttgcagcctcttccagaacagtttccactgcagtgatctttcagttctgcccacattaggttagcaggctgtggagagaagtgcctgtgtctacccttttcccaagacagtcctcatttccaaattctagttttgtcacaaaggctcatgctgttccgtgtcctcttcaaatctggaccgacagcaaagtcctctgactagagccatcgtgcttctcagctccgcttgtgtgtgccgtgtggactccgagtggcgtcgcgcggagggcgagtgggcaggagggctcaggccaactctaaggcacttttctctacatccaatggcaggttgtccccccggcacgctccacagctggtgacccgacagttcctggctccttgttcagacagcttgtcagtgaagaagacaacacgtctgcaccttcattattcaaacttggctggctctctagtatgactaagtaacatggcaacacatctgtctctccctaaataaatactaccacattatttcttctaaaggtgcctctgctcatctgattctcagccacaccaatctttccagtttcactgatggaatgtggccccctagttactgttgggggttactttaagcatcaagttaatccttgtcccaaaatttcacaatacttgttgctttagacatcagttcaggtagcttacattttatcagcgttcaacaacaccttaattgttgacactacaaggtggaattgtcaatgagatcatgtaagctgctgactgaccaagtttgtaggacaaaaagtcattacatattactttacttgcagaactgtgccatgtttcctactaaagtctgaggtgcagactctggtggaatagtgacacagaagttatctgggtatacaagaatctaaaagacattctccctggaaatacaaatatataacaaagagtagagactattattagggagtgtgcttcactgacagtctgaattggatctgattgttctcctgttacacaggagagagtactttcaatagaacatctacatactgagaggtagtatggcagttaatttcagtgcaagactgaatcaagcttcctatattttggaaaaaaacttatgttttttcatggaaactagatactctttactagtttattgaataaaaaaaattgaagatcccgcatttttaaaaggccctttacataaagtagagtttctagttgacagatttggaaatcagtctgaatgggacatactatggattcaacacacagaatgagttttcctcaaaccactaccttgacatagatttgataccctccctcaaaagaatcctataaaaaattgcttcaaagcccctttgaaattgcaatagtgcagcaaaaccacaagtaaacaactgcctgttaacctgttatttcaaatatagactgaaaagccaacaggcatttttcgtgtgcaatttttcttttaaaacaagttgtaagttgaaatatcaaatctgcacagcgctgtcccttcacagaaggcaagaaactgccggcacatcatgtcagaggccgccctcggtgctgtaggctgtggaagtgggcctccctcagggtctggttgatgtggaagtagaggccttggcacagcgcggactgctcgggcacgggctgaggcgtgttagggctggatccggccatggtctggctcaagctgccttccggcccgctggccctgtccgggctgttgatgctgctgctgctgctgctgctgctcccaccactgtcactgcctgaagactgggacggaggcgctcgctcatggcagctggcggatggaagctacgcggcgccgctccgcgaagagagggaacagagggggttgtgtttcggcggccgccacgcccaccccctcgggccttggctctcgcagccgctcgggtggacgcagccggtggcgagtacccctcagtcggacccgtaccaccactacttccggcgtctgctccgcgcccccccatgtcgctgccgccgtggtaccgccct

SEQ ID NO: 358021 - DNA, 4973 bp, Homo sapiens
agcgggcgggcgccaggcgcgcggagagcggcggctgcgcctgcgccaacgccgtcagtccgcggggcccgatcccgacacctaactccacagagaagctctgctcctaagggaaagggaagacttcagccacagtttcgcagccaacctggcgacctcacctctctggcgacctcacttcccagccggctccgtttaagaaaaccccgcgcaggaccgcgcccgccccgcctcctcgcgcccgccccctcgggtaacaaacatggcccccggcggggcggaagcgcttccgcccccaacgaagatggcggagggggggcgggactaaaagggggtaggtggatcgccgggggctgacgagtgcaccatggccaccgcggcaacctcacccgcgctgaagcggctggatctgcgcgaccctgcggctcttttcgagacgcatggagcggaggagatccgcgggctggagcgccaggttcgggccgagatcgagcacaagaaggaggagctgcggcagatggtgggcgaacggtaccgcgacctgatcgaggcggccgacaccatcggccagatgcgccgctgcgccgtggggctagtggacgccgtgaaggccaccgaccagtactgcgcccgcctccgccaggccggctcggccgcgccccggccaccgcgggcccagcagccacagcagccatcccaagagaagttctacagcatggctgcccagatcaagctactcttagaaattccggagaagatctggagctcgatggaagcctctcagtgtctccacgccacacagctctacctgctctgctgccacctccacagcctgctccagctggattcttctagttcccgatacagtcccgtcctctcccggtttcctatactcatccggcaggtggcggccgccagccacttccggtcaactattctgcatgaaagcaagatgttgctcaaatgccaaggtgtgtctgaccaagctgtggccgaggccctgtgctctataatgctcttagaagagagttctcctcgccaagccctcacagacttcctgctggccagaaaggcaactattcagaaacttctcaaccagccacaccatggtgctggtatcaaggctcagatttgctcattagtggagttgctggccaccactctgaagcaagctcatgcccttttctacactttgccagaaggactgctgccagatccagccctgccatgtggcttgctcttctctactctggagaccatcacaggccagcatcctgccggaaagggcactggtgtcctgcaggaagagatgaaactctgcagctggtttaaacacctgccagcatccatcgtcgagttccagccaacactccgaacccttgcacatcccatcagtcaggaatacctgaaagacacgctgcagaaatggatccacatgtgtaatgaagacattaaaaatgggatcaccaacctgctcatgtacgtgaagagcatgaagggtctcgcgggaatccgggacgccatgtgggagttacttaccagtgagtccaccaatcacagctgggatgtgctatgtcggcggcttctggagaagccgctcttgttctgggaagatatgatgcagcaactgttccttgaccgattacagactctgacaaaagaaggctttgactccatctccagtagctccaaggagctcttggtttcagctttgcaggaacttgaaagcagcaccagcaactccccttcaaataagcacatccactttgagtacaacatgtcgctcttcctctggtctgagagtcctaatgacctgccttccgatgcggcctgggtcagcgtggcaaaccggggtcagtttgccagtagcggcctctccatgaaagcacaagccatcagcccttgtgtacagaacttctgttctgccctggattctaagctgaaggttaaactagatgacctcctggcttacctcccctctgatgactcatcactgcccaaggacgtttctcccacacaggccaagagttctgcctttgacagatacgcagatgcggggaccgtgcaggagatgctgcggactcagtccgtggcatgcatcaagcacatcgtggactgcatccgggcagagctacagagcattgaagaaggtgtgcaagggcaacaggatgccctcaacagtgccaagctgcactcagttcttttcatggccagactctgccagtccctgggagagctgtgcccccatctgaagcagtgcatcctgggaaaatcagagagctcagagaaaccagcaagggagtttagggctctgagaaaacagggaaaggtgaaaactcaggaaatcattcctacacaggccaagtggcaagaggttaaagaagtactcctccagcagagcgtgatgggctaccaggtctggagcagtgcagttgtgaaagttttgattcatggattcacccagtcattacttctagatgatgctggctcagttctggccacagccaccagctgggatgagctagaaattcaggaggaggcagagtctggcagcagtgtcacatccaagatccgactccctgcacagccgtcctggtatgtacagtccttcctgtttagtttatgccaggaaattaatcgggttggaggccatgccttgccaaaggtgacattacaggagatgctgaaaagctgtatggttcaagtagtagctgcctatgagaaactctccgaagaaaaacagattaagaaagaaggtgcatttccagtcacccagaaccgggcgctgcagctgctttatgatctgcgttacctcaacattgttctgacagccaagggtgacgaggtgaagagtggccggagcaagccagactccagaattgagaaagtgactgaccacctggaagccctcattgatccatttgacctggacgttttcacgccacacctcaacagcaaccttcatcgcctggtgcagcgaacttctgttctgtttggattggtgactggtacagagaatcagctcgccccccggagcagtacgttcaactcccaagaaccccataacatcctgccactggcatccagtcagatcaggtttggacttctcccactgagcatgacaagcactcgaaaggctaaatcaaccagaaacatcgaaacaaaagctcaggttgtccccccggcacgctccacagctggtgacccgacagttcctggctccttgttcagacagcttgtcagtgaagaagacaacacgtctgcaccttcattattcaaacttggctggctctctagtatgactaagtaacatggcaacacatctgtctctccctaaataaatactaccacattatttcttctaaaggtgcctctgctcatctgattctcagccacaccaatctttccagtttcactgatggaatgtggccccctagttactgttgggggttactttaagcatcaagttaatccttgtcccaaaatttcacaatacttgttgctttagacatcagttcaggtagcttacattttatcagcgttcaacaacaccttaattgttgacactacaaggtggaattgtcaatgagatcatgtaagctgctgactgaccaagtttgtaggacaaaaagtcattacatattactttacttgcagaactgtgccatgtttcctactaaagtctgaggtgcagactctggtggaatagtgacacagaagttatctgggtatacaagaatctaaaagacattctccctggaaatacaaatatataacaaagagtagagactattattagggagtgtgcttcactgacagtctgaattggatctgattgttctcctgttacacaggagagagtactttcaatagaacatctacatactgagaggtagtatggcagttaatttcagtgcaagactgaatcaagcttcctatattttggaaaaaaacttatgttttttcatggaaactagatactctttactagtttattgaataaaaaaaattgaagatcccgcatttttaaaaggccctttacataaagtagagtttctagttgacagatttggaaatcagtctgaatgggacatactatggattcaacacacagaatgagttttcctcaaaccactaccttgacatagatttgataccctccctcaaaagaatcctataaaaaattgcttcaaagcccctttgaaattgcaatagtgcagcaaaaccacaagtaaacaactgcctgttaacctgttatttcaaatatagactgaaaagccaacaggcatttttcgtgtgcaatttttcttttaaaacaagttgtaagttgaaatatcaaatctgcacagcgctgtcccttcacagaaggcaagaaactgccggcacatcatgtcagaggccgccctcggtgctgtaggctgtggaagtgggcctccctcagggtctggttgatgtggaagtagaggccttggcacagcgcggactgctcgggcacgggctgaggcgtgttagggctggatccggccatggtctggctcaagctgccttccggcccgctggccctgtccgggctgttgatgctgctgctgctgctgctgctgctcccaccactgtcactgcctgaagactctgtgtcccaggaatcctgaaagacagggtttctgctacttcttttggtctgggggggaagatggttgtcttcttcgttgccattccttctccttttcctgggacggaggcgctcgctcatggcagctggcggatggaagctacgcggcgccgctccgcgaagagagggaacagagggggttgtgtttcggcggccgccacgcccaccccctcgggccttggctctcgcagccgctcgggtggacgcagccggtggcgagtacccctcagtcggacccgtaccaccactacttccggcgtctgctccgcgcccccccatgtcgctgccgccgtggtaccgccct

SEQ ID NO: 358022 - DNA, 6504 bp, Homo sapiens
agcgggcgggcgccaggcgcgcggagagcggcggctgcgcctgcgccaacgccgtcagtccgcggggcccgatcccgacacctaactccacagagaagctctgctcctaagggaaagggaagacttcagccacagtttcgcagccaacctggcgacctcacctctctggcgacctcacttcccagccggctccgtttaagaaaaccccgcgcaggaccgcgcccgccccgcctcctcgcgcccgccccctcgggtaacaaacatggcccccggcggggcggaagcgcttccgcccccaacgaagatggcggagggggggcgggactaaaagggggtaggtggatcgccgggggctgacgagtgcaccatggccaccgcggcaacctcacccgcgctgaagcggctggatctgcgcgaccctgcggctcttttcgagacgcatggagcggaggagatccgcgggctggagcgccaggttcgggccgagatcgagcacaagaaggaggagctgcggcagatggtgggcgaacggtaccgcgacctgatcgaggcggccgacaccatcggccagatgcgccgctgcgccgtggggctagtggacgccgtgaaggccaccgaccagtactgcgcccgcctccgccaggccggctcggccgcgccccggccaccgcgggcccagcagccacagcagccatcccaagagaagttctacagcatggctgcccagatcaagctactcttagaaattccggagaagatctggagctcgatggaagcctctcagtgtctccacgccacacagctctacctgctctgctgccacctccacagcctgctccagctggattcttctagttcccgatacagtcccgtcctctcccggtttcctatactcatccggcaggtggcggccgccagccacttccggtcaactattctgcatgaaagcaagatgttgctcaaatgccaaggtgtgtctgaccaagctgtggccgaggccctgtgctctataatgctcttagaagagagttctcctcgccaagccctcacagacttcctgctggccagaaaggcaactattcagaaacttctcaaccagccacaccatggtgctggtatcaaggctcagatttgctcattagtggagttgctggccaccactctgaagcaagctcatgcccttttctacactttgccagaaggactgctgccagatccagccctgccatgtggcttgctcttctctactctggagaccatcacaggccagcatcctgccggaaagggcactggtgtcctgcaggaagagatgaaactctgcagctggtttaaacacctgccagcatccatcgtcgagttccagccaacactccgaacccttgcacatcccatcagtcaggaatacctgaaagacacgctgcagaaatggatccacatgtgtaatgaagacattaaaaatgggatcaccaacctgctcatgtacgtgaagagcatgaagggtctcgcgggaatccgggacgccatgtgggagttacttaccagtgagtccaccaatcacagctgggatgtgctatgtcggcggcttctggagaagccgctcttgttctgggaagatatgatgcagcaactgttccttgaccgattacagactctgacaaaagaaggctttgactccatctccagtagctccaaggagctcttggtttcagctttgcaggaacttgaaagcagcaccagcaactccccttcaaataagcacatccactttgagtacaacatgtcgctcttcctctggtctgagagtcctaatgacctgccttccgatgcggcctgggtcagcgtggcaaaccggggtcagtttgccagtagcggcctctccatgaaagcacaagccatcagcccttgtgtacagaacttctgttctgccctggattctaagctgaaggttaaactagatgacctcctggcttacctcccctctgatgactcatcactgcccaaggacgtttctcccacacaggccaagagttctgcctttgacagatacgcagatgcggggaccgtgcaggagatgctgcggactcagtccgtggcatgcatcaagcacatcgtggactgcatccgggcagagctacagagcattgaagaaggtgtgcaagggcaacaggatgccctcaacagtgccaagctgcactcagttcttttcatggccagactctgccagtccctgggagagctgtgcccccatctgaagcagtgcatcctgggaaaatcagagagctcagagaaaccagcaagggagtttagggctctgagaaaacagggaaaggtgaaaactcaggaaatcattcctacacaggccaagtggcaagaggttaaagaagtactcctccagcagagcgtgatgggctaccaggtctggagcagtgcagttgtgaaagttttgattcatggattcacccagtcattacttctagatgatgctggctcagttctggccacagccaccagctgggatgagctagaaattcaggaggaggcagagtctggcagcagtgtcacatccaagatccgactccctgcacagccgtcctggtatgtacagtccttcctgtttagtttatgccaggaaattaatcgggttggaggccatgccttgccaaaggtgacattacaggagatgctgaaaagctgtatggttcaagtagtagctgcctatgagaaactctccgaagaaaaacagattaagaaagaaggtgcatttccagtcacccagaaccgggcgctgcagctgctttatgatctgcgttacctcaacattgttctgacagccaagggtgacgaggtgaagagtggccggagcaagccagactccaggtgtcgtatcctctagggagctatgtcaaggcggtctcttccaaaagcaaatagtccctttgctgggaagccaccagagtcagcctgttatactgcacattcattgtgtttgttttgaacagtaagtgctcatattaccagcaagttaaataatggccgcctgctggataaatgcaatggtcaagtgaaataggtggactcttattcccctctcttctgagtcagcctagcagctgctgagtatcatttgagcccttagtgccctccttatagacagaacagggggaaagggtggacttcacttagacatcatgcttgagggtgacttaagcactatcatcagtgacaaacgtactaagccagcaactaagtagaataaaacccaactccaagatttctacagcagtaggatatcataagattgtttttgatcctaaaaaatgtggacagtaatgatcctaatccttttctcagaattgagaaagtgactgaccacctggaagccctcattgatccatttgacctggacgttttcacgccacacctcaacagcaaccttcatcgcctggtgcagcgaacttctgttctgtttggattggtgactggtacagagaatcagctcgccccccggagcagtacgttcaactcccaagaaccccataacatcctgccactggcatccagtcagatcaggtttggacttctcccactgagcatgacaagcactcgaaaggctaaatcaaccagaaacatcgaaacaaaagctcaggttggtgccaagagcaagaggctcatccgtggatgggtccccacctcccaccgagccacccatgatcagctcccttttaaataactgattaagaactgaatgacaaaatgcactaatgctgcttttaatggcggcgcaatagagaagtacaaggttttactagcttgagctactagaaggtgtaaaagatgcccgctgacactaccaagtagcctcttaatagaaatgtagaaaatatacaggacagggtggagatgagctcttgaatttagtagggtgaaagagttaactgccaacccggcactatcattgtacttgtttggagaaaatctgttttgttctggtgatgatggttttatcttcccttttagttgggtgggaagtaacagaaaatttgtttccccaaaagtttgacattttcttgttaatacacgtttcatttcagtacgatgccaactgttaagcctgcaggaatcctcctgggtatttctgaattgtgctgtgtgcatgtgtgtttgaaagctcaaacagcttgtcttcttacagcatcgagttgtttgctttattgttagacacaatattagcagtgtatcctttccgtattccctaccatcgaacccattaagatctaaaatccttgtcaagtatctggctttaaaagttgggagatggtagtttaaaaaaaaaaaaagctcttgcaaaaaccatccagtccctaagcatgggctatgttgcagcctcttccagaacagtttccactgcagtgatctttcagttctgcccacattaggttagcaggctgtggagagaagtgcctgtgtctacccttttcccaagacagtcctcatttccaaattctagttttgtcacaaaggctcatgctgttccgtgtcctcttcaaatctggaccgacagcaaagtcctctgactagagccatcgtgcttctcagctccgcttgtgtgtgccgtgtggactccgagtggcgtcgcgcggagggcgagtgggcaggagggctcaggccaactctaaggcacttttctctacatccaatggcaggttgtccccccggcacgctccacagctggtgacccgacagttcctggctccttgttcagacagcttgtcagtgaagaagacaacacgtctgcaccttcattattcaaacttggctggctctctagtatgactaagtaacatggcaacacatctgtctctccctaaataaatactaccacattatttcttctaaaggtgcctctgctcatctgattctcagccacaccaatctttccagtttcactgatggaatgtggccccctagttactgttgggggttactttaagcatcaagttaatccttgtcccaaaatttcacaatacttgttgctttagacatcagttcaggtagcttacattttatcagcgttcaacaacaccttaattgttgacactacaaggtggaattgtcaatgagatcatgtaagctgctgactgaccaagtttgtaggacaaaaagtcattacatattactttacttgcagaactgtgccatgtttcctactaaagtctgaggtgcagactctggtggaatagtgacacagaagttatctgggtatacaagaatctaaaagacattctccctggaaatacaaatatataacaaagagtagagactattattagggagtgtgcttcactgacagtctgaattggatctgattgttctcctgttacacaggagagagtactttcaatagaacatctacatactgagaggtagtatggcagttaatttcagtgcaagactgaatcaagcttcctatattttggaaaaaaacttatgttttttcatggaaactagatactctttactagtttattgaataaaaaaaattgaagatcccgcatttttaaaaggccctttacataaagtagagtttctagttgacagatttggaaatcagtctgaatgggacatactatggattcaacacacagaatgagttttcctcaaaccactaccttgacatagatttgataccctccctcaaaagaatcctataaaaaattgcttcaaagcccctttgaaattgcaatagtgcagcaaaaccacaagtaaacaactgcctgttaacctgttatttcaaatatagactgaaaagccaacaggcatttttcgtgtgcaatttttcttttaaaacaagttgtaagttgaaatatcaaatctgcacagcgctgtcccttcacagaaggcaagaaactgccggcacatcatgtcagaggccgccctcggtgctgtaggctgtggaagtgggcctccctcagggtctggttgatgtggaagtagaggccttggcacagcgcggactgctcgggcacgggctgaggcgtgttagggctggatccggccatggtctggctcaagctgccttccggcccgctggccctgtccgggctgttgatgctgctgctgctgctgctgctgctcccaccactgtcactgcctgaagactctgtgtcccaggaatcctgaaagacagggtttctgctacttcttttggtctgggggggaagatggttgtcttcttcgttgccattccttctccttttcctgggacggaggcgctcgctcatggcagctggcggatggaagctacgcggcgccgctccgcgaagagagggaacagagggggttgtgtttcggcggccgccacgcccaccccctcgggccttggctctcgcagccgctcgggtggacgcagccggtggcgagtacccctcagtcggacccgtaccaccactacttccggcgtctgctccgcgcccccccatgtcgctgccgccgtggtaccgccct

SEQ ID NO: 358023 - DNA, 4993 bp, Homo sapiens
agcgggcgggcgccaggcgcgcggagagcggcggctgcgcctgcgccaacgccgtcagtccgcggggcccgatcccgacacctaactccacagagaagctctgctcctaagggaaagggaagacttcagccacagtttcgcagccaacctggcgacctcacctctctggcgacctcacttcccagccggctccgtttaagaaaaccccgcgcaggaccgcgcccgccccgcctcctcgcgcccgccccctcgggtaacaaacatggcccccggcggggcggaagcgcttccgcccccaacgaagatggcggagggggggcgggactaaaagggggtaggtggatcgccgggggctgacgagtgcaccatggccaccgcggcaacctcacccgcgctgaagcggctggatctgcgcgaccctgcggctcttttcgagacgcatggagcggaggagatccgcgggctggagcgccaggttcgggccgagatcgagcacaagaaggaggagctgcggcagatggtgggcgaacggtaccgcgacctgatcgaggcggccgacaccatcggccagatgcgccgctgcgccgtggggctagtggacgccgtgaaggccaccgaccagtactgcgcccgcctccgccaggccggctcggccgcgccccggccaccgcgggcccagcagttctgtgccttcccctgcagccacagcagccatcccaagagaagttctacagcatggctgcccagatcaagctactcttagaaattccggagaagatctggagctcgatggaagcctctcagtgtctccacgccacacagctctacctgctctgctgccacctccacagcctgctccagctggattcttctagttcccgatacagtcccgtcctctcccggtttcctatactcatccggcaggtggcggccgccagccacttccggtcaactattctgcatgaaagcaagatgttgctcaaatgccaaggtgtgtctgaccaagctgtggccgaggccctgtgctctataatgctcttagaagagagttctcctcgccaagccctcacagacttcctgctggccagaaaggcaactattcagaaacttctcaaccagccacaccatggtgctggtatcaaggctcagatttgctcattagtggagttgctggccaccactctgaagcaagctcatgcccttttctacactttgccagaaggactgctgccagatccagccctgccatgtggcttgctcttctctactctggagaccatcacaggccagcatcctgccggaaagggcactggtgtcctgcaggaagagatgaaactctgcagctggtttaaacacctgccagcatccatcgtcgagttccagccaacactccgaacccttgcacatcccatcagtcaggaatacctgaaagacacgctgcagaaatggatccacatgtgtaatgaagacattaaaaatgggatcaccaacctgctcatgtacgtgaagagcatgaagggtctcgcgggaatccgggacgccatgtgggagttacttaccagtgagtccaccaatcacagctgggatgtgctatgtcggcggcttctggagaagccgctcttgttctgggaagatatgatgcagcaactgttccttgaccgattacagactctgacaaaagaaggctttgactccatctccagtagctccaaggagctcttggtttcagctttgcaggaacttgaaagcagcaccagcaactccccttcaaataagcacatccactttgagtacaacatgtcgctcttcctctggtctgagagtcctaatgacctgccttccgatgcggcctgggtcagcgtggcaaaccggggtcagtttgccagtagcggcctctccatgaaagcacaagccatcagcccttgtgtacagaacttctgttctgccctggattctaagctgaaggttaaactagatgacctcctggcttacctcccctctgatgactcatcactgcccaaggacgtttctcccacacaggccaagagttctgcctttgacagatacgcagatgcggggaccgtgcaggagatgctgcggactcagtccgtggcatgcatcaagcacatcgtggactgcatccgggcagagctacagagcattgaagaaggtgtgcaagggcaacaggatgccctcaacagtgccaagctgcactcagttcttttcatggccagactctgccagtccctgggagagctgtgcccccatctgaagcagtgcatcctgggaaaatcagagagctcagagaaaccagcaagggagtttagggctctgagaaaacagggaaaggtgaaaactcaggaaatcattcctacacaggccaagtggcaagaggttaaagaagtactcctccagcagagcgtgatgggctaccaggtctggagcagtgcagttgtgaaagttttgattcatggattcacccagtcattacttctagatgatgctggctcagttctggccacagccaccagctgggatgagctagaaattcaggaggaggcagagtctggcagcagtgtcacatccaagatccgactccctgcacagccgtcctggtatgtacagtccttcctgtttagtttatgccaggaaattaatcgggttggaggccatgccttgccaaaggtgacattacaggagatgctgaaaagctgtatggttcaagtagtagctgcctatgagaaactctccgaagaaaaacagattaagaaagaaggtgcatttccagtcacccagaaccgggcgctgcagctgctttatgatctgcgttacctcaacattgttctgacagccaagggtgacgaggtgaagagtggccggagcaagccagactccagaattgagaaagtgactgaccacctggaagccctcattgatccatttgacctggacgttttcacgccacacctcaacagcaaccttcatcgcctggtgcagcgaacttctgttctgtttggattggtgactggtacagagaatcagctcgccccccggagcagtacgttcaactcccaagaaccccataacatcctgccactggcatccagtcagatcaggtttggacttctcccactgagcatgacaagcactcgaaaggctaaatcaaccagaaacatcgaaacaaaagctcaggttgtccccccggcacgctccacagctggtgacccgacagttcctggctccttgttcagacagcttgtcagtgaagaagacaacacgtctgcaccttcattattcaaacttggctggctctctagtatgactaagtaacatggcaacacatctgtctctccctaaataaatactaccacattatttcttctaaaggtgcctctgctcatctgattctcagccacaccaatctttccagtttcactgatggaatgtggccccctagttactgttgggggttactttaagcatcaagttaatccttgtcccaaaatttcacaatacttgttgctttagacatcagttcaggtagcttacattttatcagcgttcaacaacaccttaattgttgacactacaaggtggaattgtcaatgagatcatgtaagctgctgactgaccaagtttgtaggacaaaaagtcattacatattactttacttgcagaactgtgccatgtttcctactaaagtctgaggtgcagactctggtggaatagtgacacagaagttatctgggtatacaagaatctaaaagacattctccctggaaatacaaatatataacaaagagtagagactattattagggagtgtgcttcactgacagtctgaattggatctgattgttctcctgttacacaggagagagtactttcaatagaacatctacatactgagaggtagtatggcagttaatttcagtgcaagactgaatcaagcttcctatattttggaaaaaaacttatgttttttcatggaaactagatactctttactagtttattgaataaaaaaaattgaagatcccgcatttttaaaaggccctttacataaagtagagtttctagttgacagatttggaaatcagtctgaatgggacatactatggattcaacacacagaatgagttttcctcaaaccactaccttgacatagatttgataccctccctcaaaagaatcctataaaaaattgcttcaaagcccctttgaaattgcaatagtgcagcaaaaccacaagtaaacaactgcctgttaacctgttatttcaaatatagactgaaaagccaacaggcatttttcgtgtgcaatttttcttttaaaacaagttgtaagttgaaatatcaaatctgcacagcgctgtcccttcacagaaggcaagaaactgccggcacatcatgtcagaggccgccctcggtgctgtaggctgtggaagtgggcctccctcagggtctggttgatgtggaagtagaggccttggcacagcgcggactgctcgggcacgggctgaggcgtgttagggctggatccggccatggtctggctcaagctgccttccggcccgctggccctgtccgggctgttgatgctgctgctgctgctgctgctgctcccaccactgtcactgcctgaagactctgtgtcccaggaatcctgaaagacagggtttctgctacttcttttggtctgggggggaagatggttgtcttcttcgttgccattccttctccttttcctgggacggaggcgctcgctcatggcagctggcggatggaagctacgcggcgccgctccgcgaagagagggaacagagggggttgtgtttcggcggccgccacgcccaccccctcgggccttggctctcgcagccgctcgggtggacgcagccggtggcgagtacccctcagtcggacccgtaccaccactacttccggcgtctgctccgcgcccccccatgtcgctgccgccgtggtaccgccct

SEQ ID NO: 358024 - DNA, 5045 bp, Homo sapiens
tttttttgtttttcctgagacagcctcctgagtagctgcgatcccagctactcaggaggctgaggcaggagaatcactggaacccgggatgtttgattcccaaaataattgtgtatatttaccctaggagttctgaaggaagtcagtttaggcttgggttgttcttagtaaggagggaccttaagggcatgatgagatttggaatttaggtttcttagtccatttgtgctgccataacaaaatacctgagattgggcaatttataacacaagtgtatttttcacagttgtgggtctgggaagtccaagattaaggcactggcctttgatgtctggtgagggccttcttgctgtatcctcacgtgggggaaggtagaagaacctaaaagttgcctccagcccttttatgaggcactgatccatttgctgtggtttggatttgtgtcttgcccacatctcatgttgaattataatccccaatgttggaggtggggcctggtgggagacgaaagtttgcctcttcgtggggctgagcaaaaatgcacgcgtgtgtaggaaaaaccatgggatcttacaacactcctgactctggcaactcttctacactgggctttgatgacttgctgagttgtactgaacccagcttaatagaagttttgtatccttaaatacccccagatttcttcctaagcctacagaacactgagattgcttttgttcgttcttctggtttagttctgtgccttcccctgcagccacagcagccatcccaagagaagttctacagcatggctgcccagatcaagctactcttagaaattccggagaagatctggagctcgatggaagcctctcagtgtctccacgccacacagctctacctgctctgctgccacctccacagcctgctccagctggattcttctagttcccgatacagtcccgtcctctcccggtttcctatactcatccggcaggtggcggccgccagccacttccggtcaactattctgcatgaaagcaagatgttgctcaaatgccaaggtgtgtctgaccaagctgtggccgaggccctgtgctctataatgctcttagaagagagttctcctcgccaagccctcacagacttcctgctggccagaaaggcaactattcagaaacttctcaaccagccacaccatggtgctggtatcaaggctcagatttgctcattagtggagttgctggccaccactctgaagcaagctcatgcccttttctacactttgccagaaggactgctgccagatccagccctgccatgtggcttgctcttctctactctggagaccatcacaggccagcatcctgccggaaagggcactggtgtcctgcaggaagagatgaaactctgcagctggtttaaacacctgccagcatccatcgtcgagttccagccaacactccgaacccttgcacatcccatcagtcaggaatacctgaaagacacgctgcagaaatggatccacatgtgtaatgaagacattaaaaatgggatcaccaacctgctcatgtacgtgaagagcatgaagggtctcgcgggaatccgggacgccatgtgggagttacttaccagtgagtccaccaatcacagctgggatgtgctatgtcggcggcttctggagaagccgctcttgttctgggaagatatgatgcagcaactgttccttgaccgattacagactctgacaaaagaaggctttgactccatctccagtagctccaaggagctcttggtttcagctttgcaggaacttgaaagcagcaccagcaactccccttcaaataagcacatccactttgagtacaacatgtcgctcttcctctggtctgagagtcctaatgacctgccttccgatgcggcctgggtcagcgtggcaaaccggggtcagtttgccagtagcggcctctccatgaaagcacaagccatcagcccttgtgtacagaacttctgttctgccctggattctaagctgaaggttaaactagatgacctcctggcttacctcccctctgatgactcatcactgcccaaggacgtttctcccacacaggccaagagttctgcctttgacagatacgcagatgcggggaccgtgcaggagatgctgcggactcagtccgtggcatgcatcaagcacatcgtggactgcatccgggcagagctacagagcattgaagaaggtgtgcaagggcaacaggatgccctcaacagtgccaagctgcactcagttcttttcatggccagactctgccagtccctgggagagctgtgcccccatctgaagcagtgcatcctgggaaaatcagagagctcagagaaaccagcaagggagtttagggctctgagaaaacagggaaaggtgaaaactcaggaaatcattcctacacaggccaagtggcaagaggttaaagaagtactcctccagcagagcgtgatgggctaccaggtctggagcagtgcagttgtgaaagttttgattcatggattcacccagtcattacttctagatgatgctggctcagttctggccacagccaccagctgggatgagctagaaattcaggaggaggcagagtctggcagcagtgtcacatccaagatccgactccctgcacagccgtcctggtatgtacagtccttcctgtttagtttatgccaggaaattaatcgggttggaggccatgccttgccaaaggtgacattacaggagatgctgaaaagctgtatggttcaagtagtagctgcctatgagaaactctccgaagaaaaacagattaagaaagaaggtgcatttccagtcacccagaaccgggcgctgcagctgctttatgatctgcgttacctcaacattgttctgacagccaagggtgacgaggtgaagagtggccggagcaagccagactccagaattgagaaagtgactgaccacctggaagccctcattgatccatttgacctggacgttttcacgccacacctcaacagcaaccttcatcgcctggtgcagcgaacttctgttctgtttggattggtgactggtacagagaatcagctcgccccccggagcagtacgttcaactcccaagaaccccataacatcctgccactggcatccagtcagatcaggtttggacttctcccactgagcatgacaagcactcgaaaggctaaatcaaccagaaacatcgaaacaaaagctcaggttgtccccccggcacgctccacagctggtgacccgacagttcctggctccttgttcagacagcttgtcagtgaagaagacaacacgtctgcaccttcattattcaaacttggctggctctctagtatgactaagtaacatggcaacacatctgtctctccctaaataaatactaccacattatttcttctaaaggtgcctctgctcatctgattctcagccacaccaatctttccagtttcactgatggaatgtggccccctagttactgttgggggttactttaagcatcaagttaatccttgtcccaaaatttcacaatacttgttgctttagacatcagttcaggtagcttacattttatcagcgttcaacaacaccttaattgttgacactacaaggtggaattgtcaatgagatcatgtaagctgctgactgaccaagtttgtaggacaaaaagtcattacatattactttacttgcagaactgtgccatgtttcctactaaagtctgaggtgcagactctggtggaatagtgacacagaagttatctgggtatacaagaatctaaaagacattctccctggaaatacaaatatataacaaagagtagagactattattagggagtgtgcttcactgacagtctgaattggatctgattgttctcctgttacacaggagagagtactttcaatagaacatctacatactgagaggtagtatggcagttaatttcagtgcaagactgaatcaagcttcctatattttggaaaaaaacttatgttttttcatggaaactagatactctttactagtttattgaataaaaaaaattgaagatcccgcatttttaaaaggccctttacataaagtagagtttctagttgacagatttggaaatcagtctgaatgggacatactatggattcaacacacagaatgagttttcctcaaaccactaccttgacatagatttgataccctccctcaaaagaatcctataaaaaattgcttcaaagcccctttgaaattgcaatagtgcagcaaaaccacaagtaaacaactgcctgttaacctgttatttcaaatatagactgaaaagccaacaggcatttttcgtgtgcaatttttcttttaaaacaagttgtaagttgaaatatcaaatctgcacagcgctgtcccttcacagaaggcaagaaactgccggcacatcatgtcagaggccgccctcggtgctgtaggctgtggaagtgggcctccctcagggtctggttgatgtggaagtagaggccttggcacagcgcggactgctcgggcacgggctgaggcgtgttagggctggatccggccatggtctggctcaagctgccttccggcccgctggccctgtccgggctgttgatgctgctgctgctgctgctgctgctcccaccactgtcactgcctgaagactctgtgtcccaggaatcctgaaagacagggtttctgctacttcttttggtctgggggggaagatggttgtcttcttcgttgccattccttctccttttcctgggacggaggcgctcgctcatggcagctggcggatggaagctacgcggcgccgctccgcgaagagagggaacagagggggttgtgtttcggcggccgccacgcccaccccctcgggccttggctctcgcagccgctcgggtggacgcagccggtggcgagtacccctcagtcggacccgtaccaccactacttccggcgtctgctccgcgcccccccatgtcgctgccgccgtggtaccgccct

SEQ ID NO: 358025 - DNA, 4533 bp, Homo sapiens
aggctagtgaggccgggggtgaatcggccgagggttacttaccagtgagtccaccaatcacagctgggatgtgctatgtcggcggcttctggagaagccgctcttgttctgggaagatatgatgcagcaactgttccttgaccgattacagactctgacaaaagaaggctttgactccatctccagtagctccaaggagctcttggtttcagctttgcaggaacttgaaagcagcaccagcaactccccttcaaataagcacatccactttgagtacaacatgtcgctcttcctctggtctgagagtcctaatgacctgccttccgatgcggcctgggtcagcgtggcaaaccggggtcagtttgccagtagcggcctctccatgaaagcacaagccatcagcccttgtgtacagaacttctgttctgccctggattctaagctgaaggttaaactagatgacctcctggcttacctcccctctgatgactcatcactgcccaaggacgtttctcccacacaggccaagagttctgcctttgacagatacgcagatgcggggaccgtgcaggagatgctgcggactcagtccgtggcatgcatcaagcacatcgtggactgcatccgggcagagctacagagcattgaagaaggtgtgcaagggcaacaggatgccctcaacagtgccaagctgcactcagttcttttcatggccagactctgccagtccctgggagagctgtgcccccatctgaagcagtgcatcctgggaaaatcagagagctcagagaaaccagcaagggagtttagggctctgagaaaacagggaaaggtgaaaactcaggaaatcattcctacacaggccaagtggcaagaggttaaagaagtactcctccagcagagcgtgatgggctaccaggtctggagcagtgcagttgtgaaagttttgattcatggattcacccagtcattacttctagatgatgctggctcagttctggccacagccaccagctgggatgagctagaaattcaggaggaggcagagtctggcagcagtgtcacatccaagatccgactccctgcacagccgtcctggtatgtacagtccttcctgtttagtttatgccaggaaattaatcgggttggaggccatgccttgccaaaggtgacattacaggagatgctgaaaagctgtatggttcaagtagtagctgcctatgagaaactctccgaagaaaaacagattaagaaagaaggtgcatttccagtcacccagaaccgggcgctgcagctgctttatgatctgcgttacctcaacattgttctgacagccaagggtgacgaggtgaagagtggccggagcaagccagactccagaattgagaaagtgactgaccacctggaagccctcattgatccatttgacctggacgttttcacgccacacctcaacagcaaccttcatcgcctggtgcagcgaacttctgttctgtttggattggtgactggtacagagaatcagctcgccccccggagcagtacgttcaactcccaagaaccccataacatcctgccactggcatccagtcagatcaggtttggacttctcccactgagcatgacaagcactcgaaaggctaaatcaaccagaaacatcgaaacaaaagctcaggttggtgccaagagcaagaggctcatccgtggatgggtccccacctcccaccgagccacccatgatcagctcccttttaaataactgattaagaactgaatgacaaaatgcactaatgctgcttttaatggcggcgcaatagagaagtacaaggttttactagcttgagctactagaaggtgtaaaagatgcccgctgacactaccaagtagcctcttaatagaaatgtagaaaatatacaggacagggtggagatgagctcttgaatttagtagggtgaaagagttaactgccaacccggcactatcattgtacttgtttggagaaaatctgttttgttctggtgatgatggttttatcttcccttttagttgggtgggaagtaacagaaaatttgtttccccaaaagtttgacattttcttgttaatacacgtttcatttcagtacgatgccaactgttaagcctgcaggaatcctcctgggtatttctgaattgtgctgtgtgcatgtgtgtttgaaagctcaaacagcttgtcttcttacagcatcgagttgtttgctttattgttagacacaatattagcagtgtatcctttccgtattccctaccatcgaacccattaagatctaaaatccttgtcaagtatctggctttaaaagttgggagatggtagtttaaaaaaaaaaaaagctcttgcaaaaaccatccagtccctaagcatgggctatgttgcagcctcttccagaacagtttccactgcagtgatctttcagttctgcccacattaggttagcaggctgtggagagaagtgcctgtgtctacccttttcccaagacagtcctcatttccaaattctagttttgtcacaaaggctcatgctgttccgtgtcctcttcaaatctggaccgacagcaaagtcctctgactagagccatcgtgcttctcagctccgcttgtgtgtgccgtgtggactccgagtggcgtcgcgcggagggcgagtgggcaggagggctcaggccaactctaaggcacttttctctacatccaatggcaggttgtccccccggcacgctccacagctggtgacccgacagttcctggctccttgttcagacagcttgtcagtgaagaagacaacacgtctgcaccttcattattcaaacttggctggctctctagtatgactaagtaacatggcaacacatctgtctctccctaaataaatactaccacattatttcttctaaaggtgcctctgctcatctgattctcagccacaccaatctttccagtttcactgatggaatgtggccccctagttactgttgggggttactttaagcatcaagttaatccttgtcccaaaatttcacaatacttgttgctttagacatcagttcaggtagcttacattttatcagcgttcaacaacaccttaattgttgacactacaaggtggaattgtcaatgagatcatgtaagctgctgactgaccaagtttgtaggacaaaaagtcattacatattactttacttgcagaactgtgccatgtttcctactaaagtctgaggtgcagactctggtggaatagtgacacagaagttatctgggtatacaagaatctaaaagacattctccctggaaatacaaatatataacaaagagtagagactattattagggagtgtgcttcactgacagtctgaattggatctgattgttctcctgttacacaggagagagtactttcaatagaacatctacatactgagaggtagtatggcagttaatttcagtgcaagactgaatcaagcttcctatattttggaaaaaaacttatgttttttcatggaaactagatactctttactagtttattgaataaaaaaaattgaagatcccgcatttttaaaaggccctttacataaagtagagtttctagttgacagatttggaaatcagtctgaatgggacatactatggattcaacacacagaatgagttttcctcaaaccactaccttgacatagatttgataccctccctcaaaagaatcctataaaaaattgcttcaaagcccctttgaaattgcaatagtgcagcaaaaccacaagtaaacaactgcctgttaacctgttatttcaaatatagactgaaaagccaacaggcatttttcgtgtgcaatttttcttttaaaacaagttgtaagttgaaatatcaaatctgcacagcgctgtcccttcacagaaggcaagaaactgccggcacatcatgtcagaggccgccctcggtgctgtaggctgtggaagtgggcctccctcagggtctggttgatgtggaagtagaggccttggcacagcgcggactgctcgggcacgggctgaggcgtgttagggctggatccggccatggtctggctcaagctgccttccggcccgctggccctgtccgggctgttgatgctgctgctgctgctgctgctgctcccaccactgtcactgcctgaagactctgtgtcccaggaatcctgaaagacagggtttctgctacttcttttggtctgggggggaagatggttgtcttcttcgttgccattccttctccttttcctgggacggaggcgctcgctcatggcagctggcggatggaagctacgcggcgccgctccgcgaagagagggaacagagggggttgtgtttcggcggccgccacgcccaccccctcgggccttggctctcgcagccgctcgggtggacgcagccggtggcgagtacccctcagtcggacccgtaccaccactacttccggcgtctgctccgcgcccccccatgtcgctgccgccgtggtaccgccct

SEQ ID NO: 358026 - DNA, 3379 bp, Homo sapiens
agcgggcgggcgccaggcgcgcggagagcggcggctgcgcctgcgccaacgccgtcagtccgcggggcccgatcccgacacctaactccacagagaagctctgctcctaagggaaagggaagacttcagccacagtttcgcagccaacctggcgacctcacctctctggcgacctcacttcccagccggctccgtttaagaaaaccccgcgcaggaccgcgcccgccccgcctcctcgcgcccgccccctcgggtaacaaacatggcccccggcggggcggaagcgcttccgcccccaacgaagatggcggagggggggcgggactaaaagggggtaggtggatcgccgggggctgacgagtgcaccatggccaccgcggcaacctcacccgcgctgaagcggctggatctgcgcgaccctgcggctcttttcgagacgcatggagcggaggagatccgcgggctggagcgccaggttcgggccgagatcgagcacaagaaggaggagctgcggcagatggtgggcgaacggtaccgcgacctgatcgaggcggccgacaccatcggccagatgcgccgctgcgccgtggggctagtggacgccgtgaaggccaccgaccagtactgcgcccgcctccgccaggccggctcggccgcgccccggccaccgcgggcccagcagccacagcagccatcccaagagaagttctacagcatggctgcccagatcaagctactcttagaaattccggagaagatctggagctcgatggaagcctctcagtgtctccacgccacacagctctacctgctctgctgccacctccacagcctgctccagctggattcttctagttcccgatacagtcccgtcctctcccggtttcctatactcatccggcaggtggcggccgccagccacttccggtcaactattctgcatgaaagcaagatgttgctcaaatgccaaggtgtgtctgaccaagctgtggccgaggccctgtgctctataatgctcttagaagagagttctcctcgccaagccctcacagacttcctgctggccagaaaggcaactattcagaaacttctcaaccagccacaccatggtgctggtatcaaggctcagatttgctcattagtggagttgctggccaccactctgaagcaagctcatgcccttttctacactttgccagaaggactgctgccagatccagccctgccatgtggcttgctcttctctactctggagaccatcacaggccagcatcctgccggaaagggcactggtgtcctgcaggaagagatgaaactctgcagctggtttaaacacctgccagcatccatcgtcgagttccagccaacactccgaacccttgcacatcccatcagtcaggaatacctgaaagacacgctgcagaaatggatccacatgtgtaatgaagacattaaaaatgggatcaccaacctgctcatgtacgtgaagagcatgaagggtctcgcgggaatccgggacgccatgtgggagttacttaccagtgagtccaccaatcacagctgggatgtgctatgtcggcggcttctggagaagccgctcttgttctgggaagatatgatgcagcaactgttccttgaccgattacagactctgacaaaagaaggctttgactccatctccagtagctccaaggagctcttggtttcagctttgcaggaacttgaaagcagcaccagcaactccccttcaaataagcacatccactttgagtacaacatgtcgctcttcctctggtctgagagtcctaatgacctgccttccgatgcggcctgggtcagcgtggcaaaccggggtcagtttgccagtagcggcctctccatgaaagcacaagccatcagcccttgtgtacagaacttctgttctgccctggattctaagctgaaggttaaactagatgacctcctggcttacctcccctctgatgactcatcactgcccaaggacgtttctcccacacaggccaagagttctgcctttgacagatacgcagatgcggggaccgtgcaggagatgctgcggactcagtccgtggcatgcatcaagcacatcgtggactgcatccgggcagagctacagagcattgaagaaggtgtgcaagggcaacaggatgccctcaacagtgccaagctgcactcagttcttttcatggccagactctgccagtccctgggagagctgtgcccccatctgaagcagtgcatcctgggaaaatcagagagctcagagaaaccagcaagggagtttagggctctgagaaaacagggaaaggtgaaaactcaggaaatcattcctacacaggccaagtggcaagaggttaaagaagtactcctccagcagagcgtgatgggctaccaggtctggagcagtgcagttgtgaaagttttgattcatggattcacccagtcattacttctagatgatgctggctcagttctggccacagccaccagctgggatgagctagaaattcaggaggaggcagagtctggcagcagtgtcacatccaagatccgactccctgcacagccgtcctggtatgtacagtccttcctgtttagtttatgccaggaaattaatcgggttggaggccatgccttgccaaaggtgacattacaggagatgctgaaaagctgtatggttcaagtagtagctgcctatgagaaactctccgaagaaaaacagattaagaaagaaggtgcatttccagtcacccagaaccgggcgctgcagctgctttatgatctgcgttacctcaacattgttctgacagccaagggtgacgaggtgaagagtggccggagcaagccagactccagaattgagaaagtgactgaccacctggaagccctcattgatccatttgacctggacgttttcacgccacacctcaacagcaaccttcatcgcctggtgcagcgaacttctgttctgtttggattggtgactggtacagagaatcagctcgccccccggagcagtacgttcaactcccaagaaccccataacatcctgccactggcatccagtcagatcaggtaaaggctgccaagaggcttctgcggggcacttcgggaggccaaggtggacggatcacgtcaggagatcgagaccatcctggctaacatggtgaaaccctgtctctactaaaaaaaatacaaaaaattagctggcctggtggcaggtgcctatagtcccagctattcaggaggctgaggcaggagaatggcgtgaacccaggaggcggagcttgcagtgagccgagattgcgccactgcactccagcctgggcgacagaacgagactctgtctcaaaaaaaa

SEQ ID NO: 358027 - DNA, 3853 bp, Homo sapiens
agcgggcgggcgccaggcgcgcggagagcggcggctgcgcctgcgccaacgccgtcagtccgcggggcccgatcccgacacctaactccacagagaagctctgctcctaagggaaagggaagacttcagccacagtttcgcagccaacctggcgacctcacctctctggcgacctcacttcccagccggctccgtttaagaaaaccccgcgcaggaccgcgcccgccccgcctcctcgcgcccgccccctcgggtaacaaacatggcccccggcggggcggaagcgcttccgcccccaacgaagatggcggagggggggcgggactaaaagggggtaggtggatcgccgggggctgacgagtgcaccatggccaccgcggcaacctcacccgcgctgaagcggctggatctgcgcgaccctgcggctcttttcgagacgcatggagcggaggagatccgcgggctggagcgccaggttcgggccgagatcgagcacaagaaggaggagctgcggcagatggtgggcgaacggtaccgcgacctgatcgaggcggccgacaccatcggccagatgcgccgctgcgccgtggggctagtggacgccgtgaaggccaccgaccagtactgcgcccgcctccgccaggccggctcggccgcgccccggccaccgcgggcccagcagccacagcagccatcccaagagaagttctacagcatggctgcccagatcaagctactcttagaaattccggagaagatctggagctcgatggaagcctctcagtgtctccacgccacacagctctacctgctctgctgccacctccacagcctgctccagctggattcttctagttcccgatacagtcccgtcctctcccggtttcctatactcatccggcaggtggcggccgccagccacttccggtcaactattctgcatgaaagcaagatgttgctcaaatgccaaggtgtgtctgaccaagctgtggccgaggccctgtgctctataatgctcttagaagagagttctcctcgccaagccctcacagacttcctgctggccagaaaggcaactattcagaaacttctcaaccagccacaccatggtgctggtatcaaggctcagatttgctcattagtggagttgctggccaccactctgaagcaagctcatgcccttttctacactttgccagaaggactgctgccagatccagccctgccatgtggcttgctcttctctactctggagaccatcacaggccagcatcctgccggaaagggcactggtgtcctgcaggaagagatgaaactctgcagctggtttaaacacctgccagcatccatcgtcgagttccagccaacactccgaacccttgcacatcccatcagtcaggaatacctgaaagacacgctgcagaaatggatccacatgtgtaatgaagacattaaaaatgggatcaccaacctgctcatgtacgtgaagagcatgaagggtctcgcgggaatccgggacgccatgtgggagttacttaccagtgagtccaccaatcacagctgggatgtgctatgtcggcggcttctggagaagccgctcttgttctgggaagatatgatgcagcaactgttccttgaccgattacagactctgacaaaagaaggctttgactccatctccagtagctccaaggagctcttggtttcagctttgcaggaacttgaaagcagcaccagcaactccccttcaaataagcacatccactttgagtacaacatgtcgctcttcctctggtctgagagtcctaatgacctgccttccgatgcggcctgggtcagcgtggcaaaccggggtcagtttgccagtagcggcctctccatgaaagcacaagccatcagcccttgtgtacagaacttctgttctgccctggattctaagctgaaggttaaactagatgacctcctggcttacctcccctctgatgactcatcactgcccaaggacgtttctcccacacaggccaagagttctgcctttgacagatacgcagatgcggggaccgtgcaggagatgctgcggactcagtccgtggcatgcatcaagcacatcgtggactgcatccgggcagagctacagagcattgaagaaggtgtgcaagggcaacaggatgccctcaacagtgccaagctgcactcagttcttttcatggccagactctgccagtccctgggagagctgtgcccccatctgaagcagtgcatcctgggaaaatcagagagctcagagaaaccagcaagggagtttagggctctgagaaaacagggaaaggtgaaaactcaggaaatcattcctacacaggccaagtggcaagaggttaaagaagtactcctccagcagagcgtgatgggctaccaggtctggagcagtgcagttgtgaaagttttgattcatggattcacccagtcattacttctagatgatgctggctcagttctggccacagccaccagctgggatgagctagaaattcaggaggaggcagagtctggcagcagtgtcacatccaagatccgactccctgcacagccgtcctggtatgtacagtccttcctgtttagtttatgccaggaaattaatcgggttggaggccatgccttgccaaaggtgacattacaggagatgctgaaaagctgtatggttcaagtagtagctgcctatgagaaactctccgaagaaaaacagattaagaaagaaggtgcatttccagtcacccagaaccgggcgctgcagctgctttatgatctgcgttacctcaacattgttctgacagccaagggtgacgaggtgaagagtggccggagcaagccagactccaggtgtcgtatcctctagggagctatgtcaaggcggtctcttccaaaagcaaatagtccctttgctgggaagccaccagagtcagcctgttatactgcacattcattgtgtttgttttgaacagtaagtgctcatattaccagcaagttaaataatggccgcctgctggataaatgcaatggtcaagtgaaataggtggactcttattcccctctcttctgagtcagcctagcagctgctgagtatcatttgagcccttagtgccctccttatagacagaacagggggaaagggtggacttcacttagacatcatgcttgagggtgacttaagcactatcatcagtgacaaacgtactaagccagcaactaagtagaataaaacccaactccaagatttctacagcagtaggatatcataagattgtttttgatcctaaaaaatgtggacagtaatgatcctaatccttttctcagaattgagaaagtgactgaccacctggaagccctcattgatccatttgacctggacgttttcacgccacacctcaacagcaaccttcatcgcctggtgcagcgaacttctgttctgtttggattggtgactggtacagagaatcagctcgccccccggagcagtacgttcaactcccaagaaccccataacatcctgccactggcatccagtcagatcaggtaaaggctgccaagaggcttctgcggggcacttcgggaggccaaggtggacggatcacgtcaggagatcgagaccatcctggctaacatggtgaaaccctgtctctactaaaaaaaatacaaaaaattagctggcctggtggcaggtgcctatagtcccagctattcaggaggctgaggcaggagaatggcgtgaacccaggaggcggagcttgcagtgagccgagattgcgccactgcactccagcctgggcgacagaacgagactctgtctcaaaaaaaa

SEQ ID NO: 358028 - DNA, 2489 bp, Homo sapiens
agcgggcgggcgccaggcgcgcggagagcggcggctgcgcctgcgccaacgccgtcagtccgcggggcccgatcccgacacctaactccacagagaagctctgctcctaagggaaagggaagacttcagccacagtttcgcagccaacctggcgacctcacctctctggcgacctcacttcccagccggctccgtttaagaaaaccccgcgcaggaccgcgcccgccccgcctcctcgcgcccgccccctcgggtaacaaacatggcccccggcggggcggaagcgcttccgcccccaacgaagatggcggagggggggcgggactaaaagggggtaggtggatcgccgggggctgacgagtgcaccatggccaccgcggcaacctcacccgcgctgaagcggctggatctgcgcgaccctgcggctcttttcgagacgcatggagcggaggagatccgcgggctggagcgccaggttcgggccgagatcgagcacaagaaggaggagctgcggcagatggtgggcgaacggtaccgcgacctgatcgaggcggccgacaccatcggccagatgcgccgctgcgccgtggggctagtggacgccgtgaaggccaccgaccagtactgcgcccgcctccgccaggccggctcggccgcgccccggccaccgcgggcccagcagccacagcagccatcccaagagaagttctacagcatggctgcccagatcaagctactcttagaaattccggagaagatctggagctcgatggaagcctctcagtgtctccacgccacacagctctacctgctctgctgccacctccacagcctgctccagctggattcttctagttcccgatacagtcccgtcctctcccggtttcctatactcatccggcaggtggcggccgccagccacttccggtcaactattctgcatgaaagcaagatgttgctcaaatgccaaggtgtgtctgaccaagctgtggccgaggccctgtgctctataatgctcttagaagagagttctcctcgccaagccctcacagacttcctgctggccagaaaggcaactattcagaaacttctcaaccagccacaccatggtgctggtatcaaggctcagatttgctcattagtggagttgctggccaccactctgaagcaagctcatgcccttttctacactttgccagaaggactgctgccagatccagccctgccatgtggcttgctcttctctactctggagaccatcacaggccagcatcctgccggaaagggcactggtgtcctgcaggaagagatgaaactctgcagctggtttaaacacctgccagcatccatcgtcgagttccagccaacactccgaacccttgcacatcccatcagtcaggaatacctgaaagacacgctgcagaaatggatccacatgtgtaatgaagacattaaaaatgggatcaccaacctgctcatgtacgtgaagagcatgaagggtctcgcgggaatccgggacgccatgtgggagttacttaccagtgagtccaccaatcacagctgggatgtgctatgtcggcggcttctggagaagccgctcttgttctgggaagatatgatgcagcaactgttccttgaccgattacagactctgacaaaagaaggctttgactccatctccagtagctccaaggagctcttggtttcagctttgcaggaacttgaaagcagcaccagcaactccccttcaaataagcacatccactttgagtacaacatgtcgctcttcctctggtctgagagtcctaatgacctgccttccgatgcggcctgggtcagcgtggcaaaccggggtcagtttgccagtagcggcctctccatgaaagcacaagccatcagcccttgtgtacagaacttctgttctgccctggattctaagctgaaggttaaactagatgacctcctggcttacctcccctctgatgactcatcactgcccaaggacgtttctcccacacaggccaagagttctgcctttgacagatacgcagatgcggggaccgtgcaggagatgctgcggactcagtccgtggcatgcatcaagcacatcgtggactgcatccgggcagagctacagagcattgaagaaggtgtgcaagggcaacaggatgccctcaacagtgccaagctgcactcagttcttttcatggccagactctgccagtccctgggagagctgtgcccccatctgaagcagtgcatcctgggaaaatcagagagctcagagaaaccagcaagggagtttagggctctgagaaaacagggaaaggtgaaaactcaggaaatcattcctacacaggccaagtggcaagaggttaaagaagtactcctccagcagagcgtgatgggctaccaggtctggagcagtgcagttgtgaaatggatcatggattcacccggtctggcgcagtgtccttccaggatcggtc

SEQ ID NO: 358029 - DNA, 498 bp, Homo sapiens
cggtaagtggatccagcgcaaagagctgctctggtggtggccaggcttcacattacgggtttatggcgtttgtcttctttcctgatgtaccaaagctctttacccaagatgtgaaaaacaccctggcgacttctgtcatcatttttctaggtcaactattctgcatgaaagcaagatgttgctcaaatgccaaggtgtgtctgaccaagctgtggccgaggccctgtgctctataatgctcttagaagagagttctcctcgccaagccctcacagacttcctgctggccagaaaggcaactattcagaaacttctcaaccagccacaccatggtgggtgtggcttctggccaacatttggtccttaaatatgggatggagaagggtgagctgcgggagactgaagcctccagagcgtcctctgtctttcactttgggaaaggtaattgtttcaaagaggatggtttcttcttttaggtgctggtatcaaggctcagat

SEQ ID NO: 358030 - DNA, 2000 bp, Homo sapiens
agcgggtcatcagttctcgcccgtctgggcgtgggcgtggccggcgtggctgctcgggaccacccgaacccgcggccatggccccggccgccgccagccccccggaggtgatccgcgcggcgcagaaggacgagtactaccgcggtgggctgcggagcgcggcgggcggcgccctgcacagcctggcgggtgcgaggaagtggctggagtggaggaaggaggttgagctgctctcagatgtggcctactttggcctcaccacacttgcaggctaccagaccctgggggaggagtacgtcagcatcatccaggtggacccatcgcggatacatgtgccctcctcgctgcgccgtggcgtgctggtgacgctgcatgccgtcctgccctacctgctggacaaggccctgctccccctggagcaggagctgcaggctgaccccgacagtgggcgacccttgcaggggagcctggggccaggtgggcgtggctgctcaggggcgcggcgctggatgcgtcaccacacggccaccctgactgagcagcagaggagggcgctgctgcgggcggtcttcgtcctcagacagggcctcgcctgcctccagcggctacatgttgcctggttttacatccacggtgtcttctaccacctggccaagaggctcacggggatcacgtacctccgtgtccgcagcctgcccggagaggacctgagggcccgtgttagctacaggctgctgggggtcatctcactgctgcacctggtgctgtccatggggctgcagctgtacggtttcaggcagcggcagcgagccaggaaggagtggaggctgcaccgcggcctgtctcaccgcagggcctccttggaggagagagccgtttccagaaaccccctgtgcaccctgtgcctggaggagcgcaggcacccaacagccacgccctgcggccacctgttctgctgggagtgcatcaccgcgtggtgcagcagcaaggcggagtgtcccctctgccgggagaagttccctccccagaagctcatctaccttcggcactaccgctgagccggcgcccgggtgggcctggacacagatgacctctacgggagtctgaacgccaagatttagtctcaggattaaccttgcttgcacagaagttagaacactctcagttttttgtcatgtaagatactaacctagccaccctgggagagaacagaaagctgtccctggctgcgctttctcagccctgggaggggcgcctgaacccagaacatttccctaaccccaacctggtaggactcagccacttcttcaggaatttcacttatttggacgggattttaggtttccctcccttccccaaaccatacagttgagaagtaattcagaagtaggccagaagacactttattcgtttatattgtgagaaaacagccccatcaggcttgtgttaaggcaatggactgaatgagtgcgtgctgggtggggtggggcacggaggctggcgggttgcttcagccagtgcagtgagaacagcagccccacggccccatgggaggcggcgctgctctccccgagggcggctgggcagagcacatcccccaggacttgatgaccacacggggcagagagaaaccaaccaaggccagcacctccgtcggaagcatttggcacacacaccttcaatacacgtcaaggtcgcttccagttttagaaaacagaaatctgcatctcagcctgagacgcacagagaggtctcttcctgacccagacgcactcacgagccaggtcctgggggtatgggggctgccaggggcgcccgagccctctcctggggggcctgctgggcaggcgacctgctgacccacggtcactgctgtgttcagcccctcagctcggccccagcctatttcccgcctccatttgatgtttccaggttttcaaaactgcatttaacctgcgccagagagttcaccgtaggcatctttaataaactaactccag

SEQ ID NO: 358031 - DNA, 145 bp, Homo sapiens
ctggggccgagctgaggggctgaacacagcagtgaccgtgggtcagcctatttcccgcctccatttgatgtttccaggttttcaaaactgcatttaacctgcgccagagagttcaccgtaggcatctttaataaactaactccag

SEQ ID NO: 358032 - DNA, 3202 bp, Homo sapiens
agcgggtcatcagttctcgcccgtctgggcgtgggcgtggccggcgtggctgctcgggaccacccgaacccgcggccatggccccggccgccgccagccccccggaggtgatccgcgcggcgcagaaggacgagtactaccgcggtgggctgcggagcgcggcgggcggcgccctgcacagcctggcgggtgcgaggaagtggctggagtggaggaaggaggttgagctgctctcagatgtggcctactttggcctcaccacacttgcaggctaccagaccctgggggaggagtacgtcagcatcatccaggtggacccatcgcggatacatgtgccctcctcgctgcgccgtggcgtgctggtgacgctgcatgccgtcctgccctacctgctggacaaggccctgctccccctggagcaggagctgcaggctgaccccgacagtgggcgacccttgcaggggagcctggggccaggtgggcgtggctgctcaggggcgcggcgctggatgcgtcaccacacggccaccctgactgagcagcagaggagggcgctgctgcgggcggtcttcgtcctcagacagggcctcgcctgcctccagcggctacatgttgcctggttttacatccacggtgtcttctaccacctggccaagaggctcacggggatcacgtacctccgtgtccgcagcctgcccggagaggacctgagggcccgtgttagctacaggctgctgggggtcatctcactgctgcacctggtgctgtccatggggctgcagctgtacggtttcaggcagcggcagcgagccaggaaggagtggaggctgcaccgcggcctgtctcaccgcagggcctccttggaggagagagccgtttccagaaaccccctgtgcaccctgtgcctggaggagcgcaggcacccaacagccacgccctgcggccacctgttctgctgggagtgcatcaccgcgtggtgcagcagcaaggcggagtgtcccctctgccgggagaagttccctccccagaagctcatctaccttcggcactaccgctgagccggcgcccgggtgggcctggacacagatgacctctacgggagtctgaacgccaagatttagtctcaggattaaccttgcttgcacagaagttagaacactctcagttttttgtcatgtaagatactaacctagccaccctgggagagaacagaaagctgtccctggctgcgctttctcagccctgggaggggcgcctgaacccagaacatttccctaaccccaacctggtaggactcagccacttcttcaggaatttcacttatttggacgggattttaggtttccctcccttccccaaaccatacagttgagaagtaattcagaagtaggccagaagacactttattcgtttatattgtgagaaaacagccccatcaggcttgtgttaaggcaatggactgaatgagtgcgtgctgggtggggtggggcacggaggctggcgggttgcttcagccagtgcagtgagaacagcagccccacggccccatgggaggcggcgctgctctccccgagggcggctgggcagagcacatcccccaggacttgatgaccacacggggcagagagaaaccaaccaaggccagcacctccgtcggaagcatttggcacacacaccttcaatacacgtcaaggtcgcttccagttttagaaaacagaaatctgcatctcagcctgagacgcacagagaggtctcttcctgacccagacgcactcacgagccaggtcctgggggtatgggggctgccaggggcgcccgagccctctcctggggggcctgctgggcaggcgacctgctgacccacggtcactgctgtgttcagcccctcagctcggccccagcctatttcccgcctccatttgatgtttccaggttttcaaaactgcatttaacctgcgccagagagttcaccgtaggcatctttaataaactaactccagcaaaatgtgggtacgttactaacacaagatggaacttgagatttcctgaagcgcagtgttaaaatgcctcgagggcgtgtgccacatttccctgctgacgtaaaacacctggccagcaggaccggcttccggcaaagacccgcgcaaaccatgtcttgctgtttgacttacttaggaatgaggatgaccctgtattcctgggttagtcaaggtcagcttgccagagacggaggagggcgggggggccgtgaccctctagactgggaggaccaccaggagaggcactgggggctgcggccgggtgggcagatgccgccgtggctccatccatcagcacccagtcctttgcttcactgtgctctggccaagcgcgtgcgacttcctgtcacaccttaggcctgagcgcttattaagaaaacagtatgaaaaatgacaaacactcctgtccacagtctgagaatcccaagtgtctcaacacggtaccagaagtaccacctgggagcagcactggctatcttgggtcagggacacacaagcttgaacgtggcctcttagaggagctcgatgtcagatatgtaaacactggcacaagaaaatccagacactaagcattcaccgtgtcaattctgagacaggaaacaccgcccagagtgaggagcctgcgcagcccggggcccaggaggagaggccttcactcgcatgtcagtgtctcatctgggaccacagctgtgatgttctgctgtgcaatatgggtcacctttcgaaaaggccaaacaaaaggtgggctttcctgtgtccagcgactgccatgttttaggtaaagactttagtaaaggtggaggtaaaatcacttggtaaaacgttgagagtatttcttttctcgaatcaaaaacgctgacatgcaagtgggttccgcctctcccgcagtggggggccgagtgctgaacctacaaagccagtctgctccctgccagcttcgctgcccctcatggagggttgcatgaggacagatttaaattaaaaacaaaacactctacgtatcaaagaaatgtgtcaaaataatctcaaacaattaaaatataatatatatttataattccgggccctcaaagcaatcatggtagttaagaaccaagttttgagtcattaggatagaggccaactttaaacatctccagtgagatggaattaggaaactggca

SEQ ID NO: 358033 - DNA, 2602 bp, Homo sapiens
agcgggtcatcagttctcgcccgtctgggcgtgggcgtggccggcgtggctgctcgggaccacccgaacccgcggccatggccccggccgccgccagccccccggaggtgatccgcgcggcgcagaaggacgagtactaccgcggtgggctgcggagcgcggcgggcggcgccctgcacagcctggcgggtgcgaggaagtggctggagtggaggaaggaggttgagctgctctcagatgtggcctactttggcctcaccacacttgcaggctaccagaccctgggggaggagtacgtcagcatcatccaggtggacccatcgcggatacatgtgccctcctcgctgcgccgtggcgtgctggtgacgctgcatgccgtcctgccctacctgctggacaaggccctgctccccctggagcaggagctgcaggctgaccccgacagtgggcgacccttgcaggggagcctggggccaggtgggcgtggctgctcaggggcgcggcgctggatgcgtcaccacacggccaccctgactgagcagcagaggagggcgctgctgcgggcggtcttcgtcctcagacagggcctcgcctgcctccagcggctacatgttgcctggttttacatccacggtgtcttctaccacctggccaagaggctcacggggatcacgtacctccgtgtccgcagcctgcccggagaggacctgagggcccgtgttagctacaggctgctgggggtcatctcactgctgcacctggtgctgtccatggggctgcagctgtacggtttcaggcagcggcagcgagccaggaaggagtggaggctgcaccgcggcctgtctcaccgcagggcctccttggaggagagagccgtttccagaaaccccctgtgcaccctgtgcctggaggagcgcaggcacccaacagccacgccctgcggccacctgttctgctgggagtgcatcaccgcgtggtgcagcagcaaggcggagtgtcccctctgccgggagaagttccctccccagaagctcatctaccttcggcactaccgctgagccggcgcccgggtgggcctggacacagatgacctctacgggagtctgaacgccaagatttagtctcaggattaaccttgcttgcacagaagttagaacactctcagttttttgtcatgtaagatactaacctagccaccctgggagagaacagaaagctgtccctggctgcgctttctcagccctgggaggggcgcctgaacccagaacatttccctaaccccaacctggtaggactcagccacttcttcaggaatttcacttatttggacgggattttaggtttccctcccttccccaaaccatacagttgagaagtaattcagaagtaggccagaagacactttattcgtttatattgtgagaaaacagccccatcaggcttgtgttaaggcaatggactgaatgagtgcgtgctgggtggggtggggcacggaggctggcgggttgcttcagccagtgcagtgagaacagcagccccacggccccatgggaggcggcgctgctctccccgagggcggctgggcagagcacatcccccaggacttgatgaccacacggggcagagagaaaccaaccaaggccagcacctccgtcggaagcatttggcacacacaccttcaatacacgtcaaggtcgcttccagttttagaaaacagaaatctgcatctcagcctgagacgcacagagaggtctcttcctgacccagacgcactcacgagccaggtcctgggggtatgggggctgccaggggcgcccgagccctctcctggggggcctgctgggcaggcgacctgctgacccacggtcactgctgtgttcagcccctcagctcggccccagcctatttcccgcctccatttgatgtttccaggttttcaaaactgcatttaacctgcgccagagagttcaccgtaggcatctttaataaactaactccagcaaaatgtgggtacgttactaacacaagatggaacttgagatttcctgaagcgcagtgttaaaatgcctcgagggcgtgtgccacatttccctgctgacgtaaaacacctggccagcaggaccggcttccggcaaagacccgcgcaaaccatgtcttgctgtttgacttacttaggaatgaggatgaccctgtattcctgggttagtcaaggtcagcttgccagagacggaggagggcgggggggccgtgaccctctagactgggaggaccaccaggagaggcactgggggctgcggccgggtgggcagatgccgccgtggctccatccatcagcacccagtcctttgcttcactgtgctctggccaagcgcgtgcgacttcctgtcacaccttaggcctgagcgcttattaagaaaacagtatgaaaaatgacaaacactcctgtccacagtctgagaatcccaagtgtctcaacacggtagtcctcctccgtctcttggcaagctgaccttgactaacccaggaatacagggtcatcctcattcctaagtaagtacacagcagaacatgtcttcgggtcgtgtaagatcctgtagagtct

SEQ ID NO: 358034 - DNA, 3214 bp, Homo sapiens
cccacagctgagctcctgtagatggaaccagaggtgaggcaaggaactggaggccctccccactgaggtcagcggggcgcagacgcccccttgtcgtgccctgccttcctcctgcaatcctgcaggactctccagggccaagtgctgcccttggggccaaaaaacagggccttctccttcacctgccctgcagccattcaggtgcgaggaagtggctggagtggaggaaggaggttgagctgctctcagatgtggcctactttggcctcaccacacttgcaggctaccagaccctgggggaggagtacgtcagcatcatccaggtggacccatcgcggatacatgtgccctcctcgctgcgccgtggcgtgctggtgacgctgcatgccgtcctgccctacctgctggacaaggccctgctccccctggagcaggagctgcaggctgaccccgacagtgggcgacccttgcaggggagcctggggccaggtgggcgtggctgctcaggggcgcggcgctggatgcgtcaccacacggccaccctgactgagcagcagaggagggcgctgctgcgggcggtcttcgtcctcagacagggcctcgcctgcctccagcggctacatgttgcctggttttacatccacggtgtcttctaccacctggccaagaggctcacggggatcacgtacctccgtgtccgcagcctgcccggagaggacctgagggcccgtgttagctacaggctgctgggggtcatctcactgctgcacctggtgctgtccatggggctgcagctgtacggtttcaggcagcggcagcgagccaggaaggagtggaggctgcaccgcggcctgtctcaccgcagggcctccttggaggagagagccgtttccagaaaccccctgtgcaccctgtgcctggaggagcgcaggcacccaacagccacgccctgcggccacctgttctgctgggagtgcatcaccgcgtggtgcagcagcaaggcggagtgtcccctctgccgggagaagttccctccccagaagctcatctaccttcggcactaccgctgagccggcgcccgggtgggcctggacacagatgacctctacgggagtctgaacgccaagatttagtctcaggattaaccttgcttgcacagaagttagaacactctcagttttttgtcatgtaagatactaacctagccaccctgggagagaacagaaagctgtccctggctgcgctttctcagccctgggaggggcgcctgaacccagaacatttccctaaccccaacctggtaggactcagccacttcttcaggaatttcacttatttggacgggattttaggtttccctcccttccccaaaccatacagttgagaagtaattcagaagtaggccagaagacactttattcgtttatattgtgagaaaacagccccatcaggcttgtgttaaggcaatggactgaatgagtgcgtgctgggtggggtggggcacggaggctggcgggttgcttcagccagtgcagtgagaacagcagccccacggccccatgggaggcggcgctgctctccccgagggcggctgggcagagcacatcccccaggacttgatgaccacacggggcagagagaaaccaaccaaggccagcacctccgtcggaagcatttggcacacacaccttcaatacacgtcaaggtcgcttccagttttagaaaacagaaatctgcatctcagcctgagacgcacagagaggtctcttcctgacccagacgcactcacgagccaggtcctgggggtatgggggctgccaggggcgcccgagccctctcctggggggcctgctgggcaggcgacctgctgacccacggtcactgctgtgttcagcccctcagctcggccccagcctatttcccgcctccatttgatgtttccaggttttcaaaactgcatttaacctgcgccagagagttcaccgtaggcatctttaataaactaactccagcaaaatgtgggtacgttactaacacaagatggaacttgagatttcctgaagcgcagtgttaaaatgcctcgagggcgtgtgccacatttccctgctgacgtaaaacacctggccagcaggaccggcttccggcaaagacccgcgcaaaccatgtcttgctgtttgacttacttaggaatgaggatgaccctgtattcctgggttagtcaaggtcagcttgccagagacggaggagggcgggggggccgtgaccctctagactgggaggaccaccaggagaggcactgggggctgcggccgggtgggcagatgccgccgtggctccatccatcagcacccagtcctttgcttcactgtgctctggccaagcgcgtgcgacttcctgtcacaccttaggcctgagcgcttattaagaaaacagtatgaaaaatgacaaacactcctgtccacagtctgagaatcccaagtgtctcaacacggtaccagaagtaccacctgggagcagcactggctatcttgggtcagggacacacaagcttgaacgtggcctcttagaggagctcgatgtcagatatgtaaacactggcacaagaaaatccagacactaagcattcaccgtgtcaattctgagacaggaaacaccgcccagagtgaggagcctgcgcagcccggggcccaggaggagaggccttcactcgcatgtcagtgtctcatctgggaccacagctgtgatgttctgctgtgcaatatgggtcacctttcgaaaaggccaaacaaaaggtgggctttcctgtgtccagcgactgccatgttttaggtaaagactttagtaaaggtggaggtaaaatcacttggtaaaacgttgagagtatttcttttctcgaatcaaaaacgctgacatgcaagtgggttccgcctctcccgcagtggggggccgagtgctgaacctacaaagccagtctgctccctgccagcttcgctgcccctcatggagggttgcatgaggacagatttaaattaaaaacaaaacactctacgtatcaaagaaatgtgtcaaaataatctcaaacaattaaaatataatatatatttataattccgggccctcaaagcaatcatggtagttaagaaccaagttttgagtcattaggatagaggccaactttaaacatctccagtgagatggaattaggaaactggca

SEQ ID NO: 358035 - DNA, 2852 bp, Homo sapiens
agctaggtacgaggctgggtgtgaatcggccgaggctacctgctggacaaggccctgctccccctggagcaggagctgcaggctgaccccgacagtgggcgacccttgcaggggagcctggggccaggtgggcgtggctgctcaggggcgcggcgctggatgcgtcaccacacggccaccctgactgagcagcagaggagggcgctgctgcgggcggtcttcgtcctcagacagggcctcgcctgcctccagcggctacatgttgcctggttttacatccacggtgtcttctaccacctggccaagaggctcacggggatcacgtacctccgtgtccgcagcctgcccggagaggacctgagggcccgtgttagctacaggctgctgggggtcatctcactgctgcacctggtgctgtccatggggctgcagctgtacggtttcaggcagcggcagcgagccaggaaggagtggaggctgcaccgcggcctgtctcaccgcagggcctccttggaggagagagccgtttccagaaaccccctgtgcaccctgtgcctggaggagcgcaggcacccaacagccacgccctgcggccacctgttctgctgggagtgcatcaccgcgtggtgcagcagcaaggcggagtgtcccctctgccgggagaagttccctccccagaagctcatctaccttcggcactaccgctgagccggcgcccgggtgggcctggacacagatgacctctacgggagtctgaacgccaagatttagtctcaggattaaccttgcttgcacagaagttagaacactctcagttttttgtcatgtaagatactaacctagccaccctgggagagaacagaaagctgtccctggctgcgctttctcagccctgggaggggcgcctgaacccagaacatttccctaaccccaacctggtaggactcagccacttcttcaggaatttcacttatttggacgggattttaggtttccctcccttccccaaaccatacagttgagaagtaattcagaagtaggccagaagacactttattcgtttatattgtgagaaaacagccccatcaggcttgtgttaaggcaatggactgaatgagtgcgtgctgggtggggtggggcacggaggctggcgggttgcttcagccagtgcagtgagaacagcagccccacggccccatgggaggcggcgctgctctccccgagggcggctgggcagagcacatcccccaggacttgatgaccacacggggcagagagaaaccaaccaaggccagcacctccgtcggaagcatttggcacacacaccttcaatacacgtcaaggtcgcttccagttttagaaaacagaaatctgcatctcagcctgagacgcacagagaggtctcttcctgacccagacgcactcacgagccaggtcctgggggtatgggggctgccaggggcgcccgagccctctcctggggggcctgctgggcaggcgacctgctgacccacggtcactgctgtgttcagcccctcagctcggccccagcctatttcccgcctccatttgatgtttccaggttttcaaaactgcatttaacctgcgccagagagttcaccgtaggcatctttaataaactaactccagcaaaatgtgggtacgttactaacacaagatggaacttgagatttcctgaagcgcagtgttaaaatgcctcgagggcgtgtgccacatttccctgctgacgtaaaacacctggccagcaggaccggcttccggcaaagacccgcgcaaaccatgtcttgctgtttgacttacttaggaatgaggatgaccctgtattcctgggttagtcaaggtcagcttgccagagacggaggagggcgggggggccgtgaccctctagactgggaggaccaccaggagaggcactgggggctgcggccgggtgggcagatgccgccgtggctccatccatcagcacccagtcctttgcttcactgtgctctggccaagcgcgtgcgacttcctgtcacaccttaggcctgagcgcttattaagaaaacagtatgaaaaatgacaaacactcctgtccacagtctgagaatcccaagtgtctcaacacggtaccagaagtaccacctgggagcagcactggctatcttgggtcagggacacacaagcttgaacgtggcctcttagaggagctcgatgtcagatatgtaaacactggcacaagaaaatccagacactaagcattcaccgtgtcaattctgagacaggaaacaccgcccagagtgaggagcctgcgcagcccggggcccaggaggagaggccttcactcgcatgtcagtgtctcatctgggaccacagctgtgatgttctgctgtgcaatatgggtcacctttcgaaaaggccaaacaaaaggtgggctttcctgtgtccagcgactgccatgttttaggtaaagactttagtaaaggtggaggtaaaatcacttggtaaaacgttgagagtatttcttttctcgaatcaaaaacgctgacatgcaagtgggttccgcctctcccgcagtggggggccgagtgctgaacctacaaagccagtctgctccctgccagcttcgctgcccctcatggagggttgcatgaggacagatttaaattaaaaacaaaacactctacgtatcaaagaaatgtgtcaaaataatctcaaacaattaaaatataatatatatttataattccgggccctcaaagcaatcatggtagttaagaaccaagttttgagtcattaggatagaggccaactttaaacatctccagtgagatggaattaggaaactggca

SEQ ID NO: 358036 - DNA, 2978 bp, Homo sapiens
agcgggtcatcagttctcgcccgtctgggcgtgggcgtggccggcgtggctgctcgggaccacccgaacccgcggccatggccccggccgccgccagccccccggaggtgatccgcgcggcgcagaaggacgagtactaccgcggtgggctgcggagcgcggcgggcggcgccctgcacagcctggcgggtgcgaggaagtggctggagtggaggaaggaggttgagctgctctcagatgtggcctactttggcctcaccacacttgcaggctaccagaccctgggggaggagtacgtcagcatcatccaggtggacccatcgcggatacatgtgccctcctcgctgcgccgtggcgtgctggtgacgctgcatgccgtcctgccctacctgctggacaaggccctgctccccctggagcaggagctgcaggctgaccccgacagtgggcgacccttgcaggggagcctggggccaggtgggcgtggctgctcaggggcgcggcgctggatgcgtcaccacacggccaccctgactgagcagcagaggagggcgctgctgcgggcggtcttcgtcctcagacagggcctcgcctgcctccagcggctacatgttgcctggttttacatccacggtgtcttctaccacctggccaagaggctcacggggatcacgtacctccgtgtccgcagcctgcccggagaggacctgagggcccgtgttagctacaggctgctgggggtcatctcactgctgcacctggtgctgtccatggggctgcagctgtacggtttcaggcagcggcagcgagccaggaaggagtggaggctgcaccgcggcctgtctcaccgcagggcctccttggaggagagagccgtttccagaaaccccctgtgcaccctgtgcctggaggagcgcaggcacccaacagccacgccctgcggccacctgttctgctgggagtgcatcaccgcgtggtgcagcagcaaggcggagtgtcccctctgccgggagaagttccctccccagaagctcatctaccttcggcactaccgctgagccggcgcccgggtgggcctggacacagatgacctctacgggagtctgaacgccaagatttagtctcaggattaaccttgcttgcacagaagttagaacactctcagttttttgtcatgtaagatactaacctagccaccctgggagagaacagaaagctgtccctggctgcgctttctcagccctgggaggggcgcctgaacccagaacatttccctaaccccaacctggtaggactcagccacttcttcaggaatttcacttatttggacgggattttaggtttccctcccttccccaaaccatacagttgagaagtaattcagaagtaggccagaagacactttattcgtttatattgtgagaaaacagccccatcaggcttgtgttaaggcaatggactgaatgagtgcgtgctgggtggggtggggcacggaggctggcgggttgcttcagccagtgcagtgagaacagcagccccacggccccatgggaggcggcgctgctctccccgagggcggctgggcagagcacatcccccaggacttgatgaccacacggggcagagagaaaccaaccaaggccagcacctccgtcggaagcatttggcacacacaccttcaatacacgtcaaggtcgcttccagttttagaaaacagaaatcatttaacctgcgccagagagttcaccgtaggcatctttaataaactaactccagcaaaatgtgggtacgttactaacacaagatggaacttgagatttcctgaagcgcagtgttaaaatgcctcgagggcgtgtgccacatttccctgctgacgtaaaacacctggccagcaggaccggcttccggcaaagacccgcgcaaaccatgtcttgctgtttgacttacttaggaatgaggatgaccctgtattcctgggttagtcaaggtcagcttgccagagacggaggagggcgggggggccgtgaccctctagactgggaggaccaccaggagaggcactgggggctgcggccgggtgggcagatgccgccgtggctccatccatcagcacccagtcctttgcttcactgtgctctggccaagcgcgtgcgacttcctgtcacaccttaggcctgagcgcttattaagaaaacagtatgaaaaatgacaaacactcctgtccacagtctgagaatcccaagtgtctcaacacggtaccagaagtaccacctgggagcagcactggctatcttgggtcagggacacacaagcttgaacgtggcctcttagaggagctcgatgtcagatatgtaaacactggcacaagaaaatccagacactaagcattcaccgtgtcaattctgagacaggaaacaccgcccagagtgaggagcctgcgcagcccggggcccaggaggagaggccttcactcgcatgtcagtgtctcatctgggaccacagctgtgatgttctgctgtgcaatatgggtcacctttcgaaaaggccaaacaaaaggtgggctttcctgtgtccagcgactgccatgttttaggtaaagactttagtaaaggtggaggtaaaatcacttggtaaaacgttgagagtatttcttttctcgaatcaaaaacgctgacatgcaagtgggttccgcctctcccgcagtggggggccgagtgctgaacctacaaagccagtctgctccctgccagcttcgctgcccctcatggagggttgcatgaggacagatttaaattaaaaacaaaacactctacgtatcaaagaaatgtgtcaaaataatctcaaacaattaaaatataatatatatttataattccgggccctcaaagcaatcatggtagttaagaaccaagttttgagtcattaggatagaggccaactttaaacatctccagtgagatggaattaggaaactggca

SEQ ID NO: 358037 - DNA, 2994 bp, Homo sapiens
agcgggtcatcagttctcgcccgtctgggcgtgggcgtggccggcgtggctgctcgggaccacccgaacccgcggccatggccccggccgccgccagccccccggaggtgatccgcgcggcgcagaaggacgagtactaccgcggtgggctgcggagcgcggcgggcggcgccctgcacagcctggcgggtgcgaggaagtggctggagtggaggaaggaggttgagctgctctcagatgtggcctactttggcctcaccacacttgcaggctaccagaccctgggggaggagtacgtcagcatcatccaggtggacccatcgcggatacatgtgccctcctcgctgcgccgtggcgtgctggtgacgctgcatgccgtcctgccctacctgctggacaaggccctgctccccctggagcaggagctgcaggctgaccccgacagtgggcgacccttgcaggggagcctggggccaggtgggcgtggctgctcaggggcgcggcgctggatgcgtcaccacacggccaccctgactgagcagcagaggagggcgctgctgcgggcggtcttcgtcctcagacagggcctcgcctgcctccagcggctacatgttgcctggttttacatccacggtgtcttctaccacctggccaagaggctcacggggatcacgtacctccgtgtccgcagcctgcccggagaggacctgagggcccgtgttagctacaggctgctgggggtcatctcactgctgcacctggtgctgtccatggggctgcagctgtacggtttcaggcagcggcagcgagccaggaaggagtggaggctgcaccgcggcctgtctcaccgcagggcctccttggaggagagagccgtttccagaaaccccctgtgcaccctgtgcctggaggagcgcaggcacccaacagccacgccctgcggccacctgttctgctgggagtgcatcaccgcgtggtgcagcagcaaggcggagtgtcccctctgccgggagaagttccctccccagaagctcatctaccttcggcactaccgctgagccggcgcccgggtgggcctggacacagatgacctctacgggagtctgaacgccaagatttagtctcaggattaaccttgcttgcacagaagttagaacactctcagttttttgtcatgtaagatactaacctagccaccctgggagagaacagaaagctgtccctggctgcgctttctcagccctgggaggggcgcctgaacccagaacatttccctaaccccaacctggtaggactcagccacttcttcaggaatttcacttatttggacgggattttaggtttccctcccttccccaaaccatacagttgagaagtaattcagaagtaggccagaagacactttattcgtttatattgtgagaaaacagccccatcaggcttgtgttaaggcaatggactgaatgagtgcgtgctgggtggggtggggcacggaggctggcgggttgcttcagccagtgcagtgagaacagcagccccacggccccatgggaggcggcgctgctctccccgagggcggctgggggtatgggggctgccaggggcgcccgagccctctcctggggggcctgctgggcaggcgacctgctgacccacggtcactgctgtgttcagcccctcagctcggccccagcctatttcccgcctccatttgatgtttccaggttttcaaaactgcatttaacctgcgccagagagttcaccgtaggcatctttaataaactaactccagcaaaatgtgggtacgttactaacacaagatggaacttgagatttcctgaagcgcagtgttaaaatgcctcgagggcgtgtgccacatttccctgctgacgtaaaacacctggccagcaggaccggcttccggcaaagacccgcgcaaaccatgtcttgctgtttgacttacttaggaatgaggatgaccctgtattcctgggttagtcaaggtcagcttgccagagacggaggagggcgggggggccgtgaccctctagactgggaggaccaccaggagaggcactgggggctgcggccgggtgggcagatgccgccgtggctccatccatcagcacccagtcctttgcttcactgtgctctggccaagcgcgtgcgacttcctgtcacaccttaggcctgagcgcttattaagaaaacagtatgaaaaatgacaaacactcctgtccacagtctgagaatcccaagtgtctcaacacggtaccagaagtaccacctgggagcagcactggctatcttgggtcagggacacacaagcttgaacgtggcctcttagaggagctcgatgtcagatatgtaaacactggcacaagaaaatccagacactaagcattcaccgtgtcaattctgagacaggaaacaccgcccagagtgaggagcctgcgcagcccggggcccaggaggagaggccttcactcgcatgtcagtgtctcatctgggaccacagctgtgatgttctgctgtgcaatatgggtcacctttcgaaaaggccaaacaaaaggtgggctttcctgtgtccagcgactgccatgttttaggtaaagactttagtaaaggtggaggtaaaatcacttggtaaaacgttgagagtatttcttttctcgaatcaaaaacgctgacatgcaagtgggttccgcctctcccgcagtggggggccgagtgctgaacctacaaagccagtctgctccctgccagcttcgctgcccctcatggagggttgcatgaggacagatttaaattaaaaacaaaacactctacgtatcaaagaaatgtgtcaaaataatctcaaacaattaaaatataatatatatttataattccgggccctcaaagcaatcatggtagttaagaaccaagttttgagtcattaggatagaggccaactttaaacatctccagtgagatggaattaggaaactggca

SEQ ID NO: 358038 - DNA, 2866 bp, Homo sapiens
agcgggtcatcagttctcgcccgtctgggcgtgggcgtggccggcgtggctgctcgggaccacccgaacccgcggccatggccccggccgccgccagccccccggaggtgatccgcgcggcgcagaaggacgagtactaccgcggtgggctgcggagcgcggcgggcggcgccctgcacagcctggcgggtgcgaggaagtggctggagtggaggaaggaggttgagctgctctcagatgtggcctactttggcctcaccacacttgcaggctaccagaccctgggggaggagtacgtcagcatcatccaggtggacccatcgcggatacatgtgccctcctcgctgcgccgtggcgtgctggtgacgctgcatgccgtcctgccctacctgctggacaaggccctgctccccctggagcaggagctgcaggctgaccccgacagtgggcgacccttgcaggggagcctggggccaggtgggcgtggctgctcaggggcgcggcgctggatgcgtcaccacacggccaccctgactgagcagcagaggagggcgctgctgcgggcggtcttcgtcctcagacagggcctcgcctgcctccagcggctacatgttgcctggttttacatccacggtgtcttctaccacctggccaagaggctcacggggatcacgtacctccgtgtccgcagcctgcccggagaggacctgagggcccgtgttagctacaggctgctgggggtcatctcactgctgcacctggtgctgtccatggggctgcagctgtacggtttcaggcagcggcagcgagccaggaaggagtggaggctgcaccgcggcctgtctcaccgcagggcctccttggaggagagagccgtttccagaaaccccctgtgcaccctgtgcctggaggagcgcaggcacccaacagccacgccctgcggccacctgttctgctgggagtgcatcaccgcgtggtgcagcagcaaggcggagtgtcccctctgccgggagaagttccctccccagaagctcatctaccttcggcactaccgctgagccggcgcccgggtgggcctggacacagatgacctctacgggagtctgaacgccaagatttagtctcaggattaaccttgcttgcacagaagttagaacactctcagttttttgtcatgtaagatactaacctagccaccctgggagagaacagaaagctgtccctggctgcgctttctcagccctgggaggggcgcctgaacccagaacatttccctaaccccaacctggtaggactcagccacttcttcaggaatttcacttatttggacgggattttaggtttccctcccttccccaaaccatacagttgagaagtaattcagaagtaggccagaagacactttattcgtttatattgtgagaaaacagccccatcaggcttgtgttaaggcaatggactgaatgagtgcgtgctgggtggggtggggcacacacaccttcaatacacgtcaaggtcgcttccagttttagaaaacagaaatctgcatctcagcctgagacgcacagagaggtctcttcctgacccagacgcactcacgagccaggtccatttaacctgcgccagagagttcaccgtaggcatctttaataaactaactccagcaaaatgtgggtacgttactaacacaagatggaacttgagatttcctgaagcgcagtgttaaaatgcctcgagggcgtgtgccacatttccctgctgacgtaaaacacctggccagcaggaccggcttccggcaaagacccgcgcaaaccatgtcttgctgtttgacttacttaggaatgaggatgaccctgtattcctgggttagtcaaggtcagcttgccagagacggaggagggcgggggggccgtgaccctctagactgggaggaccaccaggagaggcactgggggctgcggccgggtgggcagatgccgccgtggctccatccatcagcacccagtcctttgcttcactgtgctctggccaagcgcgtgcgacttcctgtcacaccttaggcctgagcgcttattaagaaaacagtatgaaaaatgacaaacactcctgtccacagtctgagaatcccaagtgtctcaacacggtaccagaagtaccacctgggagcagcactggctatcttgggtcagggacacacaagcttgaacgtggcctcttagaggagctcgatgtcagatatgtaaacactggcacaagaaaatccagacactaagcattcaccgtgtcaattctgagacaggaaacaccgcccagagtgaggagcctgcgcagcccggggcccaggaggagaggccttcactcgcatgtcagtgtctcatctgggaccacagctgtgatgttctgctgtgcaatatgggtcacctttcgaaaaggccaaacaaaaggtgggctttcctgtgtccagcgactgccatgttttaggtaaagactttagtaaaggtggaggtaaaatcacttggtaaaacgttgagagtatttcttttctcgaatcaaaaacgctgacatgcaagtgggttccgcctctcccgcagtggggggccgagtgctgaacctacaaagccagtctgctccctgccagcttcgctgcccctcatggagggttgcatgaggacagatttaaattaaaaacaaaacactctacgtatcaaagaaatgtgtcaaaataatctcaaacaattaaaatataatatatatttataattccgggccctcaaagcaatcatggtagttaagaaccaagttttgagtcattaggatagaggccaactttaaacatctccagtgagatggaattaggaaactggca

SEQ ID NO: 358039 - DNA, 2886 bp, Homo sapiens
agcgggtcatcagttctcgcccgtctgggcgtgggcgtggccggcgtggctgctcgggaccacccgaacccgcggccatggccccggccgccgccagccccccggaggtgatccgcgcggcgcagaaggacgagtactaccgcggtgggctgcggagcgcggcgggcggcgccctgcacagcctggcgggtgcgaggaagtggctggagtggaggaaggaggttgagctgctctcagatgtggcctactttggcctcaccacacttgcaggctaccagaccctgggggaggagtacgtcagcatcatccaggtggacccatcgcggatacatgtgccctcctcgctgcgccgtggcgtgctggtgacgctgcatgccgtcctgccctacctgctggacaaggccctgctccccctggagcaggagctgcaggctgaccccgacagtgggcgacccttgcaggggagcctggggccaggtgggcgtggctgctcaggggcgcggcgctggatgcgtcaccacacggccaccctgactgagcagcagaggagggcgctgctgcgggcggtcttcgtcctcagacagggcctcgcctgcctccagcggctacatgttgcctggttttacatccacggtgtcttctaccacctggccaagaggctcacggggatcacgtacctccgtgtccgcagcctgcccggagaggacctgagggcccgtgttagctacaggctgctgggggtcatctcactgctgcacctggtgctgtccatggggctgcagctgtacggtttcaggcagcggcagcgagccaggaaggagtggaggctgcaccgcggcctgtctcaccgcagggcctccttggaggagagagccgtttccagaaaccccctgtgcaccctgtgcctggaggagcgcaggcacccaacagccacgccctgcggccacctgttctgctgggagtgcatcaccgcgtggtgcagcagcaaggcggagtgtcccctctgccgggagaagttccctccccagaagctcatctaccttcggcactaccgctgagccggcgcccgggtgggcctggacacagatgacctctacgggagtctgaacgccaagatttagtctcaggattaaccttgcttgcacagaagttagaacactctcagttttttgtcatgtaagatactaacctagccaccctgggagagaacagaaagctgtccctggctgcgctttctcagccctgggaggggcgcctgaacccagaacatttccctaaccccaacctggtaggactcagccacttcttcaggaatttcacttatttggacgggattttaggtttccctcccttccccaaaccatacagttgagaagtaattcagaagtaggccagaagacactttattcgtttatattgtgagaaaacagccccatcaggcttgtgttaaggcaatggactgaatgagtgcctgggggtatgggggctgccaggggcgcccgagccctctcctggggggcctgctgggcaggcgacctgctgacccacggtcactgctgtgttcagcccctcagctcggccccagcctatttcccgcctccatttgatgtttccaggttttcaaaactgcatttaacctgcgccagagagttcaccgtaggcatctttaataaactaactccagcaaaatgtgggtacgttactaacacaagatggaacttgagatttcctgaagcgcagtgttaaaatgcctcgagggcgtgtgccacatttccctgctgacgtaaaacacctggccagcaggaccggcttccggcaaagacccgcgcaaaccatgtcttgctgtttgacttacttaggaatgaggatgaccctgtattcctgggttagtcaaggtcagcttgccagagacggaggagggcgggggggccgtgaccctctagactgggaggaccaccaggagaggcactgggggctgcggccgggtgggcagatgccgccgtggctccatccatcagcacccagtcctttgcttcactgtgctctggccaagcgcgtgcgacttcctgtcacaccttaggcctgagcgcttattaagaaaacagtatgaaaaatgacaaacactcctgtccacagtctgagaatcccaagtgtctcaacacggtaccagaagtaccacctgggagcagcactggctatcttgggtcagggacacacaagcttgaacgtggcctcttagaggagctcgatgtcagatatgtaaacactggcacaagaaaatccagacactaagcattcaccgtgtcaattctgagacaggaaacaccgcccagagtgaggagcctgcgcagcccggggcccaggaggagaggccttcactcgcatgtcagtgtctcatctgggaccacagctgtgatgttctgctgtgcaatatgggtcacctttcgaaaaggccaaacaaaaggtgggctttcctgtgtccagcgactgccatgttttaggtaaagactttagtaaaggtggaggtaaaatcacttggtaaaacgttgagagtatttcttttctcgaatcaaaaacgctgacatgcaagtgggttccgcctctcccgcagtggggggccgagtgctgaacctacaaagccagtctgctccctgccagcttcgctgcccctcatggagggttgcatgaggacagatttaaattaaaaacaaaacactctacgtatcaaagaaatgtgtcaaaataatctcaaacaattaaaatataatatatatttataattccgggccctcaaagcaatcatggtagttaagaaccaagttttgagtcattaggatagaggccaactttaaacatctccagtgagatggaattaggaaactggca

SEQ ID NO: 358040 - DNA, 1713 bp, Homo sapiens
  misc_feature (1693)..(1693): n is a, c, g, or t
agcgggtcatcagttctcgcccgtctgggcgtgggcgtggccggcgtggctgctcgggaccacccgaacccgcggccatggccccggccgccgccagccccccggaggtgatccgcgcggcgcagaaggacgagtactaccgcggtgggctgcggagcgcggcgggcggcgccctgcacagcctggcgggtgcgaggaagtggctggagtggaggaaggaggttgagctgctctcagatgtggcctactttggcctcaccacacttgcaggctaccagaccctgggggaggagtacgtcagcatcatccaggtggacccatcgcggatacatgtgccctcctcgctgcgccgtggcgtgctggtgacgctgcatgccgtcctgccctacctgctggacaaggccctgctccccctggagcaggagctgcaggctgaccccgacagtgggcgacccttgcaggggagcctggggccaggtgggcgtggctgctcaggggcgcggcgctggatgcgtcaccacacggccaccctgactgagcagcagaggagggcgctgctgcgggcggtcttcgtcctcagacagggcctcgcctgcctccagcggctacatgttgcctggttttacatccacggtgtcttctaccacctggccaagaggctcacggggatcacgtacctccgtgtccgcagcctgcccggagaggacctgagggcccgtgttagctacaggctgctgggggtcatctcactgctgcacctggtgctgtccatggggctgcagctgtacggtttcaggcagcggcagcgagccaggaaggagtggaggctgcaccgcggcctgtctcaccgcagggcctccttggaggagagagccgtttccagaaaccccctgtgcaccctgtgcctggaggagcgcaggcacccaacagccacgccctgcggccacctgttctgctgggagtgcatcaccgcgtggtgcagcagcaaggcggagtgtcccctctgccgggagaagttccctccccagaagctcatctaccttcggcactaccgctgagccggcgcccgggtgggcctggacacagatgacctctacgggagtctgaacgccaagatttagtctcaggattaaccttgcttgcacagaagttagaacactctcagttttttgtcatgtaagatactaacctagccaccctgggagagaacagaaagctgtccctggctgcgctttctcagccctgggaggggcgcctgaacccagaacatttccctaaccccaacctggtaggactcagccacttcttcaggaatttcacttatttggacgggattttaggtttccctcccttccccaaaccatacagttgagaagtaattcagaagtaggccagaagacactttattcgtttatattgtgagaaaacagccccatcaggcttgtgttaaggcaatggactgaatgagtgcgtgctgggtggggtggggcacggaggctggcgggttgcttcagccagtgcagtgagaacagcagccccacggccccatgggaggcggcgctgctctccccgagggcggctgggcagagcacatcccccacaggggaacctttttttgggggaaaatttggggaaaaaaccccccccaaaacccccaaaaaacaccccctggggggggggggggggggggggncccccccaaaaaaaaatttt

SEQ ID NO: 358041 - DNA, 1648 bp, Homo sapiens
attcgcggccgcgtcgaccaagtcctgggggatgtgctctgcccagggacttgatgaccacacggggcagagagaaaccaaccaaggccagcacctccgtcggaagcatttggcacacacaccttcaatacacgtcaaggtcgcttccagttttagaaaacagaaatctgcatctcagcctgagacgcacagagaggtctcttcctgacccagacgcactcacgagccaggtcctgggggtatgggggctgccaggggcgcccgagccctctcctggggggcctgctgggcaggcgacctgctgacccacggtcactgctgtgttcagcccctcagctcggccccagcctatttcccgcctccatttgatgtttccaggttttcaaaactgcatttaacctgcgccagagagttcaccgtaggcatctttaataaactaactccagcaaaatgtgggtacgttactaacacaagatggaacttgagatttcctgaagcgcagtgttaaaatgcctcgagggcgtgtgccacatttccctgctgacgtaaaacacctggccagcaggaccggcttccggcaaagacccgcgcaaaccatgtcttgctgtttgacttacttaggaatgaggatgaccctgtattcctgggttagtcaaggtcagcttgccagagacggaggagggcgggggggccgtgaccctctagactgggaggaccaccaggagaggcactgggggctgcggccgggtgggcagatgccgccgtggctccatccatcagcacccagtcctttgcttcactgtgctctggccaagcgcgtgcgacttcctgtcacaccttaggcctgagcgcttattaagaaaacagtatgaaaaatgacaaacactcctgtccacagtctgagaatcccaagtgtctcaacacggtaccagaagtaccacctgggagcagcactggctatcttgggtcagggacacacaagcttgaacgtggcctcttagaggagctcgatgtcagatatgtaaacactggcacaagaaaatccagacactaagcattcaccgtgtcaattctgagacaggaaacaccgcccagagtgaggagcctgcgcagcccggggcccaggaggagaggccttcactcgcatgtcagtgtctcatctgggaccacagctgtgatgttctgctgtgcaatatgggtcacctttcgaaaaggccaaacaaaaggtgggctttcctgtgtccagcgactgccatgttttaggtaaagactttagtaaaggtggaggtaaaatcacttggtaaaacgttgagagtatttcttttctcgaatcaaaaacgctgacatgcaagtgggttccgcctctcccgcagtggggggccgagtgctgaacctacaaagccagtctgctccctgccagcttcgctgcccctcatggagggttgcatgaggacagatttaaattaaaaacaaaacactctacgtatcaaagaaatgtgtcaaaataatctcaaacaattaaaatataatatatatttataattccgggccctcaaagcaatcatggtagttaagaaccaagttttgagtcattaggatagaggccaactttaaacatctccagtgagatggaattaggaaactggca

SEQ ID NO: 358042 - DNA, 3262 bp, Homo sapiens
agcgggtcatcagttctcgcccgtctgggcgtgggcgtggccggcgtggctgctcgggaccacccgaacccgcggccatggccccggccgccgccagccccccggaggtgatccgcgcggcgcagaaggacgagtactaccgcggtgggctgcggagcgcggcgggcggcgccctgcacagcctggcgggtgcgaggaagtggctggagtggaggaaggaggttgagctgctctcagatgtggcctactttggcctcaccacacttgcaggctaccagaccctgggggaggagtacgtcagcatcatccaggtggacccatcgcggatacatgtgccctcctcgctgcgccgtggcgtgctggtgacgctgcatgccgtcctgccctacctgctggacaaggccctgctccccctggagcaggagctgcaggctgaccccgacagtgggcgacccttgcaggggagcctggggccaggtgggcgtggctgctcaggggcgcggcgctggatgcgtcaccacacggccaccctgactgagcagcagaggagggcgctgctgcgggcggtcttcgtcctcagacagggcctcgcctgcctccagcggctacatgttgcctggttttacatccacggtgtcttctaccacctggccaagaggctcacggggatcacgtaccaggcgctgaggccagatcccctcagggtcctgatgagtgtggcgccatctgccttacagctccgtgtccgcagcctgcccggagaggacctgagggcccgtgttagctacaggctgctgggggtcatctcactgctgcacctggtgctgtccatggggctgcagctgtacggtttcaggcagcggcagcgagccaggaaggagtggaggctgcaccgcggcctgtctcaccgcagggcctccttggaggagagagccgtttccagaaaccccctgtgcaccctgtgcctggaggagcgcaggcacccaacagccacgccctgcggccacctgttctgctgggagtgcatcaccgcgtggtgcagcagcaaggcggagtgtcccctctgccgggagaagttccctccccagaagctcatctaccttcggcactaccgctgagccggcgcccgggtgggcctggacacagatgacctctacgggagtctgaacgccaagatttagtctcaggattaaccttgcttgcacagaagttagaacactctcagttttttgtcatgtaagatactaacctagccaccctgggagagaacagaaagctgtccctggctgcgctttctcagccctgggaggggcgcctgaacccagaacatttccctaaccccaacctggtaggactcagccacttcttcaggaatttcacttatttggacgggattttaggtttccctcccttccccaaaccatacagttgagaagtaattcagaagtaggccagaagacactttattcgtttatattgtgagaaaacagccccatcaggcttgtgttaaggcaatggactgaatgagtgcgtgctgggtggggtggggcacggaggctggcgggttgcttcagccagtgcagtgagaacagcagccccacggccccatgggaggcggcgctgctctccccgagggcggctgggcagagcacatcccccaggacttgatgaccacacggggcagagagaaaccaaccaaggccagcacctccgtcggaagcatttggcacacacaccttcaatacacgtcaaggtcgcttccagttttagaaaacagaaatctgcatctcagcctgagacgcacagagaggtctcttcctgacccagacgcactcacgagccaggtcctgggggtatgggggctgccaggggcgcccgagccctctcctggggggcctgctgggcaggcgacctgctgacccacggtcactgctgtgttcagcccctcagctcggccccagcctatttcccgcctccatttgatgtttccaggttttcaaaactgcatttaacctgcgccagagagttcaccgtaggcatctttaataaactaactccagcaaaatgtgggtacgttactaacacaagatggaacttgagatttcctgaagcgcagtgttaaaatgcctcgagggcgtgtgccacatttccctgctgacgtaaaacacctggccagcaggaccggcttccggcaaagacccgcgcaaaccatgtcttgctgtttgacttacttaggaatgaggatgaccctgtattcctgggttagtcaaggtcagcttgccagagacggaggagggcgggggggccgtgaccctctagactgggaggaccaccaggagaggcactgggggctgcggccgggtgggcagatgccgccgtggctccatccatcagcacccagtcctttgcttcactgtgctctggccaagcgcgtgcgacttcctgtcacaccttaggcctgagcgcttattaagaaaacagtatgaaaaatgacaaacactcctgtccacagtctgagaatcccaagtgtctcaacacggtaccagaagtaccacctgggagcagcactggctatcttgggtcagggacacacaagcttgaacgtggcctcttagaggagctcgatgtcagatatgtaaacactggcacaagaaaatccagacactaagcattcaccgtgtcaattctgagacaggaaacaccgcccagagtgaggagcctgcgcagcccggggcccaggaggagaggccttcactcgcatgtcagtgtctcatctgggaccacagctgtgatgttctgctgtgcaatatgggtcacctttcgaaaaggccaaacaaaaggtgggctttcctgtgtccagcgactgccatgttttaggtaaagactttagtaaaggtggaggtaaaatcacttggtaaaacgttgagagtatttcttttctcgaatcaaaaacgctgacatgcaagtgggttccgcctctcccgcagtggggggccgagtgctgaacctacaaagccagtctgctccctgccagcttcgctgcccctcatggagggttgcatgaggacagatttaaattaaaaacaaaacactctacgtatcaaagaaatgtgtcaaaataatctcaaacaattaaaatataatatatatttataattccgggccctcaaagcaatcatggtagttaagaaccaagttttgagtcattaggatagaggccaactttaaacatctccagtgagatggaattaggaaactggca

SEQ ID NO: 358043 - DNA, 2565 bp, Homo sapiens
  misc_feature (1)..(1): n is a, c, g, or t
naacctaggctaggtcgaggccgggtggttggatcacgtactccgtgtccgcagcctgcccggagaggacctgagggcccgtgttagctacaggctgctgggggtcatctcactgctgcacctggtgctgtccatggggctgcagctgtacggtttcaggcagcggcagcgagccaggaaggagtggaggctgcaccgcggcctgtctcaccgcagggcctccttggaggagagagccgtttccagaaaccccctgtgcaccctgtgcctggaggagcgcaggcacccaacagccacgccctgcggccacctgttctgctgggagtgcatcaccgcgtggtgcagcagcaaggcggagtgtcccctctgccgggagaagttccctccccagaagctcatctaccttcggcactaccgctgagccggcgcccgggtgggcctggacacagatgacctctacgggagtctgaacgccaagatttagtctcaggattaaccttgcttgcacagaagttagaacactctcagttttttgtcatgtaagatactaacctagccaccctgggagagaacagaaagctgtccctggctgcgctttctcagccctgggaggggcgcctgaacccagaacatttccctaaccccaacctggtaggactcagccacttcttcaggaatttcacttatttggacgggattttaggtttccctcccttccccaaaccatacagttgagaagtaattcagaagtaggccagaagacactttattcgtttatattgtgagaaaacagccccatcaggcttgtgttaaggcaatggactgaatgagtgcgtgctgggtggggtggggcacggaggctggcgggttgcttcagccagtgcagtgagaacagcagccccacggccccatgggaggcggcgctgctctccccgagggcggctgggcagagcacatcccccaggacttgatgaccacacggggcagagagaaaccaaccaaggccagcacctccgtcggaagcatttggcacacacaccttcaatacacgtcaaggtcgcttccagttttagaaaacagaaatctgcatctcagcctgagacgcacagagaggtctcttcctgacccagacgcactcacgagccaggtcctgggggtatgggggctgccaggggcgcccgagccctctcctggggggcctgctgggcaggcgacctgctgacccacggtcactgctgtgttcagcccctcagctcggccccagcctatttcccgcctccatttgatgtttccaggttttcaaaactgcatttaacctgcgccagagagttcaccgtaggcatctttaataaactaactccagcaaaatgtgggtacgttactaacacaagatggaacttgagatttcctgaagcgcagtgttaaaatgcctcgagggcgtgtgccacatttccctgctgacgtaaaacacctggccagcaggaccggcttccggcaaagacccgcgcaaaccatgtcttgctgtttgacttacttaggaatgaggatgaccctgtattcctgggttagtcaaggtcagcttgccagagacggaggagggcgggggggccgtgaccctctagactgggaggaccaccaggagaggcactgggggctgcggccgggtgggcagatgccgccgtggctccatccatcagcacccagtcctttgcttcactgtgctctggccaagcgcgtgcgacttcctgtcacaccttaggcctgagcgcttattaagaaaacagtatgaaaaatgacaaacactcctgtccacagtctgagaatcccaagtgtctcaacacggtaccagaagtaccacctgggagcagcactggctatcttgggtcagggacacacaagcttgaacgtggcctcttagaggagctcgatgtcagatatgtaaacactggcacaagaaaatccagacactaagcattcaccgtgtcaattctgagacaggaaacaccgcccagagtgaggagcctgcgcagcccggggcccaggaggagaggccttcactcgcatgtcagtgtctcatctgggaccacagctgtgatgttctgctgtgcaatatgggtcacctttcgaaaaggccaaacaaaaggtgggctttcctgtgtccagcgactgccatgttttaggtaaagactttagtaaaggtggaggtaaaatcacttggtaaaacgttgagagtatttcttttctcgaatcaaaaacgctgacatgcaagtgggttccgcctctcccgcagtggggggccgagtgctgaacctacaaagccagtctgctccctgccagcttcgctgcccctcatggagggttgcatgaggacagatttaaattaaaaacaaaacactctacgtatcaaagaaatgtgtcaaaataatctcaaacaattaaaatataatatatatttataattccgggccctcaaagcaatcatggtagttaagaaccaagttttgagtcattaggatagaggccaactttaaacatctccagtgagatggaattaggaaactggca

SEQ ID NO: 358044 - DNA, 1648 bp, Homo sapiens
agcgggtcatcagttctcgcccgtctgggcgtgggcgtggccggcgtggctgctcgggaccacccgaacccgcggccatggccccggccgccgccagccccccggaggtgatccgcgcggcgcagaaggacgagtactaccgcggtgggctgcggagcgcggcgggcggcgccctgcacagcctggcgggtgcgaggaagtggctggagtggaggaaggaggttgagctgctctcagatgtggcctactttggcctcaccacacttgcaggctaccagaccctgggggaggagtacgtcagcatcatccaggtggacccatcgcggatacatgtgccctcctcgctgcgccgtggcgtgctggtgacgctgcatgccgtcctgccctacctgctggacaaggccctgctccccctggagcaggagctgcaggctgaccccgacagtgggcgacccttgcaggggagcctggggccaggtgggcgtggctgctcaggggcgcggcgctggatgcgtcaccacacggccaccctgactgagcagcagaggagggcgctgctgcgggcggtcttcgtcctcagacagggcctcgcctgcctccagcggctacatgttgcctggttttacatccacggtgtcttctaccacctggccaagaggctcacggggatcacgtacctccgtgtccgcagcctgcccggagaggacctgagggcccgtgttagctacaggctgctgggggtcatctcactgctgcacctggtgctgtccatggggctgcagctgtacggtttcaggcagcggcagcgagccaggaaggagtggaggctgcaccgcggcctgtctcaccgcagggcctccttggaggagagagccgtttccagaaaccccctgtgcaccctgtgcctggaggagcgcaggcacccaacagccacgccctgcggccacctgttctgctgggagtgcatcaccgcgtggtgcagcagcaaggcggagtgtcccctctgccgggagaagttccctccccagaagctcatctaccttcggcactaccgctgagccggcgcccgggtgggcctggacacagatgacctctacgggagtctgaacgccaagatttagtctcaggattaaccttgcttgcacagaagttagaacactctcagttttttgtcatgtaagatactaacctagccaccctgggagagaacagaaagctgtccctggctgcgctttctcagccctgggaggggcgcctgaacccagaacatttccctaaccccaacctggtaggactcagccacttcttcaggaatttcacttatttggacgggattttaggtttccctcccttccccaaaccatacagttgagaagtaattcagaagtaggccagaagacactttattcgtttatattgtgagaaaacagccccatcaggcttgtgttaaggcaatggactgaatgagtgcgtgctgggtggggtggggcacggaggctggcgggttgcttcagccagtgcagtgagaacagcagccccacggccccagcctatttcccgcctccatttgatgtttccaggttttcaaaactgcatttaacctgcgccagagagttcaccgtaggcatctttaataaactaactccag

SEQ ID NO: 358045 - DNA, 1109 bp, Homo sapiens
agcgggtcatcagttctcgcccgtctgggcgtgggcgtggccggcgtggctgctcgggaccacccgaacccgcggccatggccccggccgccgccagccccccggaggtgatccgcgcggcgcagaaggacgagtactaccgcggtgggctgcggagcgcggcgggcggcgccctgcacagcctggcgggtgcgaggaagtggctggagtggaggaaggaggttgagctgctctcagatgtggcctactttggcctcaccacacttgcaggctaccagaccctgggggaggagtacgtcagcatcatccaggtggacccatcgcggatacatgtgccctcctcgctgcgccgtggcgtgctggtgacgctgcatgccgtcctgccctacctgctggacaaggccctgctccccctggagcaggagctgcaggctgaccccgacagtgggcgacccttgcaggggagcctggggccaggtgggcgtggctgctcaggggcgcggcgctggatgcgtcaccacacggccaccctgactgagcagcagaggagggcgctgctgcgggcggtcttcgtcctcagacagggcctcgcctgcctccagcggctacatgttgcctggttttacatccacggtgtcttctaccacctggccaagaggctcacggggatcacgtaccaggcgctgaggccagatcccctcagggtcctgatgagtgtggcgccatctgccttacagctccgtgtccgcagcctgcccggagaggacctgagggcccgtgttagctacaggctgctgggggtcatctcactgctgcacctggtgctgtccatggggctgcagctgtacggtttcaggcagcggcagcgagccaggaaggagtggaggctgcaccgcggcctgtctcaccgcagggcctccttggaggagagagccgtttccagaaaccccctgtgcaccctgtgcctggaggagcgcaggcacccaacagccacgccctgcggccacctgttctgctgggagtgcatcaccgcgtggtgcagcagcaaggtgaggtgggagcctgctgccgtcctggggtggtcagcggctgtgccggcaagatgcacc

SEQ ID NO: 358046 - DNA, 339 bp, Homo sapiens
ctgggagtacaggcgtgaaccacagcgcccagctgtagttgggtgtttaacagtaacaaatgtgtggacagccgccacccccagggacagtggcgacaggacagcatgcgaacctatgaacgggaagccctgaagaaaaagtttacgcgagtccatgatgcggagtcctccgatgaagacggctatgactggggtccggccactgacctgtgacctctcgcaggctgccagctggtccgtcctccttctccctccctggggctgggactcagtttcccatacagaacccacaaccttacctccctccgcctggtctttaataaacagagtattttcaca

SEQ ID NO: 358047 - DNA, 1378 bp, Homo sapiens
tgctgacctatgagttagctaggttcaactgctaaaaagagaccctacagccaggaagaaagggaatgaaggcaggagaggggcttattcctgcccttgaaggcggaacccagaaatgtacacatcaattctgctagtgttccattggccattatttggtcataaggctaacctagctgcaaaggacactgggagatgtagtatttggctgggtagctatggtcctggttaaataggctgtttactataaggaagtggaggggtttgtacaacacactagcagtctttgatcgcaaatgggaccctgattctttcactgtgtctctacccctcagccagtttcaagcgcccggtagtgatcctgggacccgtggccgacattgctatgcagaagttgactgctgagatgcctgaccagtttgaaatcgcagagactgtgtccaggaccgacagcccctccaagatcatcaaactagacaccgtgcgggtgattgcagaaaaagacaagcatgcgctcctggatgtgaccccctccgccatcgagcgcctcaactatgtgcagtactaccccattgtggtcttcttcatccccgagagccggccggccctcaaggcactgcgccagtggctggcgcctgcctcccgccgcagcacccgtcgcctctacgcacaagcccagaagctgcgaaaacacagcagccacctcttcacagccaccatccctctgaatggcacgagtgacacctggtaccaggagctcaaggccatcattcgagagcagcagacgcggcccatctggacggcggaagatcagctggatggctccttggaggacaacctagacctccctcaccacggcctggccgacagctccgctgacctcagctgcgacagccgcgttaacagcgactacgagacggacggcgagggcggcgcgtacacggatggcgagggctacacagacggcgagggggggccctacacggatgtggatgatgagcccccggctccagccctggcccggtcctcggagcccgtgcaggcagatgagtcccagagcccgagggatcgtgggagaatctcggctcatcagggggcccaggtggacagccgccacccccagggacagtggcgacaggacagcatgcgaacctatgaacgggaagccctgaagaaaaagtttacgcgagtccatgatgcggagtcctccgatgaagacggctatgactggggtccggccactgacctgtgacctctcgcaggctgccagctggtccgtcctccttctccctccctggggctgggactcagtttcccatacagaacccacaaccttacctccctccgcctggtctttaataaacagagtattttcaca

SEQ ID NO: 358048 - DNA, 725 bp, Homo sapiens
ttccgcctcaggacctggctcctgtgatgggaggtggggagagaaacctccgccgcgtccagggggcgtgtctgggcaggggcggggctgacccgagacctggaggaggaagaggggcaggtgcagccgggagctgcggagctggagggaggaggacgagagcccggccctcagcccgctgtgactctcctcagccccctcccccagcccggggtgggggccgattgactgtttccaggaccccctcgggtaggggggctggagagcccccaggtggaccatggcggtgagattccaggtggctgacatggaggagctgaccatctgggaacagcacacggccacactgtccaaggacccccgccggggctttggcattgcgatctctggaggccgagaccggcccggtggatccatggttgtatctgacgtggtacctggagggccggcggagggcaggctacagacaggcgaccacatcgtcatggtgaacggggtttccatggagaatgccacctccgcgtttgccattcagatactcaagacctgcaccaagatggccaacatcgtgagtaggcagcccctggcatggccagcatctctgaccccagcctgggtcgtgccgctgtgggggttgtaagcttctgagagcaaggagtcatcttctcatcttacagtttggacattgaggcccagagagagactggtgtcccccagggccaccc

SEQ ID NO: 358049 - DNA, 2380 bp, Homo sapiens
ggtcttccacgtgctggacacgctgcaccccggccccgggcagagccacgcacgaggaggccactggcctgtgaagtcagtgctggtgaagaggagagacagcgaagagtttggcgtcaagctgggcagtcagatcttcatcaagcacattacagattcgggcctggctgcccggcaccgtgggctgcaggaaggagatctcattctacagatcaacggggtgtctagccagaacctgtcactgaacgacacccggcgactgattgagaagtcagaagggaagctaagcctgctggtgctgagagatcgtgggcagttcctggtgaacattccgcctgctgtcagtgacagcgacagctcgccattggaggacatctcggacctcgcctcggagctatcgcaggcaccaccatcccacatcccaccaccaccccggcatgctcagcggagccccgaggccagccagaccgactctcccgtggagagtccccggcttcggcgggaaagttcagtagattccagaaccatctcggaaccagatgagcaacggtcagagttgcccagggaaagcagctatgacatctacagagtgcccagcagtcagagcatggaggatcgtgggtacagccccgacacgcgtgtggtccgcttcctcaagggcaagagcatcgggctgcggctggcagggggcaatgacgtgggcatcttcgtgtccggggtgcaggcgggcagcccggccgacgggcagggcatccaggagggagatcagattctgcaggtgaatgacgtgccattccagaacctgacacgggaggaggcagtgcagttcctgctggggctgccaccaggcgaggagatggagctggtgacgcagcggaagcaggacattttctggaaaatggtgcagtcccgcgtgggtgactccttctacatccgcactcactttgagctggagcccagtccaccgtctggcctgggcttcacccgtggcgacgtcttccacgtgctggacacgctgcaccccggccccgggcagagccacgcacgaggaggccactggctggcggtgcgcatgggtcgtgacctgcgggagcaagagcggggcatcattcccaaccagagcagggcggagcagctggccagcctggaagctgcccagagggccgtgggagtcgggcccggctcctccgcgggctccaatgctcgggccgagttctggcggctgcggggtcttcgtcgaggagccaagaagaccactcagcggagccgtgaggacctctcagctctgacccgacagggccgctacccgccctacgaacgagtggtgttgcgagaagccagtttcaagcgcccggtagtgatcctgggacccgtggccgacattgctatgcagaagttgactgctgagatgcctgaccagtttgaaatcgcagagactgtgtccaggaccgacagcccctccaagatcatcaaactagacaccgtgcgggtgattgcagaaaaagacaagcatgcgctcctggatgtgaccccctccgccatcgagcgcctcaactatgtgcagtactaccccattgtggtcttcttcatccccgagagccggccggccctcaaggcactgcgccagtggctggcgcctgcctcccgccgcagcacccgtcgcctctacgcacaagcccagaagctgcgaaaacacagcagccacctcttcacagccaccatccctctgaatggcacgagtgacacctggtaccaggagctcaaggccatcattcgagagcagcagacgcggcccatctggacggcggaagatcagctggatggctccttggaggacaacctagacctccctcaccacggcctggccgacagctccgctgacctcagctgcgacagccgcgttaacagcgactacgagacggacggcgagggcggcgcgtacacggatggcgagggctacacagacggcgagggggggccctacacggatgtggatgatgagcccccggctccagccctggcccggtcctcggagcccgtgcaggcagatgagtcccagagcccgagggatcgtgggagaatctcggctcatcagggggcccaggtggacagccgccacccccagggacagtggcgacaggacagcatgcgaacctatgaacgggaagccctgaagaaaaagtttacgcgagtccatgatgcggagtcctccgatgaagacggctatgactggggtccggccactgacctgtgacctctcgcaggctgccagctggtccgtcctccttctccctccctggggctgggactcagtttcccatacagaacccacaaccttacctccctccgcctggtctttaataaacagagtattttcaca

SEQ ID NO: 358050 - DNA, 3193 bp, Homo sapiens
ttccgcctcaggacctggctcctgtgatgggaggtggggagagaaacctccgccgcgtccagggggcgtgtctgggcaggggcggggctgacccgagacctggaggaggaagaggggcaggtgcagccgggagctgcggagctggagggaggaggacgagagcccggccctcagcccgctgtgactctcctcagccccctcccccagcccggggtgggggccgattgactgtttccaggaccccctcgggtaggggggctggagagcccccaggtggaccatggcggtgagattccaggtggctgacatggaggagctgaccatctgggaacagcacacggccacactgtccaaggacccccgccggggctttggcattgcgatctctggaggccgagaccggcccggtggatccatggttgtatctgacgtggtacctggagggccggcggagggcaggctacagacaggcgaccacatcgtcatggtgaacggggtttccatggagaatgccacctccgcgtttgccattcagatactcaagacctgcaccaagatggccaacatcacagtgaaacgtccccggaggatccacctgcccgccaccaaagccagcccctccagcccagggcgccaggactcggatgaagacgatgggccccagcgggtggaggaggtggaccagggccggggctatgacggcgactcatccagtggctccggccgctcctgggacgagcgctcccgccggccgaggcctggtcgccggggccgggccggcagccatgggcgtaggagcccaggtggtggctctgaggccaacgggctggccctggtgtccggctttaagcggctgccacggcaggacgtgcagatgaagcctgtgaagtcagtgctggtgaagaggagagacagcgaagagtttggcgtcaagctgggcagtcagatcttcatcaagcacattacagattcgggcctggctgcccggcaccgtgggctgcaggaaggagatctcattctacagatcaacggggtgtctagccagaacctgtcactgaacgacacccggcgactgattgagaagtcagaagggaagctaagcctgctggtgctgagagatcgtgggcagttcctggtgaacattccgcctgctgtcagtgacagcgacagctcgccattggaggacatctcggacctcgcctcggagctatcgcaggcaccaccatcccacatcccaccaccaccccggcatgctcagcggagccccgaggccagccagaccgactctcccgtggagagtccccggcttcggcgggaaagttcagtagattccagaaccatctcggaaccagatgagcaacggtcagagttgcccagggaaagcagctatgacatctacagagtgcccagcagtcagagcatggaggatcgtgggtacagccccgacacgcgtgtggtccgcttcctcaagggcaagagcatcgggctgcggctggcagggggcaatgacgtgggcatcttcgtgtccggggtgcaggcgggcagcccggccgacgggcagggcatccaggagggagatcagattctgcaggtgaatgacgtgccattccagaacctgacacgggaggaggcagtgcagttcctgctggggctgccaccaggcgaggagatggagctggtgacgcagcggaagcaggacattttctggaaaatggtgcagtcccgcgtgggtgactccttctacatccgcactcactttgagctggagcccagtccaccgtctggcctgggcttcacccgtggcgacgtcttccacgtgctggacacgctgcaccccggccccgggcagagccacgcacgaggaggccactggctggcggtgcgcatgggtcgtgacctgcgggagcaagagcggggcatcattcccaaccagagcagggcggagcagctggccagcctggaagctgcccagagggccgtgggagtcgggcccggctcctccgcgggctccaatgctcgggccgagttctggcggctgcggggtcttcgtcgaggagccaagaagaccactcagcggagccgtgaggacctctcagctctgacccgacagggccgctacccgccctacgaacgagtggtgttgcgagaagccagtttcaagcgcccggtagtgatcctgggacccgtggccgacattgctatgcagaagttgactgctgagatgcctgaccagtttgaaatcgcagagactgtgtccaggaccgacagcccctccaagatcatcaaactagacaccgtgcgggtgattgcagaaaaagacaagcatgcgctcctggatgtgaccccctccgccatcgagcgcctcaactatgtgcagtactaccccattgtggtcttcttcatccccgagagccggccggccctcaaggcactgcgccagtggctggcgcctgcctcccgccgcagcacccgtcgcctctacgcacaagcccagaagctgcgaaaacacagcagccacctcttcacagccaccatccctctgaatggcacgagtgacacctggtaccaggagctcaaggccatcattcgagagcagcagacgcggcccatctggacggcggaagatcagctggatggctccttggaggacaacctagacctccctcaccacggcctggccgacagctccgctgacctcagctgcgacagccgcgttaacagcgactacgagacggacggcgagggcggcgcgtacacggatggcgagggctacacagacggcgagggggggccctacacggatgtggatgatgagcccccggctccagccctggcccggtcctcggagcccgtgcaggcagatgagtcccagagcccgagggatcgtgggagaatctcggctcatcagggggcccaggtggacagccgccacccccagggacagtggcgacaggacagcatgcgaacctatgaacgggaagccctgaagaaaaagtttacgcgagtccatgatgcggagtcctccgatgaagacggctatgactggggtccggccactgacctgtgacctctcgcaggctgccagctggtccgtcctccttctccctccctggggctgggactcagtttcccatacagaacccacaaccttacctccctccgcctggtctttaataaacagagtattttcaca

SEQ ID NO: 358051 - DNA, 1850 bp, Homo sapiens
cccctcaccctggtccgtctccctgtgtctgtggtcgtcagttccactggcaggggacctgcctccctgttgccaccacaagagaggaaaagttggtcaaacaggtggggaggccagagctacaagcctcgggttccctccccaccacccgtgccaggcaggcacccgggccctggcacctgctgcctgcccagaggccacccagcctcctagacaggtggctgacatggaggagctgaccatctgggaacagcacacggccacactgtccaaggacccccgccggggctttggcattgcgatctctggaggccgagaccggcccggtggatccatggttgtatctgacgtggtacctggagggccggcggagggcaggctacagacaggcgaccacatcgtcatggtgaacggggtttccatggagaatgccacctccgcgtttgccattcagatactcaagacctgcaccaagatggccaacatcacagtgaaacgtccccggaggatccacctgcccgccaccaaagccagcccctccagcccagggcgccaggactcggatgaagacgatgggccccagcgggtggaggaggtggaccagggccggggctatgacggcgactcatccagtggctccggccgctcctgggacgagcgctcccgccggccgaggcctggtcgccggggccgggccggcagccatgggcgtaggagcccaggtggtggctctgaggccaacgggctggccctggtgtccggctttaagcggctgccacggcaggacgtgcagatgaagcctgtgaagtcagtgctggtgaagaggagagacagcgaagagtttggcgtcaagctgggcagtcagatcttcatcaagcacattacagattcgggcctggctgcccggcaccgtgggctgcaggaaggagatctcattctacagatcaacggggtgtctagccagaacctgtcactgaacgacacccggcgactgattgagaagtcagaagggaagctaagcctgctggtgctgagagatcgtgggcagttcctggtgaacattccgcctgctgtcagtgacagcgacagctcgccattggaggacatctcggacctcgcctcggagctatcgcaggcaccaccatcccacatcccaccaccaccccggcatgctcagcggagccccgaggccagccagaccgactctcccgtggagagtccccggcttcggcgggaaagttcagtagattccagaaccatctcggaaccagatgagcaacggtcagctggatggctccttggaggacaacctagacctccctcaccacggcctggccgacagctccgctgacctcagctgcgacagccgcgttaacagcgactacgagacggacggcgagggcggcgcgtacacggatggcgagggctacacagacggcgagggggggccctacacggatgtggatgatgagcccccggctccagccctggcccggtcctcggagcccgtgcaggcagatgagtcccagagcccgagggatcgtgggagaatctcggctcatcagggggcccaggtggacagccgccacccccagggacagtggcgacaggacagcatgcgaacctatgaacgggaagccctgaagaaaaagtttacgcgagtccatgatgcggagtcctccgatgaagacggctatgactggggtccggccactgacctgtgacctctcgcaggctgccagctggtccgtcctccttctccctccctggggctgggactcagtttcccatacagaacccacaaccttacctccctccgcctggtctttaataaacagagtattttcaca

SEQ ID NO: 358052 - DNA, 234 bp, Homo sapiens
ccagtttcaagcgcccggtagtgatcctgggacccgtggccgacattgctatgcagaagttgactgctgagatgcctgaccagtttgaaatcgcaggtgagaagccagatcctctggaaacctcgttggtgaaatagtttcacaactgtttttttgtggggggtcgggggagagttagaataatgatggcaaacatgaagcagatgggccaccagtgccccccccaatacccaa

SEQ ID NO: 358053 - DNA, 2985 bp, Homo sapiens
atgaacctgtgtggcctcatgcccatcttccccgctcccctcgaccaggtggctgacatggaggagctgaccatctgggaacagcacacggccacactgtccaaggacccccgccggggctttggcattgcgatctctggaggccgagaccggcccggtggatccatggttgtatctgacgtggtacctggagggccggcggagggcaggctacagacaggcgaccacatcgtcatggtgaacggggtttccatggagaatgccacctccgcgtttgccattcagatactcaagacctgcaccaagatggccaacatcacagtgaaacgtccccggaggatccacctgcccgccaccaaagccagcccctccagcccagggcgccaggactcggatgaagacgatgggccccagcgggtggaggaggtggaccagggccggggctatgacggcgactcatccagtggctccggccgctcctgggacgagcgctcccgccggccgaggcctggtcgccggggccgggccggcagccatgggcgtaggagcccaggtggtggctctgaggccaacgggctggccctggtgtccggctttaagcggctgccacggcaggacgtgcagatgaagcctgtgaagtcagtgctggtgaagaggagagacagcgaagagtttggcgtcaagctgggcagtcagatcttcatcaagcacattacagattcgggcctggctgcccggcaccgtgggctgcaggaaggagatctcattctacagatcaacggggtgtctagccagaacctgtcactgaacgacacccggcgactgattgagaagtcagaagggaagctaagcctgctggtgctgagagatcgtgggcagttcctggtgaacattccgcctgctgtcagtgacagcgacagctcgccattggaggaaggcgtgaccatggctgatgagatgtcctctccccctgcagacatctcggacctcgcctcggagctatcgcaggcaccaccatcccacatcccaccaccaccccggcatgctcagcggagccccgaggccagccagaccgactctcccgtggagagtccccggcttcggcgggaaagttcagtagattccagaaccatctcggaaccagatgagcaacggtcagagttgcccagggaaagcagctatgacatctacagagtgcccagcagtcagagcatggaggatcgtgggtacagccccgacacgcgtgtggtccgcttcctcaagggcaagagcatcgggctgcggctggcagggggcaatgacgtgggcatcttcgtgtccggggtgcaggcgggcagcccggccgacgggcagggcatccaggagggagatcagattctgcaggtgaatgacgtgccattccagaacctgacacgggaggaggcagtgcagttcctgctggggctgccaccaggcgaggagatggagctggtgacgcagcggaagcaggacattttctggaaaatggtgcagtcccgcgtgggtgactccttctacatccgcactcactttgagctggagcccagtccaccgtctggcctgggcttcacccgtggcgacgtcttccacgtgctggacacgctgcaccccggccccgggcagagccacgcacgaggaggccactggctggcggtgcgcatgggtcgtgacctgcgggagcaagagcggggcatcattcccaaccagagcagggcggagcagctggccagcctggaagctgcccagagggccgtgggagtcgggcccggctcctccgcgggctccaatgctcgggccgagttctggcggctgcggggtcttcgtcgaggagccaagaagaccactcagcggagccgtgaggacctctcagctctgacccgacagggccgctacccgccctacgaacgagtggtgttgcgagaagccagtttcaagcgcccggtagtgatcctgggacccgtggccgacattgctatgcagaagttgactgctgagatgcctgaccagtttgaaatcgcagagactgtgtccaggaccgacagcccctccaagatcatcaaactagacaccgtgcgggtgattgcagaaaaagacaagcatgcgctcctggatgtgaccccctccgccatcgagcgcctcaactatgtgcagtactaccccattgtggtcttcttcatccccgagagccggccggccctcaaggcactgcgccagtggctggcgcctgcctcccgccgcagcacccgtcgcctctacgcacaagcccagaagctgcgaaaacacagcagccacctcttcacagccaccatccctctgaatggcacgagtgacacctggtaccaggagctcaaggccatcattcgagagcagcagacgcggcccatctggacggcggaagatcagctggatggctccttggaggacaacctagacctccctcaccacggcctggccgacagctccgctgacctcagctgcgacagccgcgttaacagcgactacgagacggacggcgagggcggcgcgtacacggatggcgagggctacacagacggcgagggggggccctacacggatgtggatgatgagcccccggctccagccctggcccggtcctcggagcccgtgcaggcagatgagtcccagagcccgagggatcgtgggagaatctcggctcatcagggggcccaggtggacagccgccacccccagggacagtggcgacaggacagcatgcgaacctatgaacgggaagccctgaagaaaaagtttacgcgagtccatgatgcggagtcctccgatgaagacggctatgactggggtccggccactgacctgtgacctctcgcaggctgccagctggtccgtcctccttctccctccctggggctgggactcagtttcccatacagaacccacaaccttacctccctccgcctggtctttaataaacagagtattttcaca

SEQ ID NO: 358054 - DNA, 411 bp, Homo sapiens
gcagacttgtcacggggttagcaagtgggcagcatggcccgggccaaggtgggggatgggatggaggtggttattgatctcgactcaccatgctctggggggagttttgaagctcctctctccctctcctccaaggtggacagccgccacccccagggacagtggcgacaggacagcatgcgaacctatgaacgggaagccctgaagaaaaagtttacgcgagtccatgatgcggagtcctccgatgaagacggctatgactggggtccggccactgacctgtgacctctcgcaggctgccagctggtccgtcctccttctccctccctggggctgggactcagtttcccatacagaacccacaaccttacctccctccgcctggtctttaataaacagagtattttcaca

SEQ ID NO: 358055 - DNA, 3112 bp, Homo sapiens
cccctcaccctggtccgtctccctgtgtctgtggtcgtcagttccactggcaggggacctgcctccctgttgccaccacaagagaggaaaagttggtcaaacaggtggggaggccagagctacaagcctcgggttccctccccaccacccgtgccaggcaggcacccgggccctggcacctgctgcctgcccagaggccacccagcctcctagacaggtggctgacatggaggagctgaccatctgggaacagcacacggccacactgtccaaggacccccgccggggctttggcattgcgatctctggaggccgagaccggcccggtggatccatggttgtatctgacgtggtacctggagggccggcggagggcaggctacagacaggcgaccacatcgtcatggtgaacggggtttccatggagaatgccacctccgcgtttgccattcagatactcaagacctgcaccaagatggccaacatcacagtgaaacgtccccggaggatccacctgcccgccaccaaagccagcccctccagcccagggcgccaggactcggatgaagacgatgggccccagcgggtggaggaggtggaccagggccggggctatgacggcgactcatccagtggctccggccgctcctgggacgagcgctcccgccggccgaggcctggtcgccggggccgggccggcagccatgggcgtaggagcccaggtggtggctctgaggccaacgggctggccctggtgtccggctttaagcggctgccacggcaggacgtgcagatgaagcctgtgaagtcagtgctggtgaagaggagagacagcgaagagtttggcgtcaagctgggcagtcagatcttcatcaagcacattacagattcgggcctggctgcccggcaccgtgggctgcaggaaggagatctcattctacagatcaacggggtgtctagccagaacctgtcactgaacgacacccggcgactgattgagaagtcagaagggaagctaagcctgctggtgctgagagatcgtgggcagttcctggtgaacattccgcctgctgtcagtgacagcgacagctcgccattggaggacatctcggacctcgcctcggagctatcgcaggcaccaccatcccacatcccaccaccaccccggcatgctcagcggagccccgaggccagccagaccgactctcccgtggagagtccccggcttcggcgggaaagttcagtagattccagaaccatctcggaaccagatgagcaacggtcagagttgcccagggaaagcagctatgacatctacagagtgcccagcagtcagagcatggaggatcgtgggtacagccccgacacgcgtgtggtccgcttcctcaagggcaagagcatcgggctgcggctggcagggggcaatgacgtgggcatcttcgtgtccggggtgcaggcgggcagcccggccgacgggcagggcatccaggagggagatcagattctgcaggtgaatgacgtgccattccagaacctgacacgggaggaggcagtgcagttcctgctggggctgccaccaggcgaggagatggagctggtgacgcagcggaagcaggacattttctggaaaatggtgcagtcccgcgtgggtgactccttctacatccgcactcactttgagctggagcccagtccaccgtctggcctgggcttcacccgtggcgacgtcttccacgtgctggacacgctgcaccccggccccgggcagagccacgcacgaggaggccactggctggcggtgcgcatgggtcgtgacctgcgggagcaagagcggggcatcattcccaaccagagcagggcggagcagctggccagcctggaagctgcccagagggccgtgggagtcgggcccggctcctccgcgggctccaatgctcgggccgagttctggcggctgcggggtcttcgtcgaggagccaagaagaccactcagcggagccgtgaggacctctcagctctgacccgacagggccgctacccgccctacgaacgagtggtgttgcgagaagccagtttcaagcgcccggtagtgatcctgggacccgtggccgacattgctatgcagaagttgactgctgagatgcctgaccagtttgaaatcgcagagactgtgtccaggaccgacagcccctccaagatcatcaaactagacaccgtgcgggtgattgcagaaaaagacaagcatgcgctcctggatgtgaccccctccgccatcgagcgcctcaactatgtgcagtactaccccattgtggtcttcttcatccccgagagccggccggccctcaaggcactgcgccagtggctggcgcctgcctcccgccgcagcacccgtcgcctctacgcacaagcccagaagctgcgaaaacacagcagccacctcttcacagccaccatccctctgaatggcacgagtgacacctggtaccaggagctcaaggccatcattcgagagcagcagacgcggcccatctggacggcggaagatcagctggatggctccttggaggacaacctagacctccctcaccacggcctggccgacagctccgctgacctcagctgcgacagccgcgttaacagcgactacgagacggacggcgagggcggcgcgtacacggatggcgagggctacacagacggcgagggggggccctacacggatgtggatgatgagcccccggctccagccctggcccggtcctcggagcccgtgcaggcagatgagtcccagagcccgagggatcgtgggagaatctcggctcatcagggggcccaggtggacagccgccacccccagggacagtggcgacaggacagcatgcgaacctatgaacgggaagccctgaagaaaaagtttacgcgagtccatgatgcggagtcctccgatgaagacggctatgactggggtccggccactgacctgtgacctctcgcaggctgccagctggtccgtcctccttctccctccctggggctgggactcagtttcccatacagaacccacaaccttacctccctccgcctggtctttaataaacagagtattttcaca

SEQ ID NO: 358056 - DNA, 1259 bp, Homo sapiens
gctgcatagtgcagctgtgctattacgtccaggagggacgtgtgaatcatgtcgactactgcaccgtgcacgaactgatgatcgcgacgacgaatgccgaatgttggtccgtgggtcgttgatgcttgaagaccactcagcggagccgtgaggacctctcagctctgacccgacagggccgctacccgccctacgaacgagtggtgttgcgagaagccagtttcaagcgcccggtagtgatcctgggacccgtggccgacattgctatgcagaagttgactgctgagatgcctgaccagtttgaaatcgcagagactgtgtccaggaccgacagcccctccaagatcatcaaactagacaccgtgcgggtgattgcagaaaaagacaagcatgcgctcctggatgtgaccccctccgccatcgagcgcctcaactatgtgcagtactaccccattgtggtcttcttcatccccgagagccggccggccctcaaggcactgcgccagtggctggcgcctgcctcccgccgcagcacccgtcgcctctacgcacaagcccagaagctgcgaaaacacagcagccacctcttcacagccaccatccctctgaatggcacgagtgacacctggtaccaggagctcaaggccatcattcgagagcagcagacgcggcccatctggacggcggaagatcagctggatggctccttggaggacaacctagacctccctcaccacggcctggccgacagctccgctgacctcagctgcgacagccgcgttaacagcgactacgagacggacggcgagggcggcgcgtacacggatggcgagggctacacagacggcgagggggggccctacacggatgtggatgatgagcccccggctccagccctggcccggtcctcggagcccgtgcaggcagatgagtcccagagcccgagggatcgtgggagaatctcggctcatcagggggcccaggtggacagccgccacccccagggacagtggcgacaggacagcatgcgaacctatgaacgggaagccctgaagaaaaagtttacgcgagtccatgatgcggagtcctccgatgaagacggctatgactggggtccggccactgacctgtgacctctcgcaggctgccagctggtccgtcctccttctccctccctggggctgggactcagtttcccatacagaacccacaaccttacctccctccgcctggtctttaataaacagagtattttcaca

SEQ ID NO: 358057 - DNA, 377 bp, Homo sapiens
attgaaacaatgatgatgttatgagcaatagaatgcccttagcctgtgcatggcaacatcacgagtggcacggtgacctggtgtccccgccccgtggagatgtcattgacacaatcagatctcgggtcctacgggcgacatcactgttctccttatgatgccatcaaggtgttaggatgggagggcccgcacctggactgcttacagcaggagaatgctcccaggcacccgtctccagagtcctgcctcagtttccctcctccccccttacagagtttggcgtcaagctgggcagtcagatcttcatcaagcacattacagattcgggcctggctgcccggcaccgtgggctgcaggaaggagatctcattctacag

SEQ ID NO: 358058 - DNA, 543 bp, Homo sapiens
atatcatgcagacctgtctgcaagctgaggagcaaggaagccagtcagagtcccaaagctgaagaacttggagtctgatgtttgagggcaggaagcattcagcacaggagaaggatgtaggctgggaggctaagccagtttagccttttcacatttttctgcctgctttatatcttggctgtgctggcagctgattagatggtgcccacctagattaagggtgggtctgcctttcccagcccactgactcaaatgttaatctccttcggcaacaccctcacagacacacccaggatcaatactttgcatccttcaatcaagttgacactcattattaaccatcacaatacccatatatatacacacttctagaattatttctttgtctacccatctatatttatattcagctaagcatgaattaatactaatgtctccaactgtaatccagctccatgagattcattctagccttccctccactattgtcctatgaccctgccaaatccccctctgtgaaaaacacccaagaatgatcaatta

SEQ ID NO: 358059 - DNA, 3097 bp, Homo sapiens
tccaggaatcgatagtgcattcgtgcgcgcggccgcccgtcgcttcgcacagggctggatggttgtattgggcagggtggctccaggatgttaggaactgtgaagatggaagggcatgaaaccagcgactggaacagctactacgcagacacgcaggaggcctactcctccgtcccggtcagcaacatgaactcaggcctgggctccatgaactccatgaacacctacatgaccatgaacaccatgactacgagcggcaacatgaccccggcgtccttcaacatgtcctatgccaacccgggcctaggggccggcctgagtcccggcgcagtagccggcatgccggggggctcggcgggcgccatgaacagcatgactgcggccggcgtgacggccatgggtacggcgctgagcccgagcggcatgggcgccatgggtgcgcagcaggcggcctccatgaatggcctgggcccctacgcggccgccatgaacccgtgcatgagccccatggcgtacgcgccgtccaacctgggccgcagccgcgcgggcggcggcggcgacgccaagacgttcaagcgcagctacccgcacgccaagccgccctactcgtacatctcgctcatcaccatggccatccagcaggcgcccagcaagatgctcacgctgagcgagatctaccagtggatcatggacctcttcccctattaccggcagaaccagcagcgctggcagaactccatccgccactcgctgtccttcaatgactgcttcgtcaaggtggcacgctccccggacaagccgggcaagggctcctactggacgctgcacccggactccggcaacatgttcgagaacggctgctacttgcgccgccagaagcgcttcaagtgcgagaagcagccgggggccggcggcgggggcgggagcggaagcgggggcagcggcgccaagggcggccctgagagccgcaaggacccctctggcgcctctaaccccagcgccgactcgcccctccatcggggtgtgcacgggaagaccggccagctagagggcgcgccggcccccgggcccggccgccagcccccagactctggaccacagtggggcgacggcgacagggggcgcctcggagttgaagactccagcctcctcaactgcgccccccataagctccgggcccggggcgctggcctctgtgcccgcctctcacccggcacacggcttggcaccccacgagtcccagctgcacctgaaaggggacccccactactccttcaaccacccgttctccatcaacaacctcatgtcctcctcggagcagcagcataagctggacttcaaggcatacgaacaggcactgcaatactcgccttacggctctacgttgcccgccagcctgcctctaggcagcgcctcggtgaccaccaggagccccatcgagccctcagccctggagccggcgtactaccaaggtgtgtattccagacccgtcctaaacacttcctagctcccgggactggggggtttgtctggcatagccatgctggtagcaagagagaaaaaatcaacagcaaacaaaaccacacaaaccaaaccgtcaacagcataataaaatcccaacaactatttttatttcatttttcatgcacaacctttcccccagtgcaaaagactgttactttattattgtattcaaaattcattgtgtatattactacaaagacaaccccaaaccaatttttttcctgttcggtttatactgatccacaagtgtatatatgaaattctcctccttccttgcccccctctctttcttccctctttcccctccagacattctagtttgtggagggttatttaaaaaaacaaaaaaggaagatggtcaagtttgtaaaatatttgtttgtgctttttccccctccttacctgaccccctacgagtttacaggtctgtggcaatactcttaaccataagaattgaaatggtgaagaaacaagtatacactagaggctcttaaaagtattgaaagacaatactgctgttatatagcaagacataaacagattataaacatcagagccatttgcttctcagtttacatttctgatacatgcagatagcagatgtctttaaatgaaatacatgtatattgtgtatggacttaattatgcacatgctcagatgtgtagacatcctccgtatatttacataacatatagaggtaatagataggtgatatacatgatacattctcaagagttgcttgaccgaaagttacaaggaccccaacccctttgtcctctctacccacagatggccctgggaatcaattcctcaggaattgccctcaagaactctgcttcttgctttgcagagtgccatggtcatgtcattctgaggtcacataacacataaaattagtttctatgagtgtataccatttaaagaatttttttttcagtaaaagggaatattacaatgttggaggagagataagttatagggagctggatttcaaaacgtggtccaagattcaaaaatcctattgatagtggccattttaatcattgccatcgtgtgcttgtttcatccagtgttatgcactttccacagttggacatggtgttagtatagccagacgggtttcattattatttctctttgctttctcaatgttaatttattgcatggtttattctttttctttacagctgaaattgctttaaatgatggttaaaattacaaattaaattgttaatttttatcaatgtgattgtaattaaaaatattttgatttaaataacaaaaataataccagattttaagccgtggaaaatgttcttgatcatttgcagttaaggactttaaataaatcaaatgttaacaaaaaacatttctgttattttttttcacttaactaaatccgaagtgaatatttctgaatacgatatttttcaaattctagaactgaatataaatgacaaaaatgaaaataaaattgttttgtctgttgttataatgaatgtgtagctagtaaaaaggagtgaaagaaattcaagtaaagtgtataagttgatttaatattccaagagttga

SEQ ID NO: 358060 - DNA, 1589 bp, Homo sapiens
ctactactactaaattcgcggccgcgtcgaccatgctggtagcaagagagaaaaaatcaacagcaaacaaaaccacacaaaccaaaccgtcaacagcataataaaatcccaacaactatttttatttcatttttcatgcacaacctttcccccagtgcaaaagactgttactttattattgtattcaaaattcattgtgtatattactacaaagacaaccccaaaccaatttttttcctgttcggtttatactgatccacaagtgtatatatgaaattctcctccttccttgcccccctctctttcttccctctttcccctccagacattctagtttgtggagggttatttaaaaaaacaaaaaaggaagatggtcaagtttgtaaaatatttgtttgtgctttttccccctccttacctgaccccctacgagtttacaggtctgtggcaatactcttaaccataagaattgaaatggtgaagaaacaagtatacactagaggctcttaaaagtattgaaagacaatactgctgttatatagcaagacataaacagattataaacatcagagccatttgcttctcagtttacatttctgatacatgcagatagcagatgtctttaaatgaaatacatgtatattgtgtatggacttaattatgcacatgctcagatgtgtagacatcctccgtatatttacataacatatagaggtaatagataggtgatatacatgatacattctcaagagttgcttgaccgaaagttacaaggaccccaacccctttgtcctctctacccacagatggccctgggaatcaattcctcaggaattgccctcaagaactctgcttcttgctttgcagagtgccatggtcatgtcattctgaggtcacataacacataaaattagtttctatgagtgtataccatttaaagaatttttttttcagtaaaagggaatattacaatgttggaggagagataagttatagggagctggatttcaaaacgtggtccaagattcaaaaatcctattgatagtggccattttaatcattgccatcgtgtgcttgtttcatccagtgttatgcactttccacagttggacatggtgttagtatagccagacgggtttcattattatttctctttgctttctcaatgttaatttattgcatggtttattctttttctttacagctgaaattgctttaaatgatggttaaaattacaaattaaattgttaatttttatcaatgtgattgtaattaaaaatattttgatttaaataacaaaaataataccagattttaagccgtggaaaatgttcttgatcatttgcagttaaggactttaaataaatcaaatgttaacaaaaaacatttctgttattttttttcacttaactaaatccgaagtgaatatttctgaatacgatatttttcaaattctagaactgaatataaatgacaaaaatgaaaataaaattgttttgtctgttgttataatgaatgtgtagctagtaaaaaggagtgaaagaaattcaagtaaagtgtataagttgatttaatattccaagagttga

SEQ ID NO: 358061 - DNA, 1822 bp, Homo sapiens
tccaggaatcgatagtgcattcgtgcgcgcggccgcccgtcgcttcgcacagggctggatggttgtattgggcagggtggctccaggatgttaggaactgtgaagatggaagggcatgaaaccagcgactggaacagctactacgcagacacgcaggaggcctactcctccgtcccggtcagcaacatgaactcaggcctgggctccatgaactccatgaacacctacatgaccatgaacaccatgactacgagcggcaacatgaccccggcgtccttcaacatgtcctatgccaacccgggcctaggggccggcctgagtcccggcgcagtagccggcatgccggggggctcggcgggcgccatgaacagcatgactgcggccggcgtgacggccatgggtacggcgctgagcccgagcggcatgggcgccatgggtgcgcagcaggcggcctccatgaatggcctgggcccctacgcggccgccatgaacccgtgcatgagccccatggcgtacgcgccgtccaacctgggccgcagccgcgcgggcggcggcggcgacgccaagacgttcaagcgcagctacccgcacgccaagccgccctactcgtacatctcgctcatcaccatggccatccagcaggcgcccagcaagatgctcacgctgagcgagatctaccagtggatcatggacctcttcccctattaccggcagaaccagcagcgctggcagaactccatccgccactcgctgtccttcaatgactgcttcgtcaaggtggcacgctccccggacaagccgggcaagggctcctactggacgctgcacccggactccggcaacatgttcgagaacggctgctacttgcgccgccagaagcgcttcaagtgcgagaagcagccgggggccggcggcgggggcgggagcggaagcgggggcagcggcgccaagggcggccctgagagccgcaaggacccctctggcgcctctaaccccagcgccgactcgcccctccatcggggtgtgcacgggaagaccggccagctagagggcgcgccggcccccgggcccggccgccagcccccagactctggaccacagtggggcgacggcgacagggggcgcctcggagttgaagactccagcctcctcaactgcgccccccataagctccgggcccggggcgctggcctctgtgcccgcctctcacccggcacacggcttggcaccccacgagtcccagctgcacctgaaaggggacccccactactccttcaaccacccgttctccatcaacaacctcatgtcctcctcggagcagcagcataagctggacttcaaggcatacgaacaggcactgcaatactcgccttacggctctacgttgcccgccagcctgcctctaggcagcgcctcggtgaccaccaggagccccatcgagccctcagccctggagccggcgtactaccaaggtgtgtattccagacccgtcctaaacacttcctagctcccgggactggggggtttgtctggcatagccatgctggtagcaagagagaaaaaatcaacagcaaacaaaaccacacaaaccaaaccgtcaacagcataataaaatcccaacaactatttttatttcatttttcatgcacaacctttcccccagtgcaaaagactgttactttattattgaagcagcaaacatatcctacacaaacgcctgagccctactaataacattaattgccacatccctaatccgctgcctacagcactcgaattatctatttgatccctagggcaaccacgtttcccacgcctgttc

SEQ ID NO: 358062 - DNA, 557 bp, Homo sapiens
ctactactactaaattcgcggccgcgtcgattttttttttttgacaccggcttaagccttctgtgtttcctttgagccttttcactacaaaatcaaatattaatttaactacctttcctccttccccaatgtatcacttttctttatctgagaattcttccaatgaaaataaaatatcagctgtggctgatagaattaagttgtgtccaacggagactcatgaactctcttctcattaaaagagaaacgaaacttagccatcagggtagctctggaggaggtgggaggaggggagttaattcactctcgcaggggaagcgttgtaccgacaggacattttagggtagccgctattttgcattttgtgaagattgttttaaattttgattcaaaaatgtcgttcctaagaacttaaagttgataatttgtttccttctaaggagctcttaaatgcaacttcacactccatagttgcttgggatcacaaaatcattaatctcctttgatagcaggctcactttccagtccacctatttctttgtaagtctgtacggatt

SEQ ID NO: 358063 - DNA, 651 bp, Homo sapiens
tgctctagaggatccttatggctgttactaaatggctgttacctaaatggcgttacctaaatggctgttacctaaatggctgttacctaaatggctgtacctaaatggctgttacctaaatggctgcatcgtgtgcttgtttcatccagtgttatgcactttccacagttggacatggtgttagtatagccagacgggtttcattattatttctctttgctttctcaatgttaatttattgcatggtttattctttttctttacagctgaaattgctttaaatgatggttaaaattacaaattaaattgttaatttttatcaatgtgattgtaattaaaaatattttgatttaaataacaaaaataataccagattttaagccgtggaaaatgttcttgatcatttgcagttaaggactttaaataaatcaaatgttaacaaaaaacatttctgttattttttttcacttaactaaatccgaagtgaatatttctgaatacgatatttttcaaattctagaactgaatataaatgacaaaaatgaaaataaaattgttttgtctgttgttataatgaatgtgtagctagtaaaaaggagtgaaagaaattcaagtaaagtgtataagttgatttaatattccaagagttga

SEQ ID NO: 358064 - DNA, 1778 bp, Homo sapiens
catatcgagctcggcccggattataaaccgaacaggcactgcaatactcgccttacggctctacgttgcccgccagcctgcctctaggcagcgcctcggtgaccaccaggagccccatcgagccctcagccctggagccggcgtactaccaaggtgtgtattccagacccgtcctaaacacttcctagctcccgggactggggggtttgtctggcatagccatgctggtagcaagagagaaaaaatcaacagcaaacaaaaccacacaaaccaaaccgtcaacagcataataaaatcccaacaactatttttatttcatttttcatgcacaacctttcccccagtgcaaaagactgttactttattattgtattcaaaattcattgtgtatattactacaaagacaaccccaaaccaatttttttcctgttcggtttatactgatccacaagtgtatatatgaaattctcctccttccttgcccccctctctttcttccctctttcccctccagacattctagtttgtggagggttatttaaaaaaacaaaaaaggaagatggtcaagtttgtaaaatatttgtttgtgctttttccccctccttacctgaccccctacgagtttacaggtctgtggcaatactcttaaccataagaattgaaatggtgaagaaacaagtatacactagaggctcttaaaagtattgaaagacaatactgctgttatatagcaagacataaacagattataaacatcagagccatttgcttctcagtttacatttctgatacatgcagatagcagatgtctttaaatgaaatacatgtatattgtgtatggacttaattatgcacatgctcagatgtgtagacatcctccgtatatttacataacatatagaggtaatagataggtgatatacatgatacattctcaagagttgcttgaccgaaagttacaaggaccccaacccctttgtcctctctacccacagatggccctgggaatcaattcctcaggaattgccctcaagaactctgcttcttgctttgcagagtgccatggtcatgtcattctgaggtcacataacacataaaattagtttctatgagtgtataccatttaaagaatttttttttcagtaaaagggaatattacaatgttggaggagagataagttatagggagctggatttcaaaacgtggtccaagattcaaaaatcctattgatagtggccattttaatcattgccatcgtgtgcttgtttcatccagtgttatgcactttccacagttggacatggtgttagtatagccagacgggtttcattattatttctctttgctttctcaatgttaatttattgcatggtttattctttttctttacagctgaaattgctttaaatgatggttaaaattacaaattaaattgttaatttttatcaatgtgattgtaattaaaaatattttgatttaaataacaaaaataataccagattttaagccgtggaaaatgttcttgatcatttgcagttaaggactttaaataaatcaaatgttaacaaaaaacatttctgttattttttttcacttaactaaatccgaagtgaatatttctgaatacgatatttttcaaattctagaactgaatataaatgacaaaaatgaaaataaaattgttttgtctgttgttataatgaatgtgtagctagtaaaaaggagtgaaagaaattcaagtaaagtgtataagttgatttaatattccaagagttga

SEQ ID NO: 358065 - DNA, 2886 bp, Homo sapiens
tccaggaatcgatagtgcattcgtgcgcgcggccgcccgtcgcttcgcacagggctggatggttgtattgggcagggtggctccaggatgttaggaactgtgaagatggaagggcatgaaaccagcgactggaacagctactacgcagacacgcaggaggcctactcctccgtcccggtcagcaacatgaactcaggcctgggctccatgaactccatgaacacctacatgaccatgaacaccatgactacgagcggcaacatgaccccggcgtccttcaacatgtcctatgccaacccgggcctaggggccggcctgagtcccggcgcagtagccggcatgccggggggctcggcgggcgccatgaacagcatgactgcggccggcgtgacggccatgggtacggcgctgagcccgagcggcatgggcgccatgggtgcgcagcaggcggcctccatgaatggcctgggcccctacgcggccgccatgaacccgtgcatgagccccatggcgtacgcgccgtccaacctgggccgcagccgcgcgggcggcggcggcgacgccaagacgttcaagcgcagctacccgcacgccaagccgccctactcgtacatctcgctcatcaccatggccatccagcaggcgcccagcaagatgctcacgctgagcgagatctaccagtggatcatggacctcttcccctattaccggcagaaccagcagcgctggcagaactccatccgccactcgctgtccttcaatgactgcttcgtcaaggtggcacgctccccggacaagccgggcaagggctcctactggacgctgcacccggactccggcaacatgttcgagaacggctgctacttgcgccgccagaagcgcttcaagtgcgagaagcagccgggggccggcggcgggggcgggagcggaagcgggggcagcggcgccaagggcggccctgagagccgcaaggacccctctggcgcctctaaccccagcgccgactcgcccctccatcggggtgtgcacgggaagaccggccagctagagggcgcgccggcccccgggcccggccgccagcccccagactctggaccacagtggggcgacggcgacagggggcgcctcggagttgaagactccagcctcctcaactgcgccccccataagctccgggcccggggcgctggcctctgtgcccgcctctcacccggcacacggcttggcaccccacgagtcccagctgcacctgaaaggggacccccactactccttcaaccacccgttctccatcaacaacctcatgtcctcctcggagcagcagcataagctggacttcaaggcatacgaacaggcactgcaatactcgccttacggctctacgttgcccgccagcctgcctctaggcagcgcctcggtgaccaccaggagccccatcgagccctcagccctggagccggcgtactaccaaggtgtgtattccagacccgtcctaaacacttcctagctcccgggactggggggtttgtctggcatagccatgctggtagcaagagagaaaaaatcaacagcaaacaaaaccacacaaaccaaaccgtcaacagcataataaaatcccaacaactatttttatttcatttttcatgcacaacctttcccccagtgcaaaagactgttactttattattgtattcaaaattcattgtgtatattactacaaagacaaccccaaaccaatttttttcctgttcggtttatactgatccacaagtgtatatatgaaattctcctccttccttgcccccctctctttcttccctctttcccctccagacattctagtttgtggagggttatttaaaaaaacaaaaaaggaagatggtcaagtttgtaaaatatttgtttgtgctttttccccctccttacctgaccccctacgagtttacaggtctgtggcaatactcttaaccataagaattgaaatggtgaagaaacaagtatacactagaggctcttaaaagtattgaaagacaatactgctgttatatagcaagacataaacagattataaacatcagagccatttgcttctcagtttacatttctgatacatgcagatagcagatgtctttaaatgaaatacatgtatattgtgtatggacttaattatgcacatgctcagatgtgtagacatcctccgtatatttacataacatatagaggtaatagataggtgatatacatgatacattctcaagagttgcttgaccgaaagttacaaggaccccaacccctttgtcctctctacccacagatggccctgggaatcaattcctcaggaattgccctcaagaactctgcttcttgctttgcagagtgccatggtcatgtcattctgaggtcacataacacataaaattagtttctatgagtgtataccatttaaagaatttttttttcagtaaaagggaatattacaatgttggaggagagataagttatagggagctggatttcaaaacgtggtccaagattcaaaaatcctattgatagtggccattttaatcattgccatcgtgtgcttgtttcatccagtgttatgcactttccacagttggacatggtgttagtatagccagacgggtttcattattatttctctttgctttctcaatgttaatttattgcatggtttattctttttctttacagctgaaattgctttaaatgatggttaaaattacaaattaaattgttaatttttatcaatgtgattgtaattaaaaatattttgatttaaataacaaaaataataccagattttaagccgtggaaaatgttcttgatcatttgcagttaaggactttaaataaatcaaatgttaac

SEQ ID NO: 358066 - DNA, 1630 bp, Homo sapiens
gtctatctaacaggtcctccccaagactcaagaaggagactaactccgccatcagcacccaaagctgaaattctaactaaactattccctgcaaccaaaacaagcattccattcgtatcaaaccaaaccgtcaacagcataataaaatcccaacaactatttttatttcatttttcatgcacaacctttcccccagtgcaaaagactgttactttattattgtattcaaaattcattgtgtatattactacaaagacaaccccaaaccaatttttttcctgttcggtttatactgatccacaagtgtatatatgaaattctcctccttccttgcccccctctctttcttccctctttcccctccagacattctagtttgtggagggttatttaaaaaaacaaaaaaggaagatggtcaagtttgtaaaatatttgtttgtgctttttccccctccttacctgaccccctacgagtttacaggtctgtggcaatactcttaaccataagaattgaaatggtgaagaaacaagtatacactagaggctcttaaaagtattgaaagacaatactgctgttatatagcaagacataaacagattataaacatcagagccatttgcttctcagtttacatttctgatacatgcagatagcagatgtctttaaatgaaatacatgtatattgtgtatggacttaattatgcacatgctcagatgtgtagacatcctccgtatatttacataacatatagaggtaatagataggtgatatacatgatacattctcaagagttgcttgaccgaaagttacaaggaccccaacccctttgtcctctctacccacagatggccctgggaatcaattcctcaggaattgccctcaagaactctgcttcttgctttgcagagtgccatggtcatgtcattctgaggtcacataacacataaaattagtttctatgagtgtataccatttaaagaatttttttttcagtaaaagggaatattacaatgttggaggagagataagttatagggagctggatttcaaaacgtggtccaagattcaaaaatcctattgatagtggccattttaatcattgccatcgtgtgcttgtttcatccagtgttatgcactttccacagttggacatggtgttagtatagccagacgggtttcattattatttctctttgctttctcaatgttaatttattgcatggtttattctttttctttacagctgaaattgctttaaatgatggttaaaattacaaattaaattgttaatttttatcaatgtgattgtaattaaaaatattttgatttaaataacaaaaataataccagattttaagccgtggaaaatgttcttgatcatttgcagttaaggactttaaataaatcaaatgttaacaaaaaacatttctgttattttttttcacttaactaaatccgaagtgaatatttctgaatacgatatttttcaaattctagaactgaatataaatgacaaaaatgaaaataaaattgttttgtctgttgttataatgaatgtgtagctagtaaaaaggagtgaaagaaattcaagtaaagtgtataagttgatttaatattccaagagttga

SEQ ID NO: 358067 - DNA, 447 bp, Homo sapiens
gcgtcccgtgttctgcaaagtgctctgcacttgcccccgggttaggtcccggacggccgccctccagtgcccaccactaaccccgccctccggggcttcttcactcgctgtctccactccaggcctactcctccgtcccggtcagcaacatgaactcaggcctgggctccatgaactccatgaacacctacatgaccatgaacaccatgactacgagcggcaacatgaccccggcgtccttcaacatgtcctatgccaacccgggcctaggggccggcctgagtcccggcgcagtagccggcatgccggggggctcggcgggcgccatgaacagcatgactgcggccggcgtgacggccatgggtacggcgctgagcccgagcggcatgggcgccatgggtgcgcagcaggcggcctccatgaatggcctgggcccctacgcggccg

SEQ ID NO: 358068 - DNA, 2876 bp, Homo sapiens
cacccctgggcttggcctgccttgccctgccgggaagtgatccccaaggcagggtgagagttccccatctgaggcgtttgttgcagctacctgcacttctagattcatcttcttgtgagccctgggcttaggagtcaccatggcaactgaagagttcatcatccgcatccccccataccactatatccatgtgctggaccagaacagcaacgtgtcccgtgtggaggtcgggccaaagacctacatccggcaggacaatgagagggtactgtttgcccccatgcgcatggtgaccgtccccccacgtcactactgcacagtggccaaccctgtgtctcgggatgcccagggcttggtgctgtttgatgtcacagggcaagttcggcttcgccacgctgacctcgagatccggctggcccaggaccccttccccctgtacccaggggaggtgctggaaaaggacatcacacccctgcaggtggttctgcccaacactgccctccatctaaaggcgctgcttgattttgaggataaagatggagacaaggtggtggcaggagatgagtggcttttcgagggacctggcacgtacatcccccggaaggaagtggaggtcgtggagatcattcaggccaccatcatcaggcagaaccaggctctgcggctcagggcccgcaaggagtgctgggaccgggacggcaaggagagggtgacaggggaagaatggctggtcaccacagtaggggcgtacctcccagcggtgtttgaggaggttctggatttggtggacgccgtcatccttacggaaaagacagccctgcacctccgggctcggcggaacttccgggacttcaggggagtgtcccgccgcactggggaggagtggctggtaacagtgcaggacacagaggcccacgtgccagatgtccacgaggaggtgctgggggttgtgcccatcaccaccctgggcccccacaactactgcgtgattctcgaccctgtcggaccggatggcaagaatcagctggggcagaagcgcgtggtcaagggagagaagtcttttttcctccagccaggagagcagctggaacaaggcatccaggatgtgtatgtgctgtcggagcagcaggggctgctgctgagggccctgcagcccctggaggagggggaggatgaggagaaggtctcacaccaggctggggaccactggctcatccgcggacccctggagtatgtgccatctgccaaagtggaggtggtggaggagcgccaggccatccctctagacgagaacgagggcatctatgtgcaggatgtcaagaccggaaaggtgcgcgctgtgattggaagcacctacatgctgacccaggacgaagtcctgtgggagaaagagctgcctcccggggtggaggagctgctgaacaaggggcaggaccctctggcagacaggggtgagaaggacacagctaagagcctccagcccttggcgccccggaacaagacccgtgtggtcagctaccgcgtgccccacaacgctgcggtgcaggtgtacgactaccgagagaagcgagcccgcgtggtcttcgggcctgagctggtgtcgctgggtcctgaggagcagttcacagtgttgtccctctcagctgggcggcccaagcgtccccatgcccgccgtgcgctctgcctgctgctggggcctgacttcttcacagacgtcatcaccatcgaaacggcggatcatgccaggctgcaactgcagctggcctacaactggcactttgaggtgaatgaccggaaggacccccaagagacggccaagctcttttcagtgccagactttgtaggtgatgcctgcaaagccatcgcatcccgggtgcggggggccgtggcctctgtcactttcgatgacttccataagaactcagcccgcatcattcgcactgctgtctttggctttgagacctcggaagcgaagggccccgatggcatggccctgcccaggccccgggaccaggctgtcttcccccaaaacgggctggtggtcagcagtgtggacgtgcagtcagtggagcctgtggatcagaggacccgggacgccctgcaacgcagcgtccagctggccatcgagatcaccaccaactcccaggaagcggcggccaagcatgaggctcagagactggagcaggaagcccgcggccggcttgagcggcagaagatcctggaccagtcagaagccgagaaagctcgcaaggaacttttggagctggaggctctgagcatggccgtggagagcaccgggactgccaaggcggaggccgagtcccgtgcggaggcagcccggattgagggagaagggtccgtgctgcaggccaagctaaaagcacaggccttggccattgaaacggaggctgagctccagagggtccagaaggtccgagagctggaactggtctatgcccgggcccagctggagctggaggtgagcaaggctcagcagctggctgaggtggaggtgaagaagttcaagcagatgacagaggccataggccccagcaccatcagggaccttgctgtggctgggcctgagatgcaggtaaaactgctccagtccctgggcctgaaatcaaccctcatcaccgatggctccactcccatcaacctcttcaacacagcctttgggctgctggggatggggcccgagggtcagcccctgggcagaagggtggccagtgggcccagccctggggaggggatatccccccagtctgctcaggcccctcaagctcctggagacaaccacgtggtgcctgtactgcgctaactcctgattaatacaatggaagtttctgggcatttacaatttcaaaaaatttctc

SEQ ID NO: 358069 - DNA, 2892 bp, Homo sapiens
cacccctgggcttggcctgccttgccctgccgggaagtgatccccaaggcagggtgagagttccccatctgaggcgtttgttgcagctacctgcacttctagatgctccccaggttcatcctgtgtcgtctcccccacctaccagtctcatcttcttgtgagccctgggcttaggagtcaccatggcaactgaagagttcatcatccgcatccccccataccactatatccatgtgctggaccagaacagcaacgtgtcccgtgtggaggtcgggccaaagacctacatccggcaggacaatgagagggtactgtttgcccccatgcgcatggtgaccgtccccccacgtcactactgcacagtggccaaccctgtgtctcgggatgcccagggcttggtgctgtttgatgtcacagggcaagttcggcttcgccacgctgacctcgagatccggctggcccaggaccccttccccctgtacccaggggaggtgctggaaaaggacatcacacccctgcaggtggttctgcccaacactgccctccatctaaaggcgctgcttgattttgaggataaagatggagacaaggtggtggcaggagatgagtggcttttcgagggacctggcacgtacatcccccggaaggaagtggaggtcgtggagatcattcaggccaccatcatcaggcagaaccaggctctgcggctcagggcccgcaaggagtgctgggaccgggacggcaaggagagggtgacaggggaagaatggctggtcaccacagtaggggcgtacctcccagcggtgtttgaggaggttctggatttggtggacgccgtcatccttacggaaaagacagccctgcacctccgggctcggcggaacttccgggacttcaggggagtgtcccgccgcactggggaggagtggctggtaacagtgcaggacacagaggcccacgtgccagatgtccacgaggaggtgctgggggttgtgcccatcaccaccctgggcccccacaactactgcgtgattctcgaccctgtcggaccggatggcaagaatcagctggggcagaagcgcgtggtcaagggagagaagtcttttttcctccagccaggagagcagctggaacaaggcatccaggatgtgtatgtgctgtcggagcagcaggggctgctgctgagggccctgcagcccctggaggagggggaggatgaggagaaggtctcacaccaggctggggaccactggctcatccgcggacccctggagtatgtgccatctgccaaagtggaggtggtggaggagcgccaggccatccctctagacgagaacgagggcatctatgtgcaggatgtcaagaccggaaaggtgcgcgctgtgattggaagcacctacatgctgacccaggacgaagtcctgtgggagaaagagctgcctcccggggtggaggagctgctgaacaaggggcaggaccctctggcagacaggggtgagaaggacacagctaagagcctccagcccttggcgccccggaacaagacccgtgtggtcagctaccgcgtgccccacaacgctgcggtgcaggtgtacgactaccgagagaagcgagcccgcgtggtcttcgggcctgagctggtgtcgctgggtcctgaggagcagttcacagtgttgtccctctcagctgggcggcccaagcgtccccatgcccgccgtgcgctctgcctgctgctggggcctgacttcttcacagacgtcatcaccatcgaaacggcggatcatgccaggctgcaactgcagctggcctacaactggcactttgaggtgaatgaccggaaggacccccaagagacggccaagctcttttcagtgccagactttgtaggtgatgcctgcaaagccatcgcatcccgggtgcggggggccgtggcctctgtcactttcgatgacttccataagaactcagcccgcatcattcgcactgctgtctttggctttgagacctcggaagcgaagggccccgatggcatggccctgcccaggccccgggaccaggctgtcttcccccaaaacgggctggtggtcagcagtgtggacgtgcagtcagtggagcctgtggatcagaggacccgggacgccctgcaacgcagcgtccagctggccatcgagatcaccaccaactcccaggaagcggcggccaagcatgaggctcagagactggagcaggaagcccgcggccggcttgagcggcagaagatcctggaccagtcagaagccgagaaagctcgcaaggaacttttggagctggaggctctgagcatggccgtggagagcaccgggactgccaaggcggaggccgagtcccgtgcggaggcagcccggattgagggagaagggtccgtgctgcaggccaagctaaaagcacaggccttggccattgaaacggaggctgagctccagagggtccagaaggtccgagagctggaactggtctatgcccgggcccagctggagctggaggtgagcaaggctcagcagctggctgaggtggaggtgaagaagttcaagcagatgacagaggccataggccccagcaccatcagggaccttgctgtggctgggcctgagatgcaggtaaaactgctccagtccctgggcctgaaatcaaccctcatcaccgatggctccactcccatcaacctcttcaacacagcctttgggctgctggggatggggcccgagggtcagcccctgggcagaagggtggccagtgggcccagccctggggaggggatatccccccagtctgctcaggcccctcaagctcctggagacaaccacgtggtgcctgtactgcgctaactcctgattaatacaatggaagtttctg

SEQ ID NO: 358070 - DNA, 2782 bp, Homo sapiens
ggctaggtcgagctgggtgtgaatcggccgaggtggctcatcttcttgtgagccctgggcttaggagtcaccatggcaactgaagagttcatcatccgcatccccccataccactatatccatgtgctggaccagaacagcaacgtgtcccgtgtggaggtcgggccaaagacctacatccggcaggacaatgagagggtactgtttgcccccatgcgcatggtgaccgtccccccacgtcactactgcacagtggccaaccctgtgtctcgggatgcccagggcttggtgctgtttgatgtcacagggcaagttcggcttcgccacgctgacctcgagatccggctggcccaggaccccttccccctgtacccaggggaggtgctggaaaaggacatcacacccctgcaggtggttctgcccaacactgccctccatctaaaggcgctgcttgattttgaggataaagatggagacaaggtggtggcaggagatgagtggcttttcgagggacctggcacgtacatcccccggaaggaagtggaggtcgtggagatcattcaggccaccatcatcaggcagaaccaggctctgcggctcagggcccgcaaggagtgctgggaccgggacggcaaggagagggtgacaggggaagaatggctggtcaccacagtaggggcgtacctcccagcggtgtttgaggaggttctggatttggtggacgccgtcatccttacggaaaagacagccctgcacctccgggctcggcggaacttccgggacttcaggggagtgtcccgccgcactggggaggagtggctggtaacagtgcaggacacagaggcccacgtgccagatgtccacgaggaggtgctgggggttgtgcccatcaccaccctgggcccccacaactactgcgtgattctcgaccctgtcggaccggatggcaagaatcagctggggcagaagcgcgtggtcaagggagagaagtcttttttcctccagccaggagagcagctggaacaaggcatccaggatgtgtatgtgctgtcggagcagcaggggctgctgctgagggccctgcagcccctggaggagggggaggatgaggagaaggtctcacaccaggctggggaccactggctcatccgcggacccctggagtatgtgccatctgccaaagtggaggtggtggaggagcgccaggccatccctctagacgagaacgagggcatctatgtgcaggatgtcaagaccggaaaggtgcgcgctgtgattggaagcacctacatgctgacccaggacgaagtcctgtgggagaaagagctgcctcccggggtggaggagctgctgaacaaggggcaggaccctctggcagacaggggtgagaaggacacagctaagagcctccagcccttggcgccccggaacaagacccgtgtggtcagctaccgcgtgccccacaacgctgcggtgcaggtgtacgactaccgagagaagcgagcccgcgtggtcttcgggcctgagctggtgtcgctgggtcctgaggagcagttcacagtgttgtccctctcagctgggcggcccaagcgtccccatgcccgccgtgcgctctgcctgctgctggggcctgacttcttcacagacgtcatcaccatcgaaacggcggatcatgccaggctgcaactgcagctggcctacaactggcactttgaggtgaatgaccggaaggacccccaagagacggccaagctcttttcagtgccagactttgtaggtgatgcctgcaaagccatcgcatcccgggtgcggggggccgtggcctctgtcactttcgatgacttccataagaactcagcccgcatcattcgcactgctgtctttggctttgagacctcggaagcgaagggccccgatggcatggccctgcccaggccccgggaccaggctgtcttcccccaaaacgggctggtggtcagcagtgtggacgtgcagtcagtggagcctgtggatcagaggacccgggacgccctgcaacgcagcgtccagctggccatcgagatcaccaccaactcccaggaagcggcggccaagcatgaggctcagagactggagcaggaagcccgcggccggcttgagcggcagaagatcctggaccagtcagaagccgagaaagctcgcaaggaacttttggagctggaggctctgagcatggccgtggagagcaccgggactgccaaggcggaggccgagtcccgtgcggaggcagcccggattgagggagaagggtccgtgctgcaggccaagctaaaagcacaggccttggccattgaaacggaggctgagctccagagggtccagaaggtccgagagctggaactggtctatgcccgggcccagctggagctggaggtgagcaaggctcagcagctggctgaggtggaggtgaagaagttcaagcagatgacagaggccataggccccagcaccatcagggaccttgctgtggctgggcctgagatgcaggtaaaactgctccagtccctgggcctgaaatcaaccctcatcaccgatggctccactcccatcaacctcttcaacacagcctttgggctgctggggatggggcccgagggtcagcccctgggcagaagggtggccagtgggcccagccctggggaggggatatccccccagtctgctcaggcccctcaagctcctggagacaaccacgtggtgcctgtactgcgctaactcctgattaatacaatggaagtttctg

SEQ ID NO: 358071 - DNA, 2809 bp, Homo sapiens
cacccctgggcttggcctgccttgccctgccgggaagtgatccccaaggcagggtgagagttccccatctgaggcgtttgttgcagctacctgcacttctagattcatcttcttgtgagccctgggcttaggagtcaccatggcaactgaagagttcatcatccgcatccccccataccactatatccatgtgctggaccagaacagcaacgtgtcccgtgtggaggtcgggccaaagacctacatccggcaggacaatgagagggtactgtttgcccccatgcgcatggtgaccgtccccccacgtcactactgcacagtggccaaccctgtgtctcgggatgcccagggcttggtgctgtttgatgtcacagggcaagttcggcttcgccacgctgacctcgagatccggctggcccaggaccccttccccctgtacccaggggaggtgctggaaaaggacatcacacccctgcaggtggttctgcccaacactgccctccatctaaaggcgctgcttgattttgaggataaagatggagacaaggtggtggcaggagatgagtggcttttcgagggacctggcacgtacatcccccggaaggaagtggaggtcgtggagatcattcaggccaccatcatcaggcagaaccaggctctgcggctcagggcccgcaaggagtgctgggaccgggacggcaaggagagggtgacaggggaagaatggctggtcaccacagtaggggcgtacctcccagcggtgtttgaggaggttctggatttggtggacgccgtcatccttacggaaaagacagccctgcacctccgggctcggcggaacttccgggacttcaggggagtgtcccgccgcactggggaggagtggctggtaacagtgcaggacacagaggcccacgtgccagatgtccacgaggaggtgctgggggttgtgcccatcaccaccctgggcccccacaactactgcgtgattctcgaccctgtcggaccggatggcaagaatcagctggggcagaagcgcgtggtcaagggagagaagtcttttttcctccagccaggagagcagctggaacaaggcatccaggatgtgtatgtgctgtcggagcagcaggggctgctgctgagggccctgcagcccctggaggagggggaggatgaggagaaggtctcacaccaggctggggaccactggctcatccgcggacccctggagtatgtgccatctgccaaagtggaggtggtggaggagcgccaggccatccctctagacgagaacgagggcatctatgtgcaggatgtcaagaccggaaaggtgcgcgctgtgattggaagcacctacatgctgacccaggacgaagtcctgtgggagaaagagctgcctcccggggtggaggagctgctgaacaaggggcaggaccctctggcagacaggggtgagaaggacacagctaagagcctccagcccttggcgccccggaacaagacccgtgtggtcagctaccgcgtgccccacaacgctgcggtgcaggtgtacgactaccgagagaagcgagcccgcgtggtcttcgggcctgagctggtgtcgctgggtcctgaggagcagttcacagtgttgtccctctcagctgggcggcccaagcgtccccatgcccgccgtgcgctctgcctgctgctggggcctgacttcttcacagacgtcatcaccatcgaaacggcggatcatgccaggccaagctcttttcagtgccagactttgtaggtgatgcctgcaaagccatcgcatcccgggtgcggggggccgtggcctctgtcactttcgatgacttccataagaactcagcccgcatcattcgcactgctgtctttggctttgagacctcggaagcgaagggccccgatggcatggccctgcccaggccccgggaccaggctgtcttcccccaaaacgggctggtggtcagcagtgtggacgtgcagtcagtggagcctgtggatcagaggacccgggacgccctgcaacgcagcgtccagctggccatcgagatcaccaccaactcccaggaagcggcggccaagcatgaggctcagagactggagcaggaagcccgcggccggcttgagcggcagaagatcctggaccagtcagaagccgagaaagctcgcaaggaacttttggagctggaggctctgagcatggccgtggagagcaccgggactgccaaggcggaggccgagtcccgtgcggaggcagcccggattgagggagaagggtccgtgctgcaggccaagctaaaagcacaggccttggccattgaaacggaggctgagctccagagggtccagaaggtccgagagctggaactggtctatgcccgggcccagctggagctggaggtgagcaaggctcagcagctggctgaggtggaggtgaagaagttcaagcagatgacagaggccataggccccagcaccatcagggaccttgctgtggctgggcctgagatgcaggtaaaactgctccagtccctgggcctgaaatcaaccctcatcaccgatggctccactcccatcaacctcttcaacacagcctttgggctgctggggatggggcccgagggtcagcccctgggcagaagggtggccagtgggcccagccctggggaggggatatccccccagtctgctcaggcccctcaagctcctggagacaaccacgtggtgcctgtactgcgctaactcctgattaatacaatggaagtttctgggcatttacaatttcaaaaaatttctc

SEQ ID NO: 358072 - DNA, 2856 bp, Homo sapiens
tcgacttagaggacccgctcttgtttcctgcacttctagatgctccccaggttcatcctgtgtcgtctcccccacctaccagtctcatcttcttgtgagccctgggcttaggagtcaccatggcaactgaagagttcatcatccgcatccccccataccactatatccatgtgctggaccagaacagcaacgtgtcccgtgtggaggtcgggccaaagacctacatccggcaggacaatgagagggtactgtttgcccccatgcgcatggtgaccgtccccccacgtcactactgcacagtggccaaccctgtgtctcgggatgcccagggcttggtgctgtttgatgtcacagggcaagttcggcttcgccacgctgacctcgagatccggctggcccaggaccccttccccctgtacccaggggaggtgctggaaaaggacatcacacccctgcaggtggttctgcccaacactgccctccatctaaaggcgctgcttgattttgaggataaagatggagacaaggtggtggcaggagatgagtggcttttcgagggacctggcacgtacatcccccggaaggaagtggaggtcgtggagatcattcaggccaccatcatcaggcagaaccaggctctgcggctcagggcccgcaaggagtgctgggaccgggacggcaaggagagggtgacaggggaagaatggctggtcaccacagtaggggcgtacctcccagcggtgtttgaggaggttctggatttggtggacgccgtcatccttacggaaaagacagccctgcacctccgggctcggcggaacttccgggacttcaggggagtgtcccgccgcactggggaggagtggctggtaacagtgcaggacacagaggcccacgtgccagatgtccacgaggaggtgctgggggttgtgcccatcaccaccctgggcccccacaactactgcgtgattctcgaccctgtcggaccggatggcaagaatcagctggggcagaagcgcgtggtcaagggagagaagtcttttttcctccagccaggagagcagctggaacaaggcatccaggatgtgtatgtgctgtcggagcagcaggggctgctgctgagggccctgcagcccctggaggagggggaggatgaggagaaggtctcacaccaggctggggaccactggctcatccgcggacccctggagtatgtgccatctgccaaagtggaggtggtggaggagcgccaggccatccctctagacgagaacgagggcatctatgtgcaggatgtcaagaccggaaaggtgcgcgctgtgattggaagcacctacatgctgacccaggacgaagtcctgtgggagaaagagctgcctcccggggtggaggagctgctgaacaaggggcaggaccctctggcagacaggggtgagaaggacacagctaagagcctccagcccttggcgccccggaacaagacccgtgtggtcagctaccgcgtgccccacaacgctgcggtgcaggtgtacgactaccgagagaagcgagcccgcgtggtcttcgggcctgagctggtgtcgctgggtcctgaggagcagttcacagtgttgtccctctcagctgggcggcccaagcgtccccatgcccgccgtgcgctctgcctgctgctggggcctgacttcttcacagacgtcatcaccatcgaaacggcggatcatgccaggctgcaactgcagctggcctacaactggcactttgaggtgaatgaccggaaggacccccaagagacggccaagctcttttcagtgccagactttgtaggtgatgcctgcaaagccatcgcatcccgggtgcggggggccgtggcctctgtcactttcgatgacttccataagaactcagcccgcatcattcgcactgctgtctttggctttgagacctcggaagcgaagggccccgatggcatggccctgcccaggccccgggaccaggctgtcttcccccaaaacgggctggtggtcagcagtgtggacgtgcagtcagtggagcctgtggatcagaggacccgggacgccctgcaacgcagcgtccagctggccatcgagatcaccaccaactcccaggaagcggcggccaagcatgaggctcagagactggagcaggaagcccgcggccggcttgagcggcagaagatcctggaccagtcagaagccgagaaagctcgcaaggaacttttggagctggaggctctgagcatggccgtggagagcaccgggactgccaaggcggaggccgagtcccgtgcggaggcagcccggattgagggagaagggtccgtgctgcaggccaagctaaaagcacaggccttggccattgaaacggaggctgagctccagagggtccagaaggtccgagagctggaactggtctatgcccgggcccagctggagctggaggtgagcaaggctcagcagctggctgaggtggaggtgaagaagttcaagcagatgacagaggccataggccccagcaccatcagggaccttgctgtggctgggcctgagatgcaggtaaaactgctccagtccctgggcctgaaatcaaccctcatcaccgatggctccactcccatcaacctcttcaacacagcctttgggctgctggggatggggcccgagggtcagcccctgggcagaagggtggccagtgggcccagccctggggaggggatatccccccagtctgctcaggcccctcaagctcctggagacaaccacgtggtgcctgtactgcgctaactcctgattaatacaatggaagtttctgggcatttacaatttcaaaaaatttctc

SEQ ID NO: 358073 - DNA, 2889 bp, Homo sapiens
  misc_feature (213)..(213): n is a, c, g, or t
  misc_feature (372)..(372): n is a, c, g, or t
cttcttgatgatatcctgggactgtagggacgtcaccaatggcgatctgaggatgtcatgattccgcgtgcccccattccatgtatctccattgtagactgtaccacaaagagcagacgtgtccgatgtggaggtcggggcaaagatgctacactccgggaatcgtacagattgaagggtaggctactgcttttggtgccgccagtgtgcacnaatgagatggagcagatccacctcaccactgactcagacagtacttgcaacgagctggtcacagagactcacatgtagttcatcgtgtgtatgacgcctgagtggtcattggtgtgtctgatcttgaactgtgtcactagtggctagagttgcgtgtgnatcagctcactgctgtacctgcagataattcactggcatgacaccaatagtacactcacttcacgcgcacgtgtaaccgcatagggcaggtgctggaaaaggacatcacacccctgcaggtggttctgcccaacactgccctccatctaaaggcgctgcttgattttgaggataaagatggagacaaggtggtggcaggagatgagtggcttttcgagggacctggcacgtacatcccccggaaggaagtggaggtcgtggagatcattcaggccaccatcatcaggcagaaccaggctctgcggctcagggcccgcaaggagtgctgggaccgggacggcaaggagagggtgacaggggaagaatggctggtcaccacagtaggggcgtacctcccagcggtgtttgaggaggttctggatttggtggacgccgtcatccttacggaaaagacagccctgcacctccgggctcggcggaacttccgggacttcaggggagtgtcccgccgcactggggaggagtggctggtaacagtgcaggacacagaggcccacgtgccagatgtccacgaggaggtgctgggggttgtgcccatcaccaccctgggcccccacaactactgcgtgattctcgaccctgtcggaccggatggcaagaatcagctggggcagaagcgcgtggtcaagggagagaagtcttttttcctccagccaggagagcagctggaacaaggcatccaggatgtgtatgtgctgtcggagcagcaggggctgctgctgagggccctgcagcccctggaggagggggaggatgaggagaaggtctcacaccaggctggggaccactggctcatccgcggacccctggagtatgtgccatctgccaaagtggaggtggtggaggagcgccaggccatccctctagacgagaacgagggcatctatgtgcaggatgtcaagaccggaaaggtgcgcgctgtgattggaagcacctacatgctgacccaggacgaagtcctgtgggagaaagagctgcctcccggggtggaggagctgctgaacaaggggcaggaccctctggcagacaggggtgagaaggacacagctaagagcctccagcccttggcgccccggaacaagacccgtgtggtcagctaccgcgtgccccacaacgctgcggtgcaggtgtacgactaccgagagaagcgagcccgcgtggtcttcgggcctgagctggtgtcgctgggtcctgaggagcagttcacagtgttgtccctctcagctgggcggcccaagcgtccccatgcccgccgtgcgctctgcctgctgctggggcctgacttcttcacagacgtcatcaccatcgaaacggcggatcatgccaggctgcaactgcagctggcctacaactggcactttgaggtgaatgaccggaaggacccccaagagacggccaagctcttttcagtgccagactttgtaggtgatgcctgcaaagccatcgcatcccgggtgcggggggccgtggcctctgtcactttcgatgacttccataagaactcagcccgcatcattcgcactgctgtctttggctttgagacctcggaagcgaagggccccgatggcatggccctgcccaggccccgggaccaggctgtcttcccccaaaacgggctggtggtcagcagtgtggacgtgcagtcagtggagcctgtggatcagaggacccgggacgccctgcaacgcagcgtccagctggccatcgagatcaccaccaactcccaggaagcggcggccaagcatgaggctcagagactggagcaggaagcccgcggccggcttgagcggcagaagatcctggaccagtcagaagccgagaaagctcgcaaggaacttttggagctggaggctctgagcatggccgtggagagcaccgggactgccaaggcggaggccgagtcccgtgcggaggcagcccggattgagggagaagggtccgtgctgcaggccaagctaaaagcacaggccttggccattgaaacggaggctgagctccagagggtccagaaggtccgagagctggaactggtctatgcccgggcccagctggagctggaggtgagcaaggctcagcagctggctgaggtggaggtgaagaagttcaagcagatgacagaggccataggccccagcaccatcagggaccttgctgtggctgggcctgagatgcaggtaaaactgctccagtccctgggcctgaaatcaaccctcatcaccgatggctccactcccatcaacctcttcaacacagcctttgggctgctggggatggggcccgagggtcagcccctgggcagaagggtggccagtgggcccagccctggggaggggatatccccccagtctgctcaggcccctcaagctcctggagacaaccacgtggtgcctgtactgcgctaactcctgattaatacaatggaagtttctgggcatttacaatttcaaaaaatttctc

SEQ ID NO: 358074 - DNA, 2412 bp, Homo sapiens
ttgaaagctgttgagggccacccactgctcttccttccccacccccgcttcatgctgtttccacttgggctggaaaatgtgaccatgaccatgcggatgtggcttttccttccctcaccttcaccatgagctgtgggcagtggccatgacttacctgattctggatcaacaaagaagacgttcaaatacaattgacaaatgtaggccaataggtacagtggctcacacctgtcatcccagcactttgccaaggggaagaatggctggtcaccacagtaggggcgtacctcccagcggtgtttgaggaggttctggatttggtggacgccgtcatccttacggaaaagacagccctgcacctccgggctcggcggaacttccgggacttcaggggagtgtcccgccgcactggggaggagtggctggtaacagtgcaggacacagaggcccacgtgccagatgtccacgaggaggtgctgggggttgtgcccatcaccaccctgggcccccacaactactgcgtgattctcgaccctgtcggaccggatggcaagaatcagctggggcagaagcgcgtggtcaagggagagaagtcttttttcctccagccaggagagcagctggaacaaggcatccaggatgtgtatgtgctgtcggagcagcaggggctgctgctgagggccctgcagcccctggaggagggggaggatgaggagaaggtctcacaccaggctggggaccactggctcatccgcggacccctggagtatgtgccatctgccaaagtggaggtggtggaggagcgccaggccatccctctagacgagaacgagggcatctatgtgcaggatgtcaagaccggaaaggtgcgcgctgtgattggaagcacctacatgctgacccaggacgaagtcctgtgggagaaagagctgcctcccggggtggaggagctgctgaacaaggggcaggaccctctggcagacaggggtgagaaggacacagctaagagcctccagcccttggcgccccggaacaagacccgtgtggtcagctaccgcgtgccccacaacgctgcggtgcaggtgtacgactaccgagagaagcgagcccgcgtggtcttcgggcctgagctggtgtcgctgggtcctgaggagcagttcacagtgttgtccctctcagctgggcggcccaagcgtccccatgcccgccgtgcgctctgcctgctgctggggcctgacttcttcacagacgtcatcaccatcgaaacggcggatcatgccaggctgcaactgcagctggcctacaactggcactttgaggtgaatgaccggaaggacccccaagagacggccaagctcttttcagtgccagactttgtaggtgatgcctgcaaagccatcgcatcccgggtgcggggggccgtggcctctgtcactttcgatgacttccataagaactcagcccgcatcattcgcactgctgtctttggctttgagacctcggaagcgaagggccccgatggcatggccctgcccaggccccgggaccaggctgtcttcccccaaaacgggctggtggtcagcagtgtggacgtgcagtcagtggagcctgtggatcagaggacccgggacgccctgcaacgcagcgtccagctggccatcgagatcaccaccaactcccaggaagcggcggccaagcatgaggctcagagactggagcaggaagcccgcggccggcttgagcggcagaagatcctggaccagtcagaagccgagaaagctcgcaaggaacttttggagctggaggctctgagcatggccgtggagagcaccgggactgccaaggcggaggccgagtcccgtgcggaggcagcccggattgagggagaagggtccgtgctgcaggccaagctaaaagcacaggccttggccattgaaacggaggctgagctccagagggtccagaaggtccgagagctggaactggtctatgcccgggcccagctggagctggaggtgagcaaggctcagcagctggctgaggtggaggtgaagaagttcaagcagatgacagaggccataggccccagcaccatcagggaccttgctgtggctgggcctgagatgcaggtaaaactgctccagtccctgggcctgaaatcaaccctcatcaccgatggctccactcccatcaacctcttcaacacagcctttgggctgctggggatggggcccgagggtcagcccctgggcagaagggtggccagtgggcccagccctggggaggggatatccccccagtctgctcaggcccctcaagctcctggagacaaccacgtggtgcctgtactgcgctaactcctgattaatacaatggaagtttctgggcatttacaatttcaaaaaatttctc

SEQ ID NO: 358075 - DNA, 1789 bp, Homo sapiens
acgtcgtcggtaccgacgctctctctgtgggatgaggaaactgaagcccaaggggtgaggtagttagcccacgatgacagggccagcagatggcaaacctggggtggagcctggcctccccgtagagaaggtgtttaacctcgtggcgcgccttccctggatgggctctgctttgggacagctgggcggatcttcctcccttccacccttacgggcagcttccctccctgtcctcgtcccaaggtgcgcgctgtgattggaagcacctacatgctgacccaggacgaagtcctgtgggagaaagagctgcctcccggggtggaggagctgctgaacaaggggcaggaccctctggcagacaggggtgagaaggacacagctaagagcctccagcccttggcgccccggaacaagacccgtgtggtcagctaccgcgtgccccacaacgctgcggtgcaggtgtacgactaccgagagaagcgagcccgcgtggtcttcgggcctgagctggtgtcgctgggtcctgaggagcagttcacagtgttgtccctctcagctgggcggcccaagcgtccccatgcccgccgtgcgctctgcctgctgctggggcctgacttcttcacagacgtcatcaccatcgaaacggcggatcatgccaggctgcaactgcagctggcctacaactggcactttgaggtgaatgaccggaaggacccccaagagacggccaagctcttttcagtgccagactttgtaggtgatgcctgcaaagccatcgcatcccgggtgcggggggccgtggcctctgtcactttcgatgacttccataagaactcagcccgcatcattcgcactgctgtctttggctttgagacctcggaagcgaagggccccgatggcatggccctgcccaggccccgggaccaggctgtcttcccccaaaacgggctggtggtcagcagtgtggacgtgcagtcagtggagcctgtggatcagaggacccgggacgccctgcaacgcagcgtccagctggccatcgagatcaccaccaactcccaggaagcggcggccaagcatgaggctcagagactggagcaggaagcccgcggccggcttgagcggcagaagatcctggaccagtcagaagccgagaaagctcgcaaggaacttttggagctggaggctctgagcatggccgtggagagcaccgggactgccaaggcggaggccgagtcccgtgcggaggcagcccggattgagggagaagggtccgtgctgcaggccaagctaaaagcacaggccttggccattgaaacggaggctgagctccagagggtccagaaggtccgagagctggaactggtctatgcccgggcccagctggagctggaggtgagcaaggctcagcagctggctgaggtggaggtgaagaagttcaagcagatgacagaggccataggccccagcaccatcagggaccttgctgtggctgggcctgagatgcaggtaaaactgctccagtccctgggcctgaaatcaaccctcatcaccgatggctccactcccatcaacctcttcaacacagcctttgggctgctggggatggggcccgagggtcagcccctgggcagaagggtggccagtgggcccagccctggggaggggatatccccccagtctgctcaggcccctcaagctcctggagacaaccacgtggtgcctgtactgcgctaactcctgattaatacaatggaagtttctgggcatttacaatttcaaaaaatttctc

SEQ ID NO: 358076 - DNA, 2626 bp, Homo sapiens
cacccctgggcttggcctgccttgccctgccgggaagtgatccccaaggcagggtgagagttccccatctgaggcgtttgttgcagctacctgcacttctagattcatcttcttgtgagccctgggcttaggagtcaccatggcaactgaagagttcatcatccgcatccccccataccactatatccatgtgctggaccagaacagcaacgtgtcccgtgtggaggtcgggccaaagacctacatccggcaggacaatgagagggtactgtttgcccccatgcgcatggtgaccgtccccccacgtcactactgcacagtggccaaccctgtgtctcgggatgcccagggcttggtgctgtttgatgtcacagggcaagttcggcttcgccacgctgacctcgagatccggctggcccaggaccccttccccctgtacccaggggaggtgctggaaaaggacatcacacccctgcaggtggttctgcccaacactgccctccatctaaaggcgctgcttgattttgaggataaagatggagacaaggtggtggcaggagatgagtggcttttcgagggacctggcacgtacatcccccggaaggaagtggaggtcgtggagatcattcaggccaccatcatcaggcagaaccaggctctgcggctcagggcccgcaaggagtgctgggaccgggacggcaaggagagggtgacaggggaagaatggctggtcaccacagtaggggcgtacctcccagcggtgtttgaggaggttctggatttggtggacgccgtcatccttacggaaaagacagccctgcacctccgggctcggcggaacttccgggacttcaggggagtgtcccgccgcactggggaggagtggctggtaacagtgcaggacacagaggcccacgtgccagatgtccacgaggaggtgctgggggttgtgcccatcaccaccctgggcccccacaactactgcgtgattctcgaccctgtcggaccggatggcaagaatcagctggggcagaagcgcgtggtcaagggagagaagtcttttttcctccagccaggagagcagctggaacaaggcatccaggatgtgtatgtgctgtcggagcagcaggggctgctgctgagggccctgcagcccctggaggagggggaggatgaggagaaggtctcacaccaggctggggaccactggctcatccgcggacccctggagtatgtgccatctgccaaagtggaggtggtggaggagcgccaggccatccctctagacgagaacgagggcatctatgtgcaggatgtcaagaccggaaaggtgcgcgctgtgattggaagcacctacatgctgacccaggacgaagtcctgtgggagaaagagctgcctcccggggtggaggagctgctgaacaaggggcaggaccctctggcagacaggggtgagaaggacacagctaagagcctccagcccttggcgccccggaacaagacccgtgtggtcagctaccgcgtgccccacaacgctgcggtgcaggtgtacgactaccgagagaagcgagcccgcgtggtcttcgggcctgagctggtgtcgctgggtcctgaggagcagttcacagtgttgtccctctcagctgggcggcccaagcgtccccatgcccgccgtgcgctctgcctgctgctggggcctgacttcttcacagacgtcatcaccatcgaaacggcggatcatgccaggctgcaactgcagctggcctacaactggcactttgaggtgaatgaccggaaggacccccaagagacggccaagctcttttcagtgccagactttgtaggtgatgcctgcaaagccatcgcatcccgggtgcggggggccgtggcctctgtcactttcgatgacttccataagaactcagcccgcatcattcgcactgctgtctttggctttgagacctcggaagcgaagggccccgatggcatggccctgcccaggccccgggaccaggctgtcttcccccaaaacgggctggtggtcagcagtgtggacgtgcagtcagtggagcctgtggatcagaggacccgggacgccctgcaacgcagcgtccagctggccatcgagatcaccaccaactcccaggaagcggcggccaagcatgaggctcagagactggagcaggaagcccgcggccggcttgagcggcagaagatctggaactggtctatgcccgggcccagctggagctggaggtgagcaaggctcagcagctggctgaggtggaggtgaagaagttcaagcagatgacagaggccataggccccagcaccatcagggaccttgctgtggctgggcctgagatgcaggtaaaactgctccagtccctgggcctgaaatcaaccctcatcaccgatggctccactcccatcaacctcttcaacacagcctttgggctgctggggatggggcccgagggtcagcccctgggcagaagggtggccagtgggcccagccctggggaggggatatccccccagtctgctcaggcccctcaagctcctggagacaaccacgtggtgcctgtactgcgctaactcctgattaatacaatggaagtttctg

SEQ ID NO: 358077 - DNA, 1137 bp, Homo sapiens
gcagcttccccattctgggcctgtttgttcacaggcactttgaggtgaatgaccggaaggacccccaagagacggccaagctcttttcagtgccagactttgtaggtgatgcctgcaaagccatcgcatcccgggtgcggggggccgtggcctctgtcactttcgatgacttccataagaactcagcccgcatcattcgcactgctgtctttggctttgagacctcggaagcgaagggccccgatggcatggccctgcccaggccccgggaccaggctgtcttcccccaaaacgggctggtggtcagcagtgtggacgtgcagtcagtggagcctgtggatcagaggacccgggacgccctgcaacgcagcgtccagctggccatcgagatcaccaccaactcccaggaagcggcggccaagcatgaggctcagagactggagcaggaagcccgcggccggcttgagcggcagaagatcctggaccagtcagaagccgagaaagctcgcaaggaacttttggagctggaggctctgagcatggccgtggagagcaccgggactgccaaggcggaggccgagtcccgtgcggaggcagcccggattgagggagaagggtccgtgctgcaggccaagctaaaagcacaggccttggccattgaaacggaggctgagctccagagggtccagaaggtccgagagctggaactggtctatgcccgggcccagctggagctggaggtgagcaaggctcagcagctggctgaggtggaggtgaagaagttcaagcagatgacagaggccataggccccagcaccatcagggaccttgctgtggctgggcctgagatgcaggtaaaactgctccagtccctgggcctgaaatcaaccctcatcaccgatggctccactcccatcaacctcttcaacacagcctttgggctgctggggatggggcccgagggtcagcccctgggcagaagggtggccagtgggcccagccctggggaggggatatccccccagtctgctcaggcccctcaagctcctggagacaaccacgtggtgcctgtactgcgctaactcctgattaatacaatggaagtttctgggcatttacaatttcaaaaaatttctc

SEQ ID NO: 358078 - DNA, 1305 bp, Homo sapiens
tacgactcgagctagtaccctcggataaggggccaagcatgaggctcagagactggagcaggaagcccgcggccggcttgagcggcagaagatcctggaccagtcagaagccgagaaagctcgcaaggaacttttggagctggaggctctgagcatggccgtggagagcaccgggactgccaaggcggaggccgagtcccgtgcggaggcagcccggattgagggagaagggtccgtgctgcaccaagctcttttcagtgccagactttgtaggtgatgcctgcaaagccatcgcatcccgggtgcggggggccgtggcctctgtcactttcgatgacttccataagaactcagcccgcatcattcgcactgctgtctttggctttgagacctcggaagcgaagggccccgatggcatggccctgcccaggccccgggaccaggctgtcttcccccaaaacgggctggtggtcagcagtgtggacgtgcagtcagtggagcctgtggatcagaggacccgggacgccctgcaacgcagcgtccagctggccatcgagatcaccaccaactcccaggaagcggcggccaagcatgaggctcagagactggagcaggaagcccgcggccggcttgagcggcagaagatcctggaccagtcagaagccgagaaagctcgcaaggaacttttggagctggaggctctgagcatggccgtggagagcaccgggactgccaaggcggaggccgagtcccgtgcggaggcagcccggattgagggagaagggtccgtgctgcaggccaagctaaaagcacaggccttggccattgaaacggaggctgagctccagagggtccagaaggtccgagagctggaactggtctatgcccgggcccagctggagctggaggtgagcaaggctcagcagctggctgaggtggaggtgaagaagttcaagcagatgacagaggccataggccccagcaccatcagggaccttgctgtggctgggcctgagatgcaggtaaaactgctccagtccctgggcctgaaatcaaccctcatcaccgatggctccactcccatcaacctcttcaacacagcctttgggctgctggggatggggcccgagggtcagcccctgggcagaagggtggccagtgggcccagccctggggaggggatatccccccagtctgctcaggcccctcaagctcctggagacaaccacgtggtgcctgtactgcgctaactcctgattaatacaatggaagtttctgggcatttacaatttcaaaaaatttctc

SEQ ID NO: 358079 - DNA, 2416 bp, Homo sapiens
cacccctgggcttggcctgccttgccctgccgggaagtgatccccaaggcagggtgagagttccccatctgaggcgtttgttgcagctacctgcacttctagattcatcttcttgtgagccctgggcttaggagtcaccatggcaactgaagagttcatcatccgcatccccccataccactatatccatgtgctggaccagaacagcaacgtgtcccgtgtggaggtcgggccaaagacctacatccggcaggacaatgagagggtactgtttgcccccatgcgcatggtgaccgtccccccacgtcactactgcacagtggccaaccctgtgtctcgggatgcccagggcttggtgctgtttgatgtcacagggcaagttcggcttcgccacgctgacctcgagatccggctggcccaggaccccttccccctgtacccaggggaggtgctggaaaaggacatcacacccctgcaggtggttctgcccaacactgccctccatctaaaggcgctgcttgattttgaggataaagatggagacaaggtggtggcaggagatgagtggcttttcgagggacctggcacgtacatcccccggaaggaagtggaggtcgtggagatcattcaggccaccatcatcaggcagaaccaggctctgcggctcagggcccgcaaggagtgctgggaccgggacggcaaggagagggtgacaggggaagaatggctggtcaccacagtaggggcgtacctcccagcggtgtttgaggaggttctggatttggtggacgccgtcatccttacggaaaagacagccctgcacctccgggctcggcggaacttccgggacttcaggggagtgtcccgccgcactggggaggagtggctggtaacagtgcaggacacagaggcccacgtgccagatgtccacgaggaggtgctgggggttgtgcccatcaccaccctgggcccccacaactactgcgtgattctcgaccctgtcggaccggatggcaagaatcagctggggcagaagcgcgtggtcaagggagagaagtcttttttcctccagccaggagagcagctggaacaaggcatccaggatgtgtatgtgctgtcggagcagcaggggctgctgctgagggccctgcagcccctggaggagggggaggatgaggagaaggtctcacaccaggctggggaccactggctcatccgcggacccctggagtatgtgccatctgccaaagtggaggtggtggaggagcgccaggccatccctctagacgagaacgagggcatctatgtgcaggatgtcaagaccggaaaggtgcgcgctgtgattggaagcacctacatgctgacccaggacgaagtcctgtgggagaaagagctgcctcccggggtggaggagctgctgaacaaggggcaggaccctctggcagacaggggtgagaaggacacagctaagagcctccagcccttggcgccccggaacaagacccgtgtggtcagctaccgcgtgccccacaacgctgcggtgcaggtgtacgactaccgagagaagcgagcccgcgtggtcttcgggcctgagctggtgtcgctgggtcctgaggagcagttcacagtgttgtccctctcagctgggcggcccaagcgtccccatgcccgccgtgcgctctgcctgctgctggggcctgacttcttcacagacgtcatcaccatcgaaacggcggatcatgccaggctgcaactgcagctggcctacaactggcactttgaggtgaatgaccggaaggacccccaagagacggccaagctcttttcagtgccagactttgtaggtgatgcctgcaaagccatcgcatcccgggtgcggggggccgtggcctctgtcactttcgatgacttccataagaactcagcccgcatcattcgcactgctgtctttggctttgagacctcggaagcgaagggccccgatggcatggccctgcccaggccccgggaccaggctgtcttcccccaaaacgggctggtggtcagcagtgtggacgtgcagtcagtggagcctgtggatcagaggacccgggacgccctgcaacgcagcgtccagctggccatcgagatcaccaccaactcccaggaagcggcggccaagtaaaactgctccagtccctgggcctgaaatcaaccctcatcaccgatggctccactcccatcaacctcttcaacacagcctttgggctgctggggatggggcccgagggtcagcccctgggcagaagggtggccagtgggcccagccctggggaggggatatccccccagtctgctcaggcccctcaagctcctggagacaaccacgtggtgcctgtactgcgctaactcctgattaatacaatggaagtttctg

SEQ ID NO: 358080 - DNA, 2187 bp, Homo sapiens
cacccctgggcttggcctgccttgccctgccgggaagtgatccccaaggcagggtgagagttccccatctgaggcgtttgttgcagctacctgcacttctagattcatcttcttgtgagccctgggcttaggagtcaccatggcaactgaagagttcatcatccgcatccccccataccactatatccatgtgctggaccagaacagcaacgtgtcccgtgtggaggtcgggccaaagacctacatccggcaggacaatgagagggtactgtttgcccccatgcgcatggtgaccgtccccccacgtcactactgcacagtggccaaccctgtgtctcgggatgcccagggcttggtgctgtttgatgtcacagggcaagttcggcttcgccacgctgacctcgagatccggctggcccaggaccccttccccctgtacccaggggaggtgctggaaaaggacatcacacccctgcaggtggttctgcccaacactgccctccatctaaaggcgctgcttgattttgaggataaagatggagacaaggtggtggcaggagatgagtggcttttcgagggacctggcacgtacatcccccggaaggaagtggaggtcgtggagatcattcaggccaccatcatcaggcagaaccaggctctgcggctcagggcccgcaaggagtgctgggaccgggacggcaaggagagggtgacaggggaagaatggctggtcaccacagtaggggcgtacctcccagcggtgtttgaggaggttctggatttggtggacgccgtcatccttacggaaaagacagccctgcacctccgggctcggcggaacttccgggacttcaggggagtgtcccgccgcactggggaggagtggctggtaacagtgcaggacacagaggcccacgtgccagatgtccacgaggaggtgctgggggttgtgcccatcaccaccctgggcccccacaactactgcgtgattctcgaccctgtcggaccggatggcaagaatcagctggggcagaagcgcgtggtcaagggagagaagtcttttttcctccagccaggagagcagctggaacaaggcatccaggatgtgtatgtgctgtcggagcagcaggggctgctgctgagggccctgcagcccctggaggagggggaggatgaggagaaggtctcacaccaggctggggaccactggctcatccgcggacccctggagtatgtgccatctgccaaagtggaggtggtggaggagcgccaggccatccctctagacgagaacgagggcatctatgtgcaggatgtcaagaccggaaaggtgcgcgctgtgattggaagcacctacatgctgacccaggacgaagtcctgtgggagaaagagctgcctcccggggtggaggagctgctgaacaaggggcaggaccctctggcagacaggggtgagaaggacacagctaagagcctccagcccttggcgccccggaacaagacccgtgtggtcagctaccgcgtgccccacaacgctgcggtgcaggtgtacgactaccgagagaagcgagcccgcgtggtcttcgggcctgagctggtgtcgctgggtcctgaggagcagttcacagtgttgtccctctcagctgggcggcccaagcgtccccatgcccgccgtgcgctctgcctgctgctggggcctgacttcttcacagacgtcatcaccatcgaaacggcggatcatgccaggctgcaactgcagctggcctacaactggcactttgaggtgaatgaccggaaggacccccaagagacggccaagctcttttcagtgccagactttgtaggtgatgcctgcaaaataggccccagcaccatcagggaccttgctgtggctgggcctgagatgcaggtaaaactgctccagtccctgggcctgaaatcaaccctcatcaccgatggctccactcccatcaacctcttcaacacagcctttgggctgctggggatggggcccgagggtcagcccctgggcagaagggtggccagtgggcccagccctggggaggggatatccccccagtctgctcaggcccctcaagctcctggagacaaccacgtggtgcctgtactgcgctaactcctgattaatacaatggaagtttctgacatacgaacaaccccacaaag

SEQ ID NO: 358081 - DNA, 1350 bp, Homo sapiens
cacccctgggcttggcctgccttgccctgccgggaagtgatccccaaggcagggtgagagttccccatctgaggcgtttgttgcagctacctgcacttctagattcatcttcttgtgagccctgggcttaggagtcaccatggcaactgaagagttcatcatccgcatccccccataccactatatccatgtgctggaccagaacagcaacgtgtcccgtgtggaggtcgggccaaagacctacatccggcaggacaatgagagggtactgtttgcccccatgcgcatggtgaccgtccccccacgtcactactgcacagtggccaaccctgtgtctcgggatgcccagggcttggtgctgtttgatgtcacagggcaagttcggcttcgccacgctgacctcgagatccggctggcccaggaccccttccccctgtacccaggggaggtgctggaaaaggacatcacacccctgcaggtggttctgcccaacactgccctccatctaaaggcgctgcttgattttgaggataaagatggagacaaggtggtggcaggagatgagtggcttttcgagggacctggcacgtacatcccccggaaggaagtggaggtcgtggagatcattcaggccaccatcatcaggcagaaccaggctctgcggctcagggcccgcaaggagtgctgggaccgggacggcaaggagagggtgacaggggaagaatggctggtcaccacagtaggggcgtacctcccagcggtgtttgaggaggttctggatttggtggacgccgtcatccttacggaaaagacagccctgcacctccgggctcggcggaacttccgggacttcaggggagtgtcccgccgcactggggaggagtggctggtaacagtgcaggacacagaggcccacgtgccagatgtccacgaggaggtgctgggggttgtgcccatcaccaccctgggcccccacaactactgcgtgattctcgaccctgtcggaccggatggcaagaatcagctggggcagaagcgcgtggtcaagggagagaagtcttttttcctccagccaggagagcagctggaacaaggcatccaggatgtgtatgtgctgtcggagcagcaggggctgctgctgagggccctgcagcccctggaggagggggaggatgaggagaaggtctcacaccaggctggggaccactggctcatccgcggacccctggagtatgtgccatctgccaaagtggaggtggtggaggagcgccaggccatccctctagacgagaacgagggcatctatgtgcaggatgtcaagaccggaaagctcaagagacagctatcggg

SEQ ID NO: 358082 - DNA, 1090 bp, Homo sapiens
cacccctgggcttggcctgccttgccctgccgggaagtgatccccaaggcagggtgagagttccccatctgaggcgtttgttgcagctacctgcacttctagattcatcttcttgtgagccctgggcttaggagtcaccatggcaactgaagagttcatcatccgcatccccccataccactatatccatgtgctggaccagaacagcaacgtgtcccgtgtggaggtcgggccaaagacctacatccggcaggacaatgagagggtactgtttgcccccatgcgcatggtgaccgtccccccacgtcactactgcacagtggccaaccctgtgtctcgggatgcccagggcttggtgctgtttgatgtcacagggcaagttcggcttcgccacgctgacctcgagatccggctggcccaggaccccttccccctgtacccaggggaggtgctggaaaaggacatcacacccctgcaggtggttctgcccaacactgccctccatctaaaggcgctgcttgattttgaggataaagatggagacaaggtggtggcaggagatgagtggcttttcgagggacctggcacgtacatcccccggaaggaagtggaggtcgtggagatcattcaggccaccatcatcaggcagaaccaggctctgcggctcagggcccgcaaggagtgctgggaccgggacggcaaggagagggtgacaggggaagaatggctggtcaccacagtaggggcgtacctcccagcggtgtttgaggaggttctggatttggtggacgccgtcatccttacggaaaagacagccctgcacctccgggctcggcggaacttccgggacttcaggggagtgtcccgccgcactggggaggagtggctggtaacagtgcaggacacagaggcccacgtgccagatgtccacgaggaggtgctgggggttgtgcccatcaccaccctgggcccccacaactactgcgtgattctcgaccctgtcggaccggatggcacccatccacgtagcgtcataagaccggcacggtcaatggagagtaatctctgtacttccctcctagcccgaagt

SEQ ID NO: 358083 - DNA, 1010 bp, Homo sapiens
cacccctgggcttggcctgccttgccctgccgggaagtgatccccaaggcagggtgagagttccccatctgaggcgtttgttgcagctacctgcacttctagattcatcttcttgtgagccctgggcttaggagtcaccatggcaactgaagagttcatcatccgcatccccccataccactatatccatgtgctggaccagaacagcaacgtgtcccgtgtggaggtcgggccaaagacctacatccggcaggacaatgagagggtactgtttgcccccatgcgcatggtgaccgtccccccacgtcactactgcacagtggccaaccctgtgtctcgggatgcccagggcttggtgctgtttgatgtcacagggcaagttcggcttcgccacgctgacctcgagatccggctggcccaggaccccttccccctgtacccaggggaggtgctggaaaaggacatcacacccctgcaggtggttctgcccaacactgccctccatctaaaggcgctgcttgattttgaggataaagatggagacaaggtggtggcaggagatgagtggcttttcgagggacctggcacgtacatcccccggaaggaagtggaggtcgtggagatcattcaggccaccatcatcaggcagaaccaggctctgcggctcagggcccgcaaggagtgctgggaccgggacggcaaggagagggtgacaggggaagaatggctggtcaccacagtaggggcgtacctcccagcggtgtttgaggaggttctggatttggtggacgccgtcatccttacggaaaagacagccctgcacctccgggctcggcggaacttccgggacttcaggggagtgtcccgccgcactggggaggaggtggccagtgggcccagccctggggaggggatatccccccagtctgctcaggcccctcaagctcctggagacaaccacgtggtgcctgtactgcgctaactcctgattaatacaatggaagtttctg

SEQ ID NO: 358084 - DNA, 1023 bp, Homo sapiens
gcagcttccccattctgggcctgtttgttcacaggcactttgaggtgaatgaccggaaggacccccaagagacggccaagctcttttcagtgccagactttgtaggtgatgcctgcaaagccatcgcatcccgggtgcggggggccgtggcctctgtcactttcgatgacttccataagaactcagcccgcatcattcgcactgctgtctttggctttgagacctcggaagcgaagggccccgatggcatggccctgcccaggccccgggaccaggctgtcttcccccaaaacgggctggtggtcagcagtgtggacgtgcagtcagtggagcctgtggatcagaggacccgggacgccctgcaacgcagcgtccagctggccatcgagatcaccaccaactcccaggaagcggcggccaagcatgaggctcagagactggagcaggaagcccgcggccggcttgagcggcagaagatcctggaccagtcagaagccgagaaagctcgcaaggaacttttggagctggaggctctgagcatggccgtggagagcaccgggactgccaaggcggaggccgagtcccgtgcggaggcagcccggattgagggagaagggtccgtgctgcaggccaagctaaaagcacaggccttggccattgaaacggaggctgagctccagagggtccagaaggtccgagagctggaactggtctatgcccgggcccagctggagctggaggtaaaactgctccagtccctgggcctgaaatcaaccctcatcaccgatggctccactcccatcaacctcttcaacacagcctttgggctgctggggatggggcccgagggtcagcccctgggcagaagggtggccagtgggcccagccctggggaggggatatccccccagtctgctcaggcccctcaagctcctggagacaaccacgtggtgcctgtactgcgctaactcctgattaatacaatggaagtttctgggcatttacaatttcaaaaaatttctc

SEQ ID NO: 358085 - DNA, 637 bp, Homo sapiens
atgcctgcaaagccatcgcatcccgggtgcggggggccgtggcctctgtcactttcgatgacttccataagaactcagcccgcatcattcgcactgctgtctttggctttgagacctcggaagcgaagggccccgatggcatggccctgcccaggccccgggaccaggctgtcttcccccaaaacgggctggtggtcagcagtgtggacgtgcagtcagtggagcctgtggatcagaggacccgggacgccctgcaacgcagcgtccagctggccatcgagatcaccaccaactcccaggaagcggcggccaaaagtaagtgaggctgggagctcggctgcctataatgcccatggcaggccactgctgggaagtggataacctggcatcccttgtggactgcctgctgccatccctaccctcaaagatctattccctacccaacagatcaggtgacccacttaaaatgtgaatcaggctgggcgcggtggctcatgcccgtaatcccagcactgtgagaggctgaggcaggaagatcacttgaagccaggagtttgaggctgcagtgagccatgattgcgccactgcactccagcctgggcaacaggcctgggagactgaccctgtctcaaaagaa

SEQ ID NO: 358086 - DNA, 405 bp, Homo sapiens
gtgagcaaggctcagcagctggctgaggtggaggtgaagaagttcaagcagatgacagaggccataggccccagcaccatcagggaccttgctgtggctgggcctgagatgcaggtgagagttggggaaggtgtgttggtttcaggaccaaccttgaaaccaggaaggcagagccaaggcggaaaacacaacatctggaaagattgtggggaagggaggggtgagtgacctgacccacgatgcagggacattcacacagtgtcacgctgcatcaacgtcaggcactgtactagacccagcagtgagccagagctccggaggagacaggaaatggatgggacgccagtctgacaggcatttccaaggcagtcaagcagggtggtcagatgcaggggaggtgaccct

SEQ ID NO: 358087 - DNA, 394 bp, Homo sapiens
cgcagtcaggaacttgagcctggggtcagtgctatctttttgcctatgaaatctgtcaatcccctgtgtctaagctgtgggggaggggtaggtggggagcaggctggggggcccttgtcccttaccctccactcttggcccaggggaagaatggctggtcaccacagtaggggcgtacctcccagcggtgtttgaggaggttctggatttggtggacgccgtcatccttacggaaaaggttggtgctctgggggctgtggtttaagggacctggggctagggaaccctccgagtggcagagaatggtggtagaatggcatgagagtaaaagagaagcaataattttagggtcacttaaaaaaattcagagatcagattgcctgagtattctgga

SEQ ID NO: 358088 - DNA, 2849 bp, Homo sapiens
cacccctgggcttggcctgccttgccctgccgggaagtgatccccaaggcagggtgagagttccccatctgaggcgtttgttgcagctacctgcacttctagattcatcttcttgtgagccctgggcttaggagtcaccatggcaactgaagagttcatcatccgcatccccccataccactatatccatgtgctggaccagaacagcaacgtgtcccgtgtggaggtcgggccaaagacctacatccggcaggacaatgagagggtactgtttgcccccatgcgcatggtgaccgtccccccacgtcactactgcacagtggccaaccctgtgtctcgggatgcccagggcttggtgctgtttgatgtcacagggcaagttcggcttcgccacgctgacctcgagatccggctggcccaggaccccttccccctgtacccaggggaggtgctggaaaaggacatcacacccctgcaggtggttctgcccaacactgccctccatctaaaggcgctgcttgattttgaggataaagatggagacaaggtggtggcaggagatgagtggcttttcgagggacctggcacgtacatcccccggaaggaagtggaggtcgtggagatcattcaggccaccatcatcaggcagaaccaggctctgcggctcagggcccgcaaggagtgctgggaccgggacggcaaggagagggtgacaggggaagaatggctggtcaccacagtaggggcgtacctcccagcggtgtttgaggaggttctggatttggtggacgccgtcatccttacggaaaagacagccctgcacctccgggctcggcggaacttccgggacttcaggggagtgtcccgccgcactggggaggagtggctggtaacagtgcaggacacagaggcccacgtgccagatgtccacgaggaggtgctgggggttgtgcccatcaccaccctgggcccccacaactactgcgtgattctcgaccctgtcggaccggatggcaagaatcagctggggcagaagcgcgtggtcaagggagagaagtcttttttcctccagccaggagagcagctggaacaaggcatccaggatgtgtatgtgctgtcggagcagcaggggctgctgctgagggccctgcagcccctggaggagggggaggatgaggagaaggtctcacaccaggctggggaccactggctcatccgcggacccctggagtatgtgccatctgccaaagtggaggtggtggaggagcgccaggccatccctctagacgagaacgagggcatctatgtgcaggatgtcaagaccggaaaggtgcgcgctgtgattggaagcacctacatgctgacccaggacgaagtcctgtgggagaaagagctgcctcccggggtggaggagctgctgaacaaggggcaggaccctctggcagacaggggtgagaaggacacagctaagagcctccagcccttggcgccccggaacaagacccgtgtggtcagctaccgcgtgccccacaacgctgcggtgcaggtgtacgactaccgagagaagcgagcccgcgtggtcttcgggcctgagctggtgtcgctgggtcctgaggagcagttcacagtgttgtccctctcagctgggcggcccaagcgtccccatgcccgccgtgcgctctgcctgctgctggggcctgacttcttcacagacgtcatcaccatcgaaacggcggatcatgccaggctgcaactgcagctggcctacaactggcactttgaggtgaatgaccggaaggacccccaagagacggccaagctcttttcagtgccagactttgtaggtgatgcctgcaaagccatcgcatcccgggtgcggggggccgtggcctctgtcactttcgatgacttccataagaactcagcccgcatcattcgcactgctgtctttggctttgagacctcggaagcgaagggccccgatggcatggccctgcccaggccccgggaccaggctgtcttcccccaaaacgggctggtggtcagcagtgtggacgtgcagtcagtggagcctgtggatcagaggacccgggacgccctgcaacgcagcgtccagctggccatcgagatcaccaccaactcccaggaagcggcggccaagcatgaggctcagagactggagcaggaagcccgcggccggcttgagcggcagaagatcctggaccagtcagaagccgagaaagctcgcaaggaacttttggagctggaggctctgagcatggccgtggagagcaccgggactgccaaggcggaggccgagtcccgtgcggaggcagcccggattgagggagaagggtccgtgctgcaggccaagctaaaagcacaggccttggccattgaaacggaggctgagctccagagggtccagaaggtccgagagctggaactggtctatgcccgggcccagctggagctggaggtgagcaaggctcagcagctggctgaggtggaggtgaagaagttcaagcagatgacagaggccataggccccagcaccatcagggaccttgctgtggctgggcctgagatgcaggtaaaactgctccagtccctgggcctgaaatcaaccctcatcaccgatggctccactcccatcaacctcttcaacacagcctttgggctgctggggatggggcccgagggtcagcccctgggcagaagggtggccagtgggcccagccctggggaggggatatccccccagtctgctcaggcccctcaagctcctggagacaaccacgtggtgcctgtactgcgctaactcctgattaatacaatggaagtttctg

SEQ ID NO: 358089 - DNA, 367 bp, Homo sapiens
agttcaagcagatgcagaggcatagcccaaaggggggcccaaagcccccccccaattttcccaaaagggggggggggacaccctttgctgtggactgggcctgagatgcaggtaaaactgctccagtccctgggcctgaaatcaaccctcatcaccgatggctccactcccatcaacctcttcaacacagcctttgggctgctggggatggggcccgagggtcagcccctgggcagaagggtggccagtgggcccagccctggggaggggatatccccccagtctgctcaggcccctcaagctcctggagacaaccacgtggtgcctgtactgcgctaactcctgattaatacaatggaagtttctg

SEQ ID NO: 358090 - DNA, 2919 bp, Homo sapiens
cacccctgggcttggcctgccttgccctgccgggaagtgatccccaaggcagggtgagagttccccatctgaggcgtttgttgcagctacctgcacttctagatgctccccaggttcatcctgtgtcgtctcccccacctaccagtctcatcttcttgtgagccctgggcttaggagtcaccatggcaactgaagagttcatcatccgcatccccccataccactatatccatgtgctggaccagaacagcaacgtgtcccgtgtggaggtcgggccaaagacctacatccggcaggacaatgagagggtactgtttgcccccatgcgcatggtgaccgtccccccacgtcactactgcacagtggccaaccctgtgtctcgggatgcccagggcttggtgctgtttgatgtcacagggcaagttcggcttcgccacgctgacctcgagatccggctggcccaggaccccttccccctgtacccaggggaggtgctggaaaaggacatcacacccctgcaggtggttctgcccaacactgccctccatctaaaggcgctgcttgattttgaggataaagatggagacaaggtggtggcaggagatgagtggcttttcgagggacctggcacgtacatcccccggaaggaagtggaggtcgtggagatcattcaggccaccatcatcaggcagaaccaggctctgcggctcagggcccgcaaggagtgctgggaccgggacggcaaggagagggtgacaggggaagaatggctggtcaccacagtaggggcgtacctcccagcggtgtttgaggaggttctggatttggtggacgccgtcatccttacggaaaagacagccctgcacctccgggctcggcggaacttccgggacttcaggggagtgtcccgccgcactggggaggagtggctggtaacagtgcaggacacagaggcccacgtgccagatgtccacgaggaggtgctgggggttgtgcccatcaccaccctgggcccccacaactactgcgtgattctcgaccctgtcggaccggatggcaagaatcagctggggcagaagcgcgtggtcaagggagagaagtcttttttcctccagccaggagagcagctggaacaaggcatccaggatgtgtatgtgctgtcggagcagcaggggctgctgctgagggccctgcagcccctggaggagggggaggatgaggagaaggtctcacaccaggctggggaccactggctcatccgcggacccctggagtatgtgccatctgccaaagtggaggtggtggaggagcgccaggccatccctctagacgagaacgagggcatctatgtgcaggatgtcaagaccggaaaggtgcgcgctgtgattggaagcacctacatgctgacccaggacgaagtcctgtgggagaaagagctgcctcccggggtggaggagctgctgaacaaggggcaggaccctctggcagacaggggtgagaaggacacagctaagagcctccagcccttggcgccccggaacaagacccgtgtggtcagctaccgcgtgccccacaacgctgcggtgcaggtgtacgactaccgagagaagcgagcccgcgtggtcttcgggcctgagctggtgtcgctgggtcctgaggagcagttcacagtgttgtccctctcagctgggcggcccaagcgtccccatgcccgccgtgcgctctgcctgctgctggggcctgacttcttcacagacgtcatcaccatcgaaacggcggatcatgccaggctgcaactgcagctggcctacaactggcactttgaggtgaatgaccggaaggacccccaagagacggccaagctcttttcagtgccagactttgtaggtgatgcctgcaaagccatcgcatcccgggtgcggggggccgtggcctctgtcactttcgatgacttccataagaactcagcccgcatcattcgcactgctgtctttggctttgagacctcggaagcgaagggccccgatggcatggccctgcccaggccccgggaccaggctgtcttcccccaaaacgggctggtggtcagcagtgtggacgtgcagtcagtggagcctgtggatcagaggacccgggacgccctgcaacgcagcgtccagctggccatcgagatcaccaccaactcccaggaagcggcggccaagcatgaggctcagagactggagcaggaagcccgcggccggcttgagcggcagaagatcctggaccagtcagaagccgagaaagctcgcaaggaacttttggagctggaggctctgagcatggccgtggagagcaccgggactgccaaggcggaggccgagtcccgtgcggaggcagcccggattgagggagaagggtccgtgctgcaggccaagctaaaagcacaggccttggccattgaaacggaggctgagctccagagggtccagaaggtccgagagctggaactggtctatgcccgggcccagctggagctggaggtgagcaaggctcagcagctggctgaggtggaggtgaagaagttcaagcagatgacagaggccataggccccagcaccatcagggaccttgctgtggctgggcctgagatgcaggtaaaactgctccagtccctgggcctgaaatcaaccctcatcaccgatggctccactcccatcaacctcttcaacacagcctttgggctgctggggatggggcccgagggtcagcccctgggcagaagggtggccagtgggcccagccctggggaggggatatccccccagtctgctcaggcccctcaagctcctggagacaaccacgtggtgcctgtactgcgctaactcctgattaatacaatggaagtttctgggcatttacaatttcaaaaaatttctc

SEQ ID NO: 358091 - DNA, 2809 bp, Homo sapiens
ggctaggtcgagctgggtgtgaatcggccgaggtggctcatcttcttgtgagccctgggcttaggagtcaccatggcaactgaagagttcatcatccgcatccccccataccactatatccatgtgctggaccagaacagcaacgtgtcccgtgtggaggtcgggccaaagacctacatccggcaggacaatgagagggtactgtttgcccccatgcgcatggtgaccgtccccccacgtcactactgcacagtggccaaccctgtgtctcgggatgcccagggcttggtgctgtttgatgtcacagggcaagttcggcttcgccacgctgacctcgagatccggctggcccaggaccccttccccctgtacccaggggaggtgctggaaaaggacatcacacccctgcaggtggttctgcccaacactgccctccatctaaaggcgctgcttgattttgaggataaagatggagacaaggtggtggcaggagatgagtggcttttcgagggacctggcacgtacatcccccggaaggaagtggaggtcgtggagatcattcaggccaccatcatcaggcagaaccaggctctgcggctcagggcccgcaaggagtgctgggaccgggacggcaaggagagggtgacaggggaagaatggctggtcaccacagtaggggcgtacctcccagcggtgtttgaggaggttctggatttggtggacgccgtcatccttacggaaaagacagccctgcacctccgggctcggcggaacttccgggacttcaggggagtgtcccgccgcactggggaggagtggctggtaacagtgcaggacacagaggcccacgtgccagatgtccacgaggaggtgctgggggttgtgcccatcaccaccctgggcccccacaactactgcgtgattctcgaccctgtcggaccggatggcaagaatcagctggggcagaagcgcgtggtcaagggagagaagtcttttttcctccagccaggagagcagctggaacaaggcatccaggatgtgtatgtgctgtcggagcagcaggggctgctgctgagggccctgcagcccctggaggagggggaggatgaggagaaggtctcacaccaggctggggaccactggctcatccgcggacccctggagtatgtgccatctgccaaagtggaggtggtggaggagcgccaggccatccctctagacgagaacgagggcatctatgtgcaggatgtcaagaccggaaaggtgcgcgctgtgattggaagcacctacatgctgacccaggacgaagtcctgtgggagaaagagctgcctcccggggtggaggagctgctgaacaaggggcaggaccctctggcagacaggggtgagaaggacacagctaagagcctccagcccttggcgccccggaacaagacccgtgtggtcagctaccgcgtgccccacaacgctgcggtgcaggtgtacgactaccgagagaagcgagcccgcgtggtcttcgggcctgagctggtgtcgctgggtcctgaggagcagttcacagtgttgtccctctcagctgggcggcccaagcgtccccatgcccgccgtgcgctctgcctgctgctggggcctgacttcttcacagacgtcatcaccatcgaaacggcggatcatgccaggctgcaactgcagctggcctacaactggcactttgaggtgaatgaccggaaggacccccaagagacggccaagctcttttcagtgccagactttgtaggtgatgcctgcaaagccatcgcatcccgggtgcggggggccgtggcctctgtcactttcgatgacttccataagaactcagcccgcatcattcgcactgctgtctttggctttgagacctcggaagcgaagggccccgatggcatggccctgcccaggccccgggaccaggctgtcttcccccaaaacgggctggtggtcagcagtgtggacgtgcagtcagtggagcctgtggatcagaggacccgggacgccctgcaacgcagcgtccagctggccatcgagatcaccaccaactcccaggaagcggcggccaagcatgaggctcagagactggagcaggaagcccgcggccggcttgagcggcagaagatcctggaccagtcagaagccgagaaagctcgcaaggaacttttggagctggaggctctgagcatggccgtggagagcaccgggactgccaaggcggaggccgagtcccgtgcggaggcagcccggattgagggagaagggtccgtgctgcaggccaagctaaaagcacaggccttggccattgaaacggaggctgagctccagagggtccagaaggtccgagagctggaactggtctatgcccgggcccagctggagctggaggtgagcaaggctcagcagctggctgaggtggaggtgaagaagttcaagcagatgacagaggccataggccccagcaccatcagggaccttgctgtggctgggcctgagatgcaggtaaaactgctccagtccctgggcctgaaatcaaccctcatcaccgatggctccactcccatcaacctcttcaacacagcctttgggctgctggggatggggcccgagggtcagcccctgggcagaagggtggccagtgggcccagccctggggaggggatatccccccagtctgctcaggcccctcaagctcctggagacaaccacgtggtgcctgtactgcgctaactcctgattaatacaatggaagtttctgggcatttacaatttcaaaaaatttctc

SEQ ID NO: 358092 - DNA, 2841 bp, Homo sapiens
cacccctgggcttggcctgccttgccctgccgggaagtgatccccaaggcagggtgagagttccccatctgaggcgtttgttgcagctacctgcacttctagattcatcttcttgtgagccctgggcttaggagtcaccatggcaactgaagagttcatcatccgcatccccccataccactatatccatgtgctggaccagaacagcaacgtgtcccgtgtggaggtcgggccaaagacctacatccggcaggacaatgagagggtactgtttgcccccatgcgcatggtgaccgtccccccacgtcactactgcacagtggccaaccctgtgtctcgggatgcccagggcttggtgctgtttgatgtcacagggcaagttcggcttcgccacgctgacctcgagatccggctggcccaggaccccttccccctgtacccaggggaggtgctggaaaaggacatcacacccctgcaggtggttctgcccaacactgccctccatctaaaggcgctgcttgattttgaggataaagatggagacaaggtggtggcaggagatgagtggcttttcgagggacctggcacgtacatcccccggaaggaagtggaggtcgtggagatcattcaggccaccatcatcaggcagaaccaggctctgcggctcagggcccgcaaggagtgctgggaccgggacggcaaggagagggtgacaggggaagaatggctggtcaccacagtaggggcgtacctcccagcggtgtttgaggaggttctggatttggtggacgccgtcatccttacggaaaagacagccctgcacctccgggctcggcggaacttccgggacttcaggggagtgtcccgccgcactggggaggagtggctggtaacagtgcaggacacagaggcccacgtgccagatgtccacgaggaggtgctgggggttgtgcccatcaccaccctgggcccccacaactactgcgtgattctcgaccctgtcggaccggatggcaagaatcagctggggcagaagcgcgtggtcaagggagagaagtcttttttcctccagccaggagagcagctggaacaaggcatccaggatgtgtatgtgctgtcggagcagcaggggctgctgctgagggccctgcagcccctggaggagggggaggatgaggagaaggtctcacaccaggctggggaccactggctcatccgcggacccctggagtatgtgccatctgccaaagtggaggtggtggaggagcgccaggccatccctctagacgagaacgagggcatctatgtgcaggatgtcaagaccggaaaggtgcgcgctgtgattggaagcacctacatgctgacccaggacgaagtcctgtgggagaaagagctgcctcccggggtggaggagctgctgaacaaggggcaggaccctctggcagacaggggtgagaaggacacagctaagagcctccagcccttggcgccccggaacaagacccgtgtggtcagctaccgcgtgccccacaacgctgcggtgcaggtgtacgactaccgagagaagcgagcccgcgtggtcttcgggcctgagctggtgtcgctgggtcctgaggagcagttcacagtgttgtccctctcagctgggcggcccaagcgtccccatgcccgccgtgcgctctgcctgctgctggggcctgacttcttcacagacgtcatcaccatcgaaacggcggatcatgccaggctgcaactgcagctggcctacaactggcactttgaggtgaatgaccggaaggacccccaagagacggccaagctcttttcagtgccagactttgtaggtgatgcctgcaaagccatcgcatcccgggtgcggggggccgtggcctctgtcactttcgatgacttccataagaactcagcccgcatcattcgcactgctgtctttggctttgagacctcggaagcgaagggccccgatggcatggccctgcccaggccccgggaccaggctgtcttcccccaaaacgggctggtggtcagcagtgtggacgtgcagtcagtggagcctgtggatcagaggacccgggacgccctgcaacgcagcgtccagctggccatcgagatcaccaccaactcccaggaagcggcggccaagcatgaggctcagagactggagcaggaagcccgcggccggcttgagcggcagaagatcctggaccagtcagaagccgagaaagctcgcaaggaacttttggagctggaggctctgagcatggccgtggagagcaccgggactgccaaggcggaggccgagtcccgtgcggaggcagcccggattgagggagaagggtccgtgctgcaggccaagctaaaagcacaggccttggccattgaaacggaggctgagctccagagggtccagaaggtccgagagctggaactggtctatgcccgggcccagctggagctggaggtgagcaaggctcagcagctggctgaggtggaggtgaagaagttcaagcagatgacagaggccataggccccagcaccatcagggaccttgctgtggctgggcctgagatgcaggtaaaactgctccagtccctgggcctgaaatcaaccctcatcaccgatggctccactcccatcaacctcttcaacacagcctttgggctgctggggatggggcccgagggtcagcccctgggcagaagggtggccagtgggcccagccctggggaggggatatccccccagtctgctcaggcccctcaagctcctggagacaaccacgtggccttaagctaggcctataacatagttcgtctacctcc

SEQ ID NO: 358093 - DNA, 2662 bp, Homo sapiens
cacccctgggcttggcctgccttgccctgccgggaagtgatccccaaggcagggtgagagttccccatctgaggcgtttgttgcagctacctgcacttctagattcatcttcttgtgagccctgggcttaggagtcaccatggcaactgaagagttcatcatccgcatccccccataccactatatccatgtgctggaccagaacagcaacgtgtcccgtgtggaggtcgggccaaagacctacatccggcaggacaatgagagggtactgtttgcccccatgcgcatggtgaccgtccccccacgtcactactgcacagtggccaaccctgtgtctcgggatgcccagggcttggtgctgtttgatgtcacagggcaagttcggcttcgccacgctgacctcgagatccggctggcccaggaccccttccccctgtacccaggggaggtgctggaaaaggacatcacacccctgcaggtggttctgcccaacactgccctccatctaaaggcgctgcttgattttgaggataaagatggagacaaggtggtggcaggagatgagtggcttttcgagggacctggcacgtacatcccccggaaggaagtggaggtcgtggagatcattcaggccaccatcatcaggcagaaccaggctctgcggctcagggcccgcaaggagtgctgggaccgggacggcaaggagagggtgacaggggaagaatggctggtcaccacagtaggggcgtacctcccagcggtgtttgaggaggttctggatttggtggacgccgtcatccttacggaaaagacagccctgcacctccgggctcggcggaacttccgggacttcaggggagtgtcccgccgcactggggaggagtggctggtaacagtgcaggacacagaggcccacgtgccagatgtccacgaggaggtgctgggggttgtgcccatcaccaccctgggcccccacaactactgcgtgattctcgaccctgtcggaccggatggcaagaatcagctggggcagaagcgcgtggtcaagggagagaagtcttttttcctccagccaggagagcagctggaacaaggcatccaggatgtgtatgtgctgtcggagcagcaggggctgctgctgagggccctgcagcccctggaggagggggaggatgaggagaaggtctcacaccaggctggggaccactggctcatccgcggacccctggagtatgtgccatctgccaaagtggaggtggtggaggagcgccaggccatccctctagacgagaacgagggcatctatgtgcaggatgtcaagaccggaaaggtgcgcgctgtgattggaagcacctacatgctgacccaggacgaagtcctgtgggagaaagagctgcctcccggggtggaggagctgctgaacaaggggcaggaccctctggcagacaggggtgagaaggacacagctaagagcctccagcccttggcgccccggaacaagacccgtgtggtcagctaccgcgtgccccacaacgctgcggtgcaggtgtacgactaccgagagaagcgagcccgcgtggtcttcgggcctgagctggtgtcgctgggtcctgaggagcagttcacagtgttgtccctctcagctgggcggcccaagcgtccccatgcccgccgtgcgctctgcctgctgctggggcctgacttcttcacagacgtcatcaccatcgaaacggcggatcatgccaggctgcaactgcagctggcctacaactggcactttgaggtgaatgaccggaaggacccccaagagacggccaagctcttttcagtgccagactttgtaggtgatgcctgcaaagccatcgcatcccgggtgcggggggccgtggcctctgtcactttcgatgacttccataagaactcagcccgcatcattcgcactgctgtctttggctttgagacctcggaagcgaagggccccgatggcatggccctgcccaggccccgggaccaggctgtcttcccccaaaacgggctggtggtcagcagtgtggacgtgcagtcagtggagcctgtggatcagaggacccgggacgccctgcaacgcagcgtccagctggccatcgagatcaccaccaactcccaggaagcggcggccaagcatgaggctcagagactggagcaggaagcccgcggccggcttgagcggcagaagatcctggaccagtcagaagccgagaaagctcgcaaggaacttttggagctggaggctctgagcatggccgtggagagcaccgggactgccaaggcggaggccgagtcccgtgcggaggcagcccggattgagggagaagggtccgtgctgcaggccaagctaaaagcacaggccttggccattgaaacggaggctgagctccagagggtccagaaggtccgagagctggaactggtctatgcccgggcccagctggagctggaggtgagcaaggctcagcagctggctgaggtggaggtgaagaagttcaagcagatgacagaggccataggccccagcaccatcagggaccttgctgtggctgggcctgagatgcagaaaactgctccagtccctgggccattcaacgcctccgggccatacaacgcctccgggtacattacaacg

SEQ ID NO: 358094 - DNA, 2846 bp, Homo sapiens
cacccctgggcttggcctgccttgccctgccgggaagtgatccccaaggcagggtgagagttccccatctgaggcgtttgttgcagctacctgcacttctagattcatcttcttgtgagccctgggcttaggagtcaccatggcaactgaagagttcatcatccgcatccccccataccactatatccatgtgctggaccagaacagcaacgtgtcccgtgtggaggtcgggccaaagacctacatccggcaggacaatgagagggtactgtttgcccccatgcgcatggtgaccgtccccccacgtcactactgcacagtggccaaccctgtgtctcgggatgcccagggcttggtgctgtttgatgtcacagggcaagttcggcttcgccacgctgacctcgagatccggctggcccaggaccccttccccctgtacccaggggaggtgctggaaaaggacatcacacccctgcaggtggttctgcccaacactgccctccatctaaaggcgctgcttgattttgaggataaagatggagacaaggtggtggcaggagatgagtggcttttcgagggacctggcacgtacatcccccggaaggaagtggaggtcgtggagatcattcaggccaccatcatcaggcagaaccaggctctgcggctcagggcccgcaaggagtgctgggaccgggacggcaaggagagggtgacaggggaagaatggctggtcaccacagtaggggcgtacctcccagcggtgtttgaggaggttctggatttggtggacgccgtcatccttacggaaaagacagccctgcacctccgggctcggcggaacttccgggacttcaggggagtgtcccgccgcactggggaggagtggctggtaacagtgcaggacacagaggcccacgtgccagatgtccacgaggaggtgctgggggttgtgcccatcaccaccctgggcccccacaactactgcgtgattctcgaccctgtcggaccggatggcaagaatcagctggggcagaagcgcgtggtcaagggagagaagtcttttttcctccagccaggagagcagctggaacaaggcatccaggatgtgtatgtgctgtcggagcagcaggggctgctgctgagggccctgcagcccctggaggagggggaggatgaggagaaggtctcacaccaggctggggaccactggctcatccgcggacccctggagtatgtgccatctgccaaagtggaggtggtggaggagcgccaggccatccctctagacgagaacgagggcatctatgtgcaggatgtcaagaccggaaaggtgcgcgctgtgattggaagcacctacatgctgacccaggacgaagtcctgtgggagaaagagctgcctcccggggtggaggagctgctgaacaaggggcaggaccctctggcagacaggggtgagaaggacacagctaagagcctccagcccttggcgccccggaacaagacccgtgtggtcagctaccgcgtgccccacaacgctgcggtgcaggtgtacgactaccgagagaagcgagcccgcgtggtcttcgggcctgagctggtgtcgctgggtcctgaggagcagttcacagtgttgtccctctcagctgggcggcccaagcgtccccatgcccgccgtgcgctctgcctgctgctggggcctgacttcttcacagacgtcatcaccatcgaaacggcggatcatgccaggctgcaactgcagctggcctacaactggcactttgaggtgaatgaccggaaggacccccaagagacggccaagctcttttcagtgccagactttgtaggtgatgcctgcaaagccatcgcatcccgggtgcggggggccgtggcctctgtcactttcgatgacttccataagaactcagcccgcatcattcgcactgctgtctttggctttgagacctcggaagcgaagggccccgatggcatggccctgcccaggccccgggaccaggctgtcttcccccaaaacgggctggtggtcagcagtgtggacgtgcagtcagtggagcctgtggatcagaggacccgggacgccctgcaacgcagcgtccagctggccatcgagatcaccaccaactcccaggaagcggcggccaagcatgaggctcagagactggagcaggaagcccgcggccggcttgagcggcagaagatcctggaccagtcagaagccgagaaagctcgcaaggaacttttggagctggaggctctgagcatggccgtggagagcaccgggactgccaaggcggaggccgagtcccgtgcggaggcagcccggattgagggagaagggtccgtgctgcaggccaagctaaaagcacaggccttggccattgaaacgagccaattgaaaacggagggctagagctcaataaggaataggccgatatgcggagtggggtcttggggtggagaacctcggaagcgaagggccccgatgcatggccctgcccaggccccgggaccaggctgtcttataggccccagcaccatcagggaccttgctgtggctgggcctgagatgcaggtaaaactgctccagtccctgggcctgaaatcaaccctcatcaccgatggctccactcccatcaacctcttcaacacagcctttgggctgctggggatggggcccgagggtcagcccctgggcagaagggtggccagtgggcccagccctggggaggggatatccccccagtctgctcaggcccctcaagctcctggagacaaccacgtggtgcctgtactgcgctaactcctgattaatacaatggaagtttctg

SEQ ID NO: 358095 - DNA, 2629 bp, Homo sapiens
cacccctgggcttggcctgccttgccctgccgggaagtgatccccaaggcagggtgagagttccccatctgaggcgtttgttgcagctacctgcacttctagattcatcttcttgtgagccctgggcttaggagtcaccatggcaactgaagagttcatcatccgcatccccccataccactatatccatgtgctggaccagaacagcaacgtgtcccgtgtggaggtcgggccaaagacctacatccggcaggacaatgagagggtactgtttgcccccatgcgcatggtgaccgtccccccacgtcactactgcacagtggccaaccctgtgtctcgggatgcccagggcttggtgctgtttgatgtcacagggcaagttcggcttcgccacgctgacctcgagatccggctggcccaggaccccttccccctgtacccaggggaggtgctggaaaaggacatcacacccctgcaggtggttctgcccaacactgccctccatctaaaggcgctgcttgattttgaggataaagatggagacaaggtggtggcaggagatgagtggcttttcgagggacctggcacgtacatcccccggaaggaagtggaggtcgtggagatcattcaggccaccatcatcaggcagaaccaggctctgcggctcagggcccgcaaggagtgctgggaccgggacggcaaggagagggtgacaggggaagaatggctggtcaccacagtaggggcgtacctcccagcggtgtttgaggaggttctggatttggtggacgccgtcatccttacggaaaagacagccctgcacctccgggctcggcggaacttccgggacttcaggggagtgtcccgccgcactggggaggagtggctggtaacagtgcaggacacagaggcccacgtgccagatgtccacgaggaggtgctgggggttgtgcccatcaccaccctgggcccccacaactactgcgtgattctcgaccctgtcggaccggatggcaagaatcagctggggcagaagcgcgtggtcaagggagagaagtcttttttcctccagccaggagagcagctggaacaaggcatccaggatgtgtatgtgctgtcggagcagcaggggctgctgctgagggccctgcagcccctggaggagggggaggatgaggagaaggtctcacaccaggctggggaccactggctcatccgcggacccctggagtatgtgccatctgccaaagtggaggtggtggaggagcgccaggccatccctctagacgagaacgagggcatctatgtgcaggatgtcaagaccggaaaggtgcgcgctgtgattggaagcacctacatgctgacccaggacgaagtcctgtgggagaaagagctgcctcccggggtggaggagctgctgaacaaggggcaggaccctctggcagacaggggtgagaaggacacagctaagagcctccagcccttggcgccccggaacaagacccgtgtggtcagctaccgcgtgccccacaacgctgcggtgcaggtgtacgactaccgagagaagcgagcccgcgtggtcttcgggcctgagctggtgtcgctgggtcctgaggagcagttcacagtgttgtccctctcagctgggcggcccaagcgtccccatgcccgccgtgcgctctgcctgctgctggggcctgacttcttcacagacgtcatcaccatcgaaacggcggatcatgccaggctgcaactgcagctggcctacaactggcactttgaggtgaatgaccggaaggacccccaagagacggccaagctcttttcagtgccagactttgtaggtgatgcctgcaaagccatcgcatcccgggtgcggggggccgtggcctctgtcactttcgatgacttccataagaactcagcccgcatcattcgcactgctgtctttggctttgagacctcggaagcgaagggccccgatggcatggccctgcccaggccccgggaccaggctgtcttcccccaaaacgggctggtggtcagcagtgtggacgtgcagtcagtggagcctgtggatcagaggacccgggacgccctgcaacgcagcgtccagctggccatcgagatcaccaccaactcccaggaagcggcggccaagcatgaggctcagagactggagcaggaagcccgcggccggcttgagcggcagaagatcctggaccagtcagaagccgagaaagctcgcaaggaacttttggagctggaggctctgagctggctgaggtggaggtgaagaagttcaagcagatgacagaggccataggccccagcaccatcagggaccttgctgtggctgggcctgagatgcaggtaaaactgctccagtccctgggcctgaaatcaaccctcatcaccgatggctccactcccatcaacctcttcaacacagcctttgggctgctggggatggggcccgagggtcagcccctgggcagaagggtggccagtgggcccagccctggggaggggatatccccccagtctgctcaggcccctcaagctcctggagacaaccacgtggtgcctgtactgcgctaactcctgattaatacaatggaagtttctg

SEQ ID NO: 358096 - DNA, 2493 bp, Homo sapiens
cacccctgggcttggcctgccttgccctgccgggaagtgatccccaaggcagggtgagagttccccatctgaggcgtttgttgcagctacctgcacttctagattcatcttcttgtgagccctgggcttaggagtcaccatggcaactgaagagttcatcatccgcatccccccataccactatatccatgtgctggaccagaacagcaacgtgtcccgtgtggaggtcgggccaaagacctacatccggcaggacaatgagagggtactgtttgcccccatgcgcatggtgaccgtccccccacgtcactactgcacagtggccaaccctgtgtctcgggatgcccagggcttggtgctgtttgatgtcacagggcaagttcggcttcgccacgctgacctcgagatccggctggcccaggaccccttccccctgtacccaggggaggtgctggaaaaggacatcacacccctgcaggtggttctgcccaacactgccctccatctaaaggcgctgcttgattttgaggataaagatggagacaaggtggtggcaggagatgagtggcttttcgagggacctggcacgtacatcccccggaaggaagtggaggtcgtggagatcattcaggccaccatcatcaggcagaaccaggctctgcggctcagggcccgcaaggagtgctgggaccgggacggcaaggagagggtgacaggggaagaatggctggtcaccacagtaggggcgtacctcccagcggtgtttgaggaggttctggatttggtggacgccgtcatccttacggaaaagacagccctgcacctccgggctcggcggaacttccgggacttcaggggagtgtcccgccgcactggggaggagtggctggtaacagtgcaggacacagaggcccacgtgccagatgtccacgaggaggtgctgggggttgtgcccatcaccaccctgggcccccacaactactgcgtgattctcgaccctgtcggaccggatggcaagaatcagctggggcagaagcgcgtggtcaagggagagaagtcttttttcctccagccaggagagcagctggaacaaggcatccaggatgtgtatgtgctgtcggagcagcaggggctgctgctgagggccctgcagcccctggaggagggggaggatgaggagaaggtctcacaccaggctggggaccactggctcatccgcggacccctggagtatgtgccatctgccaaagtggaggtggtggaggagcgccaggccatccctctagacgagaacgagggcatctatgtgcaggatgtcaagaccggaaaggtgcgcgctgtgattggaagcacctacatgctgacccaggacgaagtcctgtgggagaaagagctgcctcccggggtggaggagctgctgaacaaggggcaggaccctctggcagacaggggtgagaaggacacagctaagagcctccagcccttggcgccccggaacaagacccgtgtggtcagctaccgcgtgccccacaacgctgcggtgcaggtgtacgactaccgagagaagcgagcccgcgtggtcttcgggcctgagctggtgtcgctgggtcctgaggagcagttcacagtgttgtccctctcagctgggcggcccaagcgtccccatgcccgccgtgcgctctgcctgctgctggggcctgacttcttcacagacgtcatcaccatcgaaacggcggatcatgccaggctgcaactgcagctggcctacaactggcactttgaggtgaatgaccggaaggacccccaagagacggggccggcttgagcggcagaagatcctggaccagtcagaagccgagaaagctcgcaaggaacttttggagctggaggctctgagcatggccgtggagagcaccgggactgccaaggcggaggccgagtcccgtgcggaggcagcccggattgagggagaagggtccgtgctgcaggccaagctaaaagcacaggccttggccattgaaacgagccaattgaaaacggagggctagagctcaataaggaataggccgatatgcggagtggggtcttggggtggagaacctcggaagcgaagggccccgatgcatggccctgcccaggccccgggaccaggctgtcttataggccccagcaccatcagggaccttgctgtggctgggcctgagatgcaggtaaaactgctccagtccctgggcctgaaatcaaccctcatcaccgatggctccactcccatcaacctcttcaacacagcctttgggctgctggggatggggcccgagggtcagcccctgggcagaagggtggccagtgggcccagccctggggaggggatatccccccagtctgctcaggcccctcaagctcctggagacaaccacgtggtgcctgtactgcgctaactcctgattaatacaatggaagtttctgggcatttacaatttcaaaaaatttctc

SEQ ID NO: 358097 - DNA, 2165 bp, Homo sapiens
cacccctgggcttggcctgccttgccctgccgggaagtgatccccaaggcagggtgagagttccccatctgaggcgtttgttgcagctacctgcacttctagattcatcttcttgtgagccctgggcttaggagtcaccatggcaactgaagagttcatcatccgcatccccccataccactatatccatgtgctggaccagaacagcaacgtgtcccgtgtggaggtcgggccaaagacctacatccggcaggacaatgagagggtactgtttgcccccatgcgcatggtgaccgtccccccacgtcactactgcacagtggccaaccctgtgtctcgggatgcccagggcttggtgctgtttgatgtcacagggcaagttcggcttcgccacgctgacctcgagatccggctggcccaggaccccttccccctgtacccaggggaggtgctggaaaaggacatcacacccctgcaggtggttctgcccaacactgccctccatctaaaggcgctgcttgattttgaggataaagatggagacaaggtggtggcaggagatgagtggcttttcgagggacctggcacgtacatcccccggaaggaagtggaggtcgtggagatcattcaggccaccatcatcaggcagaaccaggctctgcggctcagggcccgcaaggagtgctgggaccgggacggcaaggagagggtgacaggggaagaatggctggtcaccacagtaggggcgtacctcccagcggtgtttgaggaggttctggatttggtggacgccgtcatccttacggaaaagacagccctgcacctccgggctcggcggaacttccgggacttcaggggagtgtcccgccgcactggggaggagtggctggtaacagtgcaggacacagaggcccacgtgccagatgtccacgaggaggtgctgggggttgtgcccatcaccaccctgggcccccacaactactgcgtgattctcgaccctgtcggaccggatggcaagaatcagctggggcagaagcgcgtggtcaagggagagaagtcttttttcctccagccaggagagcagctggaacaaggcatccaggatgtgtatgtgctgtcggagcagcaggggctgctgctgagggccctgcagcccctggaggagggggaggatgaggagaaggtctcacaccaggctggggaccactggctcatccgcggacccctggagtatgtgccatctgccaaagtggaggtggtggaggagcgccaggccatccctctagacgagaacgagggcatctatgtgcaggatgtcaagaccggaaaggtgcgcgctgtgattggaagcacctacatgctgacccaggacgaagtcctgtgggagaaagagctgcctcccggggtggaggagctgctgaacaaggggcaggaccctctggcagacaggggtgagaaggacacagctaagagcctccagcccttggcgccccggaacaagacccgtgtggtcagctaccgcgtgccccacaacgctgcggtgcaggtgtacgactaccgagagaagcgagcccgcgtggtcttcgggcctgagctggtgtcgctgggtcctgaggagcagttcacagtgttgtccctctcagctgggcggcccaagcgtccccatgcccgccgtgcgctctgcctgctgctggggcctgacttcttcacagacgtcatcaccatcgaaacggcggatcatgccaggctgcaactgcagctggcctacaactggcactttgaggtgaatgaccggaaggacccccaagagacggccaagctcttttcagtgccagactttgtaggtgatgcctgcaaaataggccccagcaccatcagggaccttgctgtggctgggcctgagatgcaggtaaaactgctccagtccctgggcctgaaatcaaccctcatcaccgatggctccactcccatcaacctcttcaacacagcctttgggctgctggggatggggcccgagggtcagcccctgggcagaagggtggccagtgggcccagccctggggaggggatatccccccagtctgctcaggcccctcaagctcctggagacaaccacgtggtgcctgtactgcgctaactcctgattaatacaatggaagtttctg

SEQ ID NO: 358098 - DNA, 1241 bp, Homo sapiens
cacccctgggcttggcctgccttgccctgccgggaagtgatccccaaggcagggtgagagttccccatctgaggcgtttgttgcagctacctgcacttctagattcatcttcttgtgagccctgggcttaggagtcaccatggcaactgaagagttcatcatccgcatccccccataccactatatccatgtgctggaccagaacagcaacgtgtcccgtgtggaggtcgggccaaagacctacatccggcaggacaatgagagggtactgtttgcccccatgcgcatggtgaccgtccccccacgtcactactgcacagtggccaaccctgtgtctcgggatgcccagggcttggtgctgtttgatgtcacagggcaagttcggcttcgccacgctgacctcgagatccggctggcccaggaccccttccccctgtacccaggggaggtgctggaaaaggacatcacacccctgcaggtggttctgcccaacactgccctccatctaaaggcgctgcttgattttgaggataaagatggagacaaggtggtggcaggagatgagtggcttttcgagggacctggcacgtacatcccccggaaggaagtggaggtcgtggagatcattcaggccaccatcatcaggcagaaccaggctctgcggctcagggcccgcaaggagtgctgggaccgggacggcaaggagagggtgacaggggaagaatggctggtcaccacagtaggggcgtacctcccagcggtgtttgaggaggttctggatttggtggacgccgtcatccttacggaaaagacagccctgcacctccgggctcggcggaacttccgggacttcaggggagtgtcccgccgcactggggaggagtggctggtaacagtgcaggacacagaggcccacgtgccagatgtccacgaggaggtgctgggggttgtgcccatcaccaccctgggcccccacaactactgcgtaaaactgctccagtccctgggcctgaaatcaaccctcatcaccgatggctccactcccatcaacctcttcaacacagcctttgggctgctggggatggggcccgagggtcagcccctgggcagaagggtggccagtgggcccagccctggggaggggatatccccccagtctgctcaggcccctcaagctcctggagacaaccacgtggtgcctgtactgcgctaactcctgattaatacaatggaagtttctg

SEQ ID NO: 358099 - DNA, 1211 bp, Homo sapiens
taggtcgaggccggtgttgatcggacgagggcctccagcccttggcgccccggaacaagacccgtgtggtcagctaccgcgtgccccacaacgctgcggtgcaggtgtacgactaccgagagaagcgagcccgcgtggtcttcgggcctgagctggtgtcgctgggtcctgaggagcagttcacagtgttgtccctctcagctgggcggcccaagcgtccccatgcccgccgtgcgctctgcctgctgctggggcctgacttcttcacagacgtcatcaccatcgaaacggcggatcatgccaggctgcaactgcagctggcctacaactggcactttgaggtgaatgaccggaaggacccccaagagacggccaagctcttttcagtgccagactttgtaggtgatgcctgcaaagccatcgcatcccgggtgcggggggccgtggcctctgtcactttcgatgacttccataagaactcagcccgcatcattcgcactgctgtctttggctttgagacctcggaagcgaagggccccgatggcatggccctgcccaggccccgggaccaggctgtcttcccccaaaacgggctggtggtcagcagtgtggacgtgcagtcagtggagcctgtggatcagaggacccgggacgccctgcaacgcagcgtccagctggccatcgagatcaccaccaactcccaggaagcggcggccaagcatgaggctcagagactggagcaggaagcccgcggccggcttgagcggcagaagatctggaactggtctatgcccgggcccagctggagctggaggtgagcaaggctcagcagctggctgaggtggaggtgaagaagttcaagcagatgacagaggccataggccccagcaccatcagggaccttgctgtggctgggcctgagatgcaggtaaaactgctccagtccctgggcctgaaatcaaccctcatcaccgatggctccactcccatcaacctcttcaacacagcctttgggctgctggggatggggcccgagggtcagcccctgggcagaagggtggccagtgggcccagccctggggaggggatatccccccagtctgctcaggcccctcaagctcctggagacaaccacgtggtgcctgtactgcgctaactcctgattaatacaatggaagtttctgggcatttacaatttcaaaaaatttctc

SEQ ID NO: 358100 - DNA, 347 bp, Homo sapiens
gtgggtgtgggggctgggctgtgggggatccttggggatgtgggggcctgtttggctggcatgatggtccttatcctcctccctcttcccaagcaggagtggccctcgcttgggcgatagagaggtttctctctcatttggtgtcctctttggtagtggagacctggtcccaggtcctcacacctcttctcatcttcctgcagggtactgtttgcccccatgcgcatggtgaccgtccccccacgtcactactgcacagtggccaaccctgtgtctcgggatgcccagggcttggtgctgtttgatgtcacagggcaagttcggcttcgccacgctgacctcgagat

SEQ ID NO: 358101 - DNA, 307 bp, Homo sapiens
actgtttatttatccctttctgcccccaaaccatcgcaaccactgatctttttgcttcatcgttttacctttttcagaatgtcgtatagttaaaatcacaccagatgtggccttttcagattggcttctttcacttagtatgtgcatttaaggttcctccatgtctttccatggcatgatagttcatttctttattgtgataaataatgtctcattagtgggtgtatcattgtttatgcattcatctattgaagcacatcttggttgcctgtaagctttggcaattattaataaagcctctataaac

SEQ ID NO: 358102 - DNA, 1512 bp, Homo sapiens
accctctaacagagtaatatctgtcccctctcaactgcatgctgaatactggatcctagactcttgagagctaaataaagtatatcttttagctgcagtttcatattaaaaatgaatttttaacaatctgcatatttagatgaaatattagggaatagttactaaatgtacaaaatggtataagaaatgtatgttcgtgtcctcattatactccattccataaggtagtaaaatacttgtctgtttttcttacagaagttgattcaagtcagttgagacgccagttgtgtggaggaagtcaggccgccatagaaagaatgatccactttggacgagagctgcaagcaatgagtgaacagctaaggagagactgtggcaagaacactgcaaacaaaaaaatgttgaaggatgcattcagtctactagcatattcagatccctggaacagcccagttggaaatcagcttgacccgattcagagagaacctgtgtgctcagctcttaacagtgcaatattagaaacccacaatctgccaaagcaacctccacttgccctagcaatgggacaggccacacaatgtctaggactgatggctcgatcaggaattggatcctgcgcatttgccacagtggaagactacctacattagctatgcatttcaagagctcacacttatattgtggcatatagtcaacatggaagtagaccagctctgctgatttgaaatttagattttttaaattatgtactggggacaggtttttgtcgctttacattgcttcctagtttacagcatgatgcaaatgattttctaacttagtgttaggagaaattattttccatctttaacctcttagttgtctaagagttaaatattactgaatttcagacgttcaaattgatcatcacaaatcctttaaaacaattacctaaaagaaaccaaaaatcctgccttctttgtgggggaggggggagagaggggaaggaaatggaacaagttgtgtttgtgttagcatgtgggtgatgtaaacttcaaattgggagatgttccgacccccactcccatataagcattcaatcagtgtaacttgcaaaatgcataaacatccgacagtttgaatttatagtgttgatggaagaaatcatttttaatgtgtactgtaaaacttgaaatactcaggagctgagtgaatatgtttgttgctacttacaatcccgacctgttagtcccagtagttttgttttaacatggtctttttcaactttgtttcctgtttaactacagatgacttctgttgtagactcacaagtttaactgttgtattataacagtattacatgtcaacggtgtggttatgacctttatttatataaaaaccaaatatttagtcaatttaccgtgtcttaatttaatctttgtacaccttccatttttaagtgcttaaatgagtactatattgcaataaaatgtagtgatataattaaccagccattaaaaatttacttctaca

SEQ ID NO: 358103 - DNA, 3277 bp, Homo sapiens
gcgctccggccaacgttctctcccggcctcccgggcccgccgcctactcccgcgtctccgagctcctcaaccgccgcggtctccctgggcgcgcggcccgccgcctgcttccggggcgggcggactgggcgcctggtgccggcggccgcagcgacagcgcccccgggaagcagaggaggaaggagagaagaggtggaggtggccgcaggctgagtcgcggccgggatgtccgggcagccgccgccgccgccgccgcagcagcagcaacagcagcagcagctgtcgccgccaccgccggcggccttggccccagtctccggagtcgtcctgccggcgcccccggccgtcagcgccggctcttctccggccggctcgcccggcggcggtgcgggcggcgaaggcttaggggccgcggcggccgccctgctcctccaccctccgccgccgccgcccccggccaccgcggccccgccgcccccgccgccgcccccgcctccccctgcctcagcggctgcccccgccagcgggccgcccgctcccccgggccttgcagcgggccccggcccggctggaggggccccgaccccagctctggtggcgggcagcagcgccgcggcccccttccctcacggggactcggccctgaacgagcaggagaaggagttgcagcggcggctgaagcgtctctacccggccgtggacgaacaagagacgccgctgcctcggtcctggagcccgaaggacaagttcagctacatcggcctctctcagaacaacctgcgggtgcactacaaaggtcatggcaaaaccccaaaagatgccgcgtcagttcgagccacgcatccaataccagcagcctgtgggatttattattttgaagtaaaaattgtcagtaagggaagagatggttacatgggaattggtctttctgctcaaggtgtgaacatgaatagactaccaggttgggataagcattcatatggttaccatggggatgatggacattcgttttgttcttctggaactggacaaccttatggaccaactttcactactggtgatgtcattggctgttgtgttaatcttatcaacaatacctgcttttacaccaagaatggacatagtttaggtattgctttcactgacctaccgccaaatttgtatcctactgtggggcttcaaacaccaggagaagtggtcgatgccaattttgggcaacatcctttcgtgtttgatatagaagactatatgcgggagtggagaaccaaaatccaggcacagatagatcgatttcctatcggagatcgagaaggagaatggcagaccatgatacaaaaaatggtttcatcttatttagtccaccatgggtactgtgccacagcagaggcctttgccagatctacagaccagaccgttctagaagaattagcttccattaagaatagacaaagaattcagaaattggtattagcaggaagaatgggagaagccattgaaacaacacaacagttatacccaagtttacttgaaagaaatcctaatctccttttcacattaaaagtgcgtcagtttatagaaatggtgaatggtacagatagtgaagtacgatgtttgggaggccgaagtccaaagtctcaagacagttatcctgttagtcctcgaccttttagtagtccaagtatgagccccagccatggaatgaatatccacaatttagcatcaggcaaaggaagcaccgcacatttttcaggttttgaaagttgtagtaatggtgtaatatcaaataaagcacatcaatcatattgccatagtaataaacaccagtcatccaacttgaatgtaccagaactaaacagtataaatatgtcaagatcacagcaagttaataacttcaccagtaatgatgtagacatggaaacagatcactactccaatggagttggagaaacttcatccaatggtttcctaaatggtagctctaaacatgaccacgaaatggaagattgtgacaccgaaatggaagttgattcaagtcagttgagacgccagttgtgtggaggaagtcaggccgccatagaaagaatgatccactttggacgagagctgcaagcaatgagtgaacagctaaggagagactgtggcaagaacactgcaaacaaaaaaatgttgaaggatgcattcagtctactagcatattcagatccctggaacagcccagttggaaatcagcttgacccgattcagagagaacctgtgtgctcagctcttaacagtgcaatattagaaacccacaatctgccaaagcaacctccacttgccctagcaatgggacaggccacacaatgtctaggactgatggctcgatcaggaattggatcctgcgcatttgccacagtggaagactacctacattagctatgcatttcaagagctcacacttatattgtggcatatagtcaacatggaagtagaccagctctgctgatttgaaatttagattttttaaattatgtactggggacaggtttttgtcgctttacattgcttcctagtttacagcatgatgcaaatgattttctaacttagtgttaggagaaattattttccatctttaacctcttagttgtctaagagttaaatattactgaatttcagacgttcaaattgatcatcacaaatcctttaaaacaattacctaaaagaaaccaaaaatcctgccttctttgtgggggaggggggagagaggggaaggaaatggaacaagttgtgtttgtgttagcatgtgggtgatgtaaacttcaaattgggagatgttccgacccccactcccatataagcattcaatcagtgtaacttgcaaaatgcataaacatccgacagtttgaatttatagtgttgatggaagaaatcatttttaatgtgtactgtaaaacttgaaatactcaggagctgagtgaatatgtttgttgctacttacaatcccgacctgttagtcccagtagttttgttttaacatggtctttttcaactttgtttcctgtttaactacagatgacttctgttgtagactcacaagtttaactgttgtattataacagtattacatgtcaacggtgtggttatgacctttatttatataaaaaccaaatatttagtcaatttaccgtgtcttaatttaatctttgtacaccttccatttttaagtgcttaaatgagtactatattgcaataaaatgtagtgatataattaaccagccattaaaaatttacttctaca

SEQ ID NO: 358104 - DNA, 3504 bp, Homo sapiens
gcgctccggccaacgttctctcccggcctcccgggcccgccgcctactcccgcgtctccgagctcctcaaccgccgcggtctccctgggcgcgcggcccgccgcctgcttccggggcgggcggactgggcgcctggtgccggcggccgcagcgacagcgcccccgggaagcagaggaggaaggagagaagaggtggaggtggccgcaggctgagtcgcggccgggatgtccgggcagccgccgccgccgccgccgcagcagcagcaacagcagcagcagctgtcgccgccaccgccggcggccttggccccagtctccggagtcgtcctgccggcgcccccggccgtcagcgccggctcttctccggccggctcgcccggcggcggtgcgggcggcgaaggcttaggggccgcggcggccgccctgctcctccaccctccgccgccgccgcccccggccaccgcggccccgccgcccccgccgccgcccccgcctccccctgcctcagcggctgcccccgccagcgggccgcccgctcccccgggccttgcagcgggccccggcccggctggaggggccccgaccccagctctggtggcgggcagcagcgccgcggcccccttccctcacggggactcggccctgaacgagcaggagaaggagttgcagcggcggctgaagcgtctctacccggccgtggacgaacaagagacgccgctgcctcggtcctggagcccgaaggacaagttcagctacatcggcctctctcagaacaacctgcgggtgcactacaaaggtcatggcaaaaccccaaaagatgccgcgtcagttcgagccacgcatccaataccagcagcctgtgggatttattattttgaagtaaaaattgtcagtaagggaagagatggttacatgggaattggtctttctgctcaaggtgtgaacatgaatagactaccaggttgggataagcattcatatggttaccatggggatgatggacattcgttttgttcttctggaactggacaaccttatggaccaactttcactactggtgatgtcattggctgttgtgttaatcttatcaacaatacctgcttttacaccaagaatggacatagtttaggtattgctttcactgacctaccgccaaatttgtatcctactgtggggcttcaaacaccaggagaagtggtcgatgccaattttgggcaacatcctttcgtgtttgatatagaagactatatgcgggagtggagaaccaaaatccaggcacagatagatcgatttcctatcggagatcgagaaggagaatggcagaccatgatacaaaaaatggtttcatcttatttagtccaccatgggtactgtgccacagcagaggcctttgccagatctacagaccagaccgttctagaagaattagcttccattaagaatagacaaagaattcagaaattggtattagcaggaagaatgggagaagccattgaaacaacacaacagttatacccaagtttacttgaaagaaatcctaatctccttttcacattaaaagtgcgtcagtttatagaaatggtgaatggtacagatagtgaagtacgatgtttgggaggccgaagtccaaagtctcaagacagttatcctgttagtcctcgaccttttagtagtccaagtatgagccccagccatggaatgaatatccacaatttagcatcaggcaaaggaagcaccgcacatttttcaggttttgaaagttgtagtaatggtgtaatatcaaataaagcacatcaatcatattgccatagtaataaacaccagtcatccaacttgaatgtaccagaactaaacagtataaatatgtcaagatcacagcaagttaataacttcaccagtaatgatgtagacatggaaacagatcactactccaatggagttggagaaacttcatccaatggtttcctaaatggtagctctaaacatgaccacgaaatggaagattgtgacaccgaaatggaagttgattcaagtcagttgagacgccagttgtgtggaggaagtcaggccgccatagaaagaatgatccactttggacgagagctgcaagcaatgagtgaacagctaaggagagactgtggcaagaacactgcaaacaaaaaaatgttgaaggatgcattcagtctactagcatattcagatccctggaacagcccagttggaaatcagcttgacccgattcagagagaacctgtgtgctcagctcttaacagtgcaatattagaaacccacaatctgccaaagcaacctccacttgccctagcaatgggacaggccacacaatgtctaggactgatggctcgatcaggaattggatcctgcgcatttgccacagtggaagactacctacattagctatgcatttcaagagctcacacttatattgtggcatatagtcaacatggaagtagaccagctctgctgatttgaaatttagattttttaaattatgtactggggacaggtttttgtcgctttacattgcttcctagtttacagcatgatgcaaatgattttctaacttagtgttaggagaaattattttccatctttaacctcttagttgtctaagagttaaatattactgaatttcagacgttcaaattgatcatcacaaatcctttaaaacaattacctaaaagaaaccaaaaatcctgccttctttgtgggggaggggggagagaggggaaggaaatggaacaagttgtgtttgtgttagcatgtgggtgatgtaaacttcaaattgggagatgttccgacccccactcccatataagcattcaatcagtgtaacttgcaaaatgcataaacatccgacagtttgaatttatagtgttgatggaagaaatcatttttaatgtgtactgtaaaacttgaaatactcaggagctgagtgaatatgtttgttgctacttacaatcccgacctgttagtcccagtagttttgttttaacatggtctttttcaactttgtttcctgtttaactacagatgacttctgttgtagactcacaagtttaactgttgtattataacagtattacatgtcaacggtgtggttatgacctttatttatataaaaaccaaatatttagtcaatttaccgtgtcttaatttaatctttgtacaccttccatttttaagtgcttaaatgagtactatattgcaataaaatgtagtgatataattaaccagccattaaaaatttacttctacagatacagtgtcaattgagtttatatattaggtacttgcatactttttatgattactatgaaaattagagcaattaaaattaatggtttctacaattaatctgagttctacaacctaaaattgccttcagtttactggcatccctggattagggttagacctgatattgtggctgacacagaaaggcaacaggaaattaacttcattattttcatattcataatatgg

SEQ ID NO: 358105 - DNA, 3200 bp, Homo sapiens
gcgctccggccaacgttctctcccggcctcccgggcccgccgcctactcccgcgtctccgagctcctcaaccgccgcggtctccctgggcgcgcggcccgccgcctgcttccggggcgggcggactgggcgcctggtgccggcggccgcagcgacagcgcccccgggaagcagaggaggaaggagagaagaggtggaggtggccgcaggctgagtcgcggccgggatgtccgggcagccgccgccgccgccgccgcagcagcagcaacagcagcagcagctgtcgccgccaccgccggcggccttggccccagtctccggagtcgtcctgccggcgcccccggccgtcagcgccggctcttctccggccggctcgcccggcggcggtgcgggcggcgaaggcttaggggccgcggcggccgccctgctcctccaccctccgccgccgccgcccccggccaccgcggccccgccgcccccgccgccgcccccgcctccccctgcctcagcggctgcccccgccagcgggccgcccgctcccccgggccttgcagcgggccccggcccggctggaggggccccgaccccagctctggtggcgggcagcagcgccgcggcccccttccctcacggggactcggccctgaacgagcaggagaaggagttgcagcggcggctgaagcgtctctacccggccgtggacgaacaagagacgccgctgcctcggtcctggagcccgaaggacaagttcagctacatcggcctctctcagaacaacctgcgggtgcactacaaaggtcatggcaaaaccccaaaagatgccgcgtcagttcgagccacgcatccaataccagcagcctgtgggatttattattttgaagtaagtgtgaacatgaatagactaccaggttgggataagcattcatatggttaccatggggatgatggacattcgttttgttcttctggaactggacaaccttatggaccaactttcactactggtgatgtcattggctgttgtgttaatcttatcaacaatacctgcttttacaccaagaatggacatagtttagccaaatttgtatcctactgtggggcttcaaacaccaggagaagtggtcgatgccaattttgggcaacatcctttcgtgtttgatatagaagactatatgcgggagtggagaaccaaaatccaggcacagatagatcgatttcctatcggagatcgagaaggagaatggcagaccatgatacaaaaaatggtttcatcttatttagtccaccatgggtactgtgccacagcagaggcctttgccagatctacagaccagaccgttctagaagaattagcttccattaagaatagacaaagaattcagaaattggtattagcaggaagaatgggagaagccattgaaacaacacaacagttatacccaagtttacttgaaagaaatcctaatctccttttcacattaaaagtgcgtcagtttatagaaatggtgaatggtacagatagtgaagtacgatgtttgggaggccgaagtccaaagtctcaagacagttatcctgttagtcctcgaccttttagtagtccaagtatgagccccagccatggaatgaatatccacaatttagcatcaggcaaaggaagcaccgcacatttttcaggttttgaaagttgtagtaatggtgtaatatcaaataaagcacatcaatcatattgccatagtaataaacaccagtcatccaacttgaatgtaccagaactaaacagtataaatatgtcaagatcacagcaagttaataacttcaccagtaatgatgtagacatggaaacagatcactactccaatggagttggagaaacttcatccaatggtttcctaaatggtagctctaaacatgaccacgaaatggaagattgtgacaccgaaatggaagttgattcaagtcagttgagacgccagttgtgtggaggaagtcaggccgccatagaaagaatgatccactttggacgagagctgcaagcaatgagtgaacagctaaggagagactgtggcaagaacactgcaaacaaaaaaatgttgaaggatgcattcagtctactagcatattcagatccctggaacagcccagttggaaatcagcttgacccgattcagagagaacctgtgtgctcagctcttaacagtgcaatattagaaacccacaatctgccaaagcaacctccacttgccctagcaatgggacaggccacacaatgtctaggactgatggctcgatcaggaattggatcctgcgcatttgccacagtggaagactacctacattagctatgcatttcaagagctcacacttatattgtggcatatagtcaacatggaagtagaccagctctgctgatttgaaatttagattttttaaattatgtactggggacaggtttttgtcgctttacattgcttcctagtttacagcatgatgcaaatgattttctaacttagtgttaggagaaattattttccatctttaacctcttagttgtctaagagttaaatattactgaatttcagacgttcaaattgatcatcacaaatcctttaaaacaattacctaaaagaaaccaaaaatcctgccttctttgtgggggaggggggagagaggggaaggaaatggaacaagttgtgtttgtgttagcatgtgggtgatgtaaacttcaaattgggagatgttccgacccccactcccatataagcattcaatcagtgtaacttgcaaaatgcataaacatccgacagtttgaatttatagtgttgatggaagaaatcatttttaatgtgtactgtaaaacttgaaatactcaggagctgagtgaatatgtttgttgctacttacaatcccgacctgttagtcccagtagttttgttttaacatggtctttttcaactttgtttcctgtttaactacagatgacttctgttgtagactcacaagtttaactgttgtattataacagtattacatgtcaacggtgtggttatgacctttatttatataaaaaccaaatatttagtcaatttaccgtgtcttaatttaatctttgtacaccttccatttttaagtgcttaaatgagtactatattgcaataaaatgtagtgatataattaaccagccattaaaaatttacttctaca

SEQ ID NO: 358106 - DNA, 2300 bp, Homo sapiens
attgattaaaaattagtcttgttattttttatttaggctttaatgtttttttcttttgccatttgtttcctccttttagttagaaattcagcttgtcagtatagtctgctttgaaaaacagcttctaatgccacttttttttttctttttaggtattgctttcactgacctaccgccaaatttgtatcctactgtggggcttcaaacaccaggagaagtggtcgatgccaattttgggcaacatcctttcgtgtttgatatagaagactatatgcgggagtggagaaccaaaatccaggcacagatagatcgatttcctatcggagatcgagaaggagaatggcagaccatgatacaaaaaatggtttcatcttatttagtccaccatgggtactgtgccacagcagaggcctttgccagatctacagaccagaccgttctagaagaattagcttccattaagaatagacaaagaattcagaaattggtattagcaggaagaatgggagaagccattgaaacaacacaacagttatacccaagtttacttgaaagaaatcctaatctccttttcacattaaaagtgcgtcagtttatagaaatggtgaatggtacagatagtgaagtacgatgtttgggaggccgaagtccaaagtctcaagacagttatcctgttagtcctcgaccttttagtagtccaagtatgagccccagccatggaatgaatatccacaatttagcatcaggcaaaggaagcaccgcacatttttcaggttttgaaagttgtagtaatggtgtaatatcaaataaagcacatcaatcatattgccatagtaataaacaccagtcatccaacttgaatgtaccagaactaaacagtataaatatgtcaagatcacagcaagttaataacttcaccagtaatgatgtagacatggaaacagatcactactccaatggagttggagaaacttcatccaatggtttcctaaatggtagctctaaacatgaccacgaaatggaagattgtgacaccgaaatggaagttgattcaagtcagttgagacgccagttgtgtggaggaagtcaggccgccatagaaagaatgatccactttggacgagagctgcaagcaatgagtgaacagctaaggagagactgtggcaagaacactgcaaacaaaaaaatgttgaaggatgcattcagtctactagcatattcagatccctggaacagcccagttggaaatcagcttgacccgattcagagagaacctgtgtgctcagctcttaacagtgcaatattagaaacccacaatctgccaaagcaacctccacttgccctagcaatgggacaggccacacaatgtctaggactgatggctcgatcaggaattggatcctgcgcatttgccacagtggaagactacctacattagctatgcatttcaagagctcacacttatattgtggcatatagtcaacatggaagtagaccagctctgctgatttgaaatttagattttttaaattatgtactggggacaggtttttgtcgctttacattgcttcctagtttacagcatgatgcaaatgattttctaacttagtgttaggagaaattattttccatctttaacctcttagttgtctaagagttaaatattactgaatttcagacgttcaaattgatcatcacaaatcctttaaaacaattacctaaaagaaaccaaaaatcctgccttctttgtgggggaggggggagagaggggaaggaaatggaacaagttgtgtttgtgttagcatgtgggtgatgtaaacttcaaattgggagatgttccgacccccactcccatataagcattcaatcagtgtaacttgcaaaatgcataaacatccgacagtttgaatttatagtgttgatggaagaaatcatttttaatgtgtactgtaaaacttgaaatactcaggagctgagtgaatatgtttgttgctacttacaatcccgacctgttagtcccagtagttttgttttaacatggtctttttcaactttgtttcctgtttaactacagatgacttctgttgtagactcacaagtttaactgttgtattataacagtattacatgtcaacggtgtggttatgacctttatttatataaaaaccaaatatttagtcaatttaccgtgtcttaatttaatctttgtacaccttccatttttaagtgcttaaatgagtactatattgcaataaaatgtagtgatataattaaccagccattaaaaatttacttctaca

SEQ ID NO: 358107 - DNA, 2375 bp, Homo sapiens
gcgctccggccaacgttctctcccggcctcccgggcccgccgcctactcccgcgtctccgagctcctcaaccgccgcggtctccctgggcgcgcggcccgccgcctgcttccggggcgggcggactgggcgcctggtgccggcggccgcagcgacagcgcccccgggaagcagaggaggaaggagagaagaggtggaggtggccgcaggctgagtcgcggccgggatgtccgggcagccgccgccgccgccgccgcagcagcagcaacagcagcagcagctgtcgccgccaccgccggcggccttggccccagtctccggagtcgtcctgccggcgcccccggccgtcagcgccggctcttctccggccggctcgcccggcggcggtgcgggcggcgaaggcttaggggccgcggcggccgccctgctcctccaccctccgccgccgccgcccccggccaccgcggccccgccgcccccgccgccgcccccgcctccccctgcctcagcggctgcccccgccagcgggccgcccgctcccccgggccttgcagcgggccccggcccggctggaggggccccgaccccagctctggtggcgggcagcagcgccgcggcccccttccctcacggggactcggccctgaacgagcaggagaaggagttgcagcggcggctgaagcgtctctacccggccgtggacgaacaagagacgccgctgcctcggtcctggagcccgaaggacaagttcagctacatcggcctctctcagaacaacctgcgggtgcactacaaaggtcatggcaaaaccccaaaagatgccgcgtcagttcgagccacgcatccaataccagcagcctgtgggatttattattttgaagtaaaaattgtcagtaagggaagagatggttacatgggaattggtctttctgctcaaggtgtgaacatgaatagactaccaggttgggataagcattcatatggttaccatggggatgatggacattcgttttgttcttctggaactggacaaccttatggaccaactttcactactggtgatgtcattggctgttgtgttaatcttatcaacaatacctgcttttacaccaagaatggacatagtttaggtattgctttcactgacctaccgccaaatttgtatcctactgtggggcttcaaacaccaggagaagtggtcgatgccaattttgggcaacatcctttcgtgtttgatatagaagactatatgcgggagtggagaaccaaaatccaggcacagatagatcgatttcctatcggagatcgagaaggagaatggcagaccatgatacaaaaaatggtttcatcttatttagtccaccatgggtactgtgccacagcagaggcctttgccagatctacagaccagaccgttctagaagaattagcttccattaagaatagacaaagaattcagaaattggtattagcaggaagaatgggagaagccattgaaacaacacaacagttatacccaagtttacttgaaagaaatcctaatctccttttcacattaaaagtgcgtcagtttatagaaatggtgaatggtacagatagtgaagtacgatgtttgggaggccgaagtccaaagtctcaagacagttatcctgttagtcctcgaccttttagtagtccaagtatgagccccagccatggaatgaatatccacaatttagcatcaggcaaaggaagcaccgcacatttttcaggttttgaaagttgtagtaatggtgtaatatcaaataaagcacatcaatcatattgccatagtaataaacaccagtcatccaacttgaatgtaccagaactaaacagtataaatatgtcaagatcacagcaagttaataacttcaccagtaatgatgtagacatggaaacagatcactactccaatggagttggagaaacttcatccaatggtttcctaaatggtagctctaaacatgaccacgaaatggaagattgtgacaccgaaatggaagttgattcaagtcagttgagacgccagttgtgtggaggaagtcaggccgccatagaaagaatgatccactttggacgagagctgcaagcaatgagtgaacagctaaggagagactgtggcaagaacactgcaaacaaaaaaatgttgaaggtgaatatattttttcttgaaaaattatgaatatgtcagaggaactaaaatgtagttttgtgaaacactgagcagtgtaccagaaattcttgttagggaactgggacctgaccttccccctggctccttgcccatctgagagtggaaatatttgatgaagttaggcagttctgatctactggaaagagcattggactaaagca

SEQ ID NO: 358108 - DNA, 3064 bp, Homo sapiens
gcgctccggccaacgttctctcccggcctcccgggcccgccgcctactcccgcgtctccgagctcctcaaccgccgcggtctccctgggcgcgcggcccgccgcctgcttccggggcgggcggactgggcgcctggtgccggcggccgcagcgacagcgcccccgggaagcagaggaggaaggagagaagaggtggaggtggccgcaggctgagtcgcggccgggatgtccgggcagccgccgccgccgccgccgcagcagcagcaacagcagcagcagctgtcgccgccaccgccggcggccttggccccagtctccggagtcgtcctgccggcgcccccggccgtcagcgccggctcttctccggccggctcgcccggcggcggtgcgggcggcgaaggcttaggggccgcggcggccgccctgctcctccaccctccgccgccgccgcccccggccaccgcggccccgccgcccccgccgccgcccccgcctccccctgcctcagcggctgcccccgccagcgggccgcccgctcccccgggccttgcagcgggccccggcccggctggaggggccccgaccccagctctggtggcgggcagcagcgccgcggcccccttccctcacggggactcggccctgaacgagcaggagaaggagttgcagcggcggctgaagcgtctctacccggccgtggacgaacaagagacgccgctgcctcggtcctggagcccgaaggacaagttcagctacatcggcctctctcagaacaacctgcgggtgcactacaaaggtcatggcaaaaccccaaaagatgccgcgtcagttcgagccacgcatccaataccagcagcctgtgggatttattattttgaagtaaaaattgtcagtaagggaagagatggttacatgggaattggtctttctgctcaaggtgtgaacatgaatagactaccaggttgggataagcattcatatggttaccatggggatgatggacattcgttttgttcttctggaactggacaaccttatggaccaactttcactactggtgatgtcattggctgttgtgttaatcttatcaacaatacctgcttttacaccaagaatggacatagtttaggtattgctttcactgacctaccgccaaatttgtatcctactgtggggcttcaaacaccaggagaagtggtcgatgccaattttgggcaacatcctttcgtgtttgatatagaagactatatgcgggagtggagaaccaaaatccaggcacagatagatcgatttcctatcggagatcgagaaggagaatggcagaccatgatacaaaaaatggtttcatcttatttagtccaccatgggtactgtgccacagcagaggcctttgccagatctacagaccagaccgttctagaagaattagcttccattaagaatagacaaagaattcagaaattggtattagcaggaagaatgggagaagccattgaaacaacacaacagttatacccaagtttacttgaaagaaatcctaatctccttttcacattaaaagtgcgtcagtttatagaaatggtgaatggtacagatagtgaagtacgatgtttgggaggccgaagtccaaagtctcaagacagttatcctgttagtcctcgaccttttagtagtccaagtatgagccccagccatggaatgaatatccacaatttagcatcaggcaaaggaagcaccgcacatttttcaggttttgaaagttgtagtaatggtgtaatatcaaataaagcacatcaatcatattgccatagtaataaacaccagtcatccaacttgaatgtaccagaactaaacagtataaatatgtcaagatcacagcaagttaataacttcaccagtaatgatgtagacatggaaacagatcactactccaatggagttggagaaacttcatccaatggtttcctaaatggtagctctaaacatgaccacgaaatggaagattgtgacaccgaaatgggtctgcagtgatatttcttacatttttaataaaaaatgatggctacaaggttatgtttttacttgtactgattcacagctgatgagcataaaccagatttaaagatgtatgtgctgtaggacttgacagtaatgcatagcacttaaactcttgtttgagtgggctgctagagaaagtagagttacctttcagctacaggcagtgtttcttgctgaactgcttaggctcaggtttagcgctgtcactaatgcagcagtactgacttactggtgttgagcctctaggctattttaggttggagatgatagaacttcttatatttatgtcagtatagtcagtaaggccaaatggttagatgattttacaaattctaatcagtatttcttaaatgagtttaacgtaaacgtgtgtgactttgcatagtactatccctggtatatagtaggtgcttaagtatgacctccctcaccaaaaaaaaaaccccaccaccaacaaaaaaattatgtggctccaagacacattagcatgcataattttattttgtagacaacttaagtagtaaattgcctgtcccatcagcaaactatcccatcaaatggagagtgaaaatttatttgttggattacattttttcatttatttgttggaattccatggcaatgttagatttcttattattttgagattgagtggtattactaaaattgttttttaaaaagaaatgcagctttgttttactcttcaatatcagccacctcagtttctgaagagtaatttaagtacagtgataaagagcaggagttctagagccagattacatagatttgatttctgcaaaactgccatttactagctgtgtgaccttggaaaaattacttaactgctctgtgtctcagtttcttcatctgtaaaatgggtataataacgacctcataagttattgtgaaagtaaatgaataatccaaaaagctaatagcacaaagtgcttgggaaatattaaccatcatcatcgtcattaccttatttttaatgacttataagtaa

SEQ ID NO: 358109 - DNA, 1214 bp, Homo sapiens
gcgctccggccaacgttctctcccggcctcccgggcccgccgcctactcccgcgtctccgagctcctcaaccgccgcggtctccctgggcgcgcggcccgccgcctgcttccggggcgggcggactgggcgcctggtgccggcggccgcagcgacagcgcccccgggaagcagaggaggaaggagagaagaggtggaggtggccgcaggctgagtcgcggccgggatgtccgggcagccgccgccgccgccgccgcagcagcagcaacagcagcagcagctgtcgccgccaccgccggcggccttggccccagtctccggagtcgtcctgccggcgcccccggccgtcagcgccggctcttctccggccggctcgcccggcggcggtgcgggcggcgaaggcttaggggccgcggcggccgccctgctcctccaccctccgccgccgccgcccccggccaccgcggccccgccgcccccgccgccgcccccgcctccccctgcctcagcggctgcccccgccagcgggccgcccgctcccccgggccttgcagcgggccccggcccggctggaggggccccgaccccagctctggtggcgggcagcagcgccgcggcccccttccctcacggggactcggccctgaacgagcaggagaaggagttgcagcggcggctgaagcgtctctacccggccgtggacgaacaagagacgccgctgcctcggtcctggagcccgaaggacaagttcagctacatcggcctctctcagaacaacctgcgggtgcactacaaaggtcatggcaaaaccccaaaagatgccgcgtcagttcgagccacgcatccaataccagcagcctgtgggatttattattttgaagtaaaaattgtcagtaagggaagagatggttacatgggaattggtctttctgctcaaggtgtgaacatgaatagactaccaggttgggataagcattcatatggttaccatggggatgatggacattcgttttgttcttctggaactggacaaccttatggaccaactttcactactggtgatgtcattggctgttgtgttaatcttatcaacaatacctgcttttacaccaagaatggacatagtttagttgcttcactgacctaccgcaattgtatcctactgtggctcaacaccaggagagtggcgatgccatttggcacaccaacgagttg

SEQ ID NO: 358110 - DNA, 417 bp, Homo sapiens
tagggagagtagtctcaacatagcatttgcagttatcttttcgaaaatagtacatgaatagaacaaaatgatgtttttcaaaagcttactttaaaggtgaggttcttaacgccttgtttcaaggaaataggttcgtttttataacaccagaatagattttgtttatataaattgtagtatgaagcatgtattctcttcactaaaagatgtatgtttcttctttttattttaagaatggtttcatcttatttagtccaccatgggtactgtgccacagcagaggcctttgccagatctacagaccagaccgttctagaagaattagcttccattaagaatagacaaagtaaggacactgtggtgcatggctaacatttgttttcagattatagatttggttactttaatttttagaaa

SEQ ID NO: 358111 - DNA, 488 bp, Homo sapiens
ttattagtctgtgcctggaagccatattttacctctcaacttggaaacatttgtgagcataatagttgaactatttgaattaaaaccaaatcgatgtgttttcaacaggatgcattcagtctactagcatattcagatccctggaacagcccagttggaaatcagcttgacccgattcagagagaacctgtgtgctcagctcttaacagtgcaatattaggtaagtaaagccaaataaggcacaatttcagttagattctctgaaaatttaagagagggtgtttgtactggcatttacactttggtaaaatcatcaggaaaatgttttctatatttttaaaatataaaaatacctaaaatatagaaaccccctcctttaattccagattcaagtggatttaaatagaataaaaacagtaagatggggtacaacttgggatgtttgggaaatagaagtttttgtgtgcatgtatgtaagcatttctggt

SEQ ID NO: 358112 - DNA, 3254 bp, Homo sapiens
gcgctccggccaacgttctctcccggcctcccgggcccgccgcctactcccgcgtctccgagctcctcaaccgccgcggtctccctgggcgcgcggcccgccgcctgcttccggggcgggcggactgggcgcctggtgccggcggccgcagcgacagcgcccccgggaagcagaggaggaaggagagaagaggtggaggtggccgcaggctgagtcgcggccgggatgtccgggcagccgccgccgccgccgccgcagcagcagcaacagcagcagcagctgtcgccgccaccgccggcggccttggccccagtctccggagtcgtcctgccggcgcccccggccgtcagcgccggctcttctccggccggctcgcccggcggcggtgcgggcggcgaaggcttaggggccgcggcggccgccctgctcctccaccctccgccgccgccgcccccggccaccgcggccccgccgcccccgccgccgcccccgcctccccctgcctcagcggctgcccccgccagcgggccgcccgctcccccgggccttgcagcgggccccggcccggctggaggggccccgaccccagctctggtggcgggcagcagcgccgcggcccccttccctcacggggactcggccctgaacgagcaggagaaggagttgcagcggcggctgaagcgtctctacccggccgtggacgaacaagagacgccgctgcctcggtcctggagcccgaaggacaagttcagctacatcggcctctctcagaacaacctgcgggtgcactacaaaggtcatggcaaaaccccaaaagatgccgcgtcagttcgagccacgcatccaataccagcagcctgtgggatttattattttgaagtaaaaattgtcagtaagggaagagatggttacatgggaattggtctttctgctcaaggtgtgaacatgaatagactaccaggttgggataagcattcatatggttaccatggggatgatggacattcgttttgttcttctggaactggacaaccttatggaccaactttcactactggtgatgtcattggctgttgtgttaatcttatcaacaatacctgcttttacaccaagaatggacatagtttagccaaatttgtatcctactgtggggcttcaaacaccaggagaagtggtcgatgccaattttgggcaacatcctttcgtgtttgatatagaagactatatgcgggagtggagaaccaaaatccaggcacagatagatcgatttcctatcggagatcgagaaggagaatggcagaccatgatacaaaaaatggtttcatcttatttagtccaccatgggtactgtgccacagcagaggcctttgccagatctacagaccagaccgttctagaagaattagcttccattaagaatagacaaagaattcagaaattggtattagcaggaagaatgggagaagccattgaaacaacacaacagttatacccaagtttacttgaaagaaatcctaatctccttttcacattaaaagtgcgtcagtttatagaaatggtgaatggtacagatagtgaagtacgatgtttgggaggccgaagtccaaagtctcaagacagttatcctgttagtcctcgaccttttagtagtccaagtatgagccccagccatggaatgaatatccacaatttagcatcaggcaaaggaagcaccgcacatttttcaggttttgaaagttgtagtaatggtgtaatatcaaataaagcacatcaatcatattgccatagtaataaacaccagtcatccaacttgaatgtaccagaactaaacagtataaatatgtcaagatcacagcaagttaataacttcaccagtaatgatgtagacatggaaacagatcactactccaatggagttggagaaacttcatccaatggtttcctaaatggtagctctaaacatgaccacgaaatggaagattgtgacaccgaaatggaagttgattcaagtcagttgagacgccagttgtgtggaggaagtcaggccgccatagaaagaatgatccactttggacgagagctgcaagcaatgagtgaacagctaaggagagactgtggcaagaacactgcaaacaaaaaaatgttgaaggatgcattcagtctactagcatattcagatccctggaacagcccagttggaaatcagcttgacccgattcagagagaacctgtgtgctcagctcttaacagtgcaatattagaaacccacaatctgccaaagcaacctccacttgccctagcaatgggacaggccacacaatgtctaggactgatggctcgatcaggaattggatcctgcgcatttgccacagtggaagactacctacattagctatgcatttcaagagctcacacttatattgtggcatatagtcaacatggaagtagaccagctctgctgatttgaaatttagattttttaaattatgtactggggacaggtttttgtcgctttacattgcttcctagtttacagcatgatgcaaatgattttctaacttagtgttaggagaaattattttccatctttaacctcttagttgtctaagagttaaatattactgaatttcagacgttcaaattgatcatcacaaatcctttaaaacaattacctaaaagaaaccaaaaatcctgccttctttgtgggggaggggggagagaggggaaggaaatggaacaagttgtgtttgtgttagcatgtgggtgatgtaaacttcaaattgggagatgttccgacccccactcccatataagcattcaatcagtgtaacttgcaaaatgcataaacatccgacagtttgaatttatagtgttgatggaagaaatcatttttaatgtgtactgtaaaacttgaaatactcaggagctgagtgaatatgtttgttgctacttacaatcccgacctgttagtcccagtagttttgttttaacatggtctttttcaactttgtttcctgtttaactacagatgacttctgttgtagactcacaagtttaactgttgtattataacagtattacatgtcaacggtgtggttatgacctttatttatataaaaaccaaatatttagtcaatttaccgtgtcttaatttaatctttgtacaccttccatttttaagtgcttaaatgagtactatattgcaataaaatgtagtgatataattaaccagccattaaaaatttacttctaca

SEQ ID NO: 358113 - DNA, 2786 bp, Homo sapiens
gcgctccggccaacgttctctcccggcctcccgggcccgccgcctactcccgcgtctccgagctcctcaaccgccgcggtctccctgggcgcgcggcccgccgcctgcttccggggcgggcggactgggcgcctggtgccggcggccgcagcgacagcgcccccgggaagcagaggaggaaggagagaagaggtggaggtggccgcaggctgagtcgcggccgggatgtccgggcagccgccgccgccgccgccgcagcagcagcaacagcagcagcagctgtcgccgccaccgccggcggccttggccccagtctccggagtcgtcctgccggcgcccccggccgtcagcgccggctcttctccggccggctcgcccggcggcggtgcgggcggcgaaggcttaggggccgcggcggccgccctgctcctccaccctccgccgccgccgcccccggccaccgcggccccgccgcccccgccgccgcccccgcctccccctgcctcagcggctgcccccgccagcgggccgcccgctcccccgggccttgcagcgggccccggcccggctggaggggccccgaccccagctctggtggcgggcagcagcgccgcggcccccttccctcacggggactcggccctgaacgagcaggagaaggagttgcagcggcggctgaagcgtctctacccggccgtggacgaacaagagacgccgctgcctcggtcctggagcccgaaggacaagttcagctacatcggcctctctcagaacaacctgcgggtgcactacaaaggtcatggcaaaaccccaaaagatgccgcgtcagttcgagccacgcatccaataccagcagcctgtgggatttattattttgaagtaaaaattgtcagtaagggaagagatggttacatgggaattggtctttctgctcaaggtgtgaacatgaatagactaccaggttgggataagcattcatatggttaccatggggatgatggacattcgttttgttcttctggaactggacaaccttatggaccaactttcactactggtgatgtcattggctgttgtgttaatcttatcaacaatacctgcttttacaccaagaatggacatagtttaggtattgctttcactgacctaccgttatcctgttagtcctcgaccttttagtagtccaagtatgagccccagccatggaatgaatatccacaatttagcatcaggcaaaggaagcaccgcacatttttcaggttttgaaagttgtagtaatggtgtaatatcaaataaagcacatcaatcatattgccatagtaataaacaccagtcatccaacttgaatgtaccagaactaaacagtataaatatgtcaagatcacagcaagttaataacttcaccagtaatgatgtagacatggaaacagatcactactccaatggagttggagaaacttcatccaatggtttcctaaatggtagctctaaacatgaccacgaaatggaagattgtgacaccgaaatggaagttgattcaagtcagttgagacgccagttgtgtggaggaagtcaggccgccatagaaagaatgatccactttggacgagagctgcaagcaatgagtgaacagctaaggagagactgtggcaagaacactgcaaacaaaaaaatgttgaaggatgcattcagtctactagcatattcagatccctggaacagcccagttggaaatcagcttgacccgattcagagagaacctgtgtgctcagctcttaacagtgcaatattagaaacccacaatctgccaaagcaacctccacttgccctagcaatgggacaggccacacaatgtctaggactgatggctcgatcaggaattggatcctgcgcatttgccacagtggaagactacctacattagctatgcatttcaagagctcacacttatattgtggcatatagtcaacatggaagtagaccagctctgctgatttgaaatttagattttttaaattatgtactggggacaggtttttgtcgctttacattgcttcctagtttacagcatgatgcaaatgattttctaacttagtgttaggagaaattattttccatctttaacctcttagttgtctaagagttaaatattactgaatttcagacgttcaaattgatcatcacaaatcctttaaaacaattacctaaaagaaaccaaaaatcctgccttctttgtgggggaggggggagagaggggaaggaaatggaacaagttgtgtttgtgttagcatgtgggtgatgtaaacttcaaattgggagatgttccgacccccactcccatataagcattcaatcagtgtaacttgcaaaatgcataaacatccgacagtttgaatttatagtgttgatggaagaaatcatttttaatgtgtactgtaaaacttgaaatactcaggagctgagtgaatatgtttgttgctacttacaatcccgacctgttagtcccagtagttttgttttaacatggtctttttcaactttgtttcctgtttaactacagatgacttctgttgtagactcacaagtttaactgttgtattataacagtattacatgtcaacggtgtggttatgacctttatttatataaaaaccaaatatttagtcaatttaccgtgtcttaatttaatctttgtacaccttccatttttaagtgcttaaatgagtactatattgcaataaaatgtagtgatataattaaccagccattaaaaatttacttctaca

SEQ ID NO: 358114 - DNA, 1942 bp, Homo sapiens
agttatcagttacccttgaaagaatgtatatttttaagtagtgaggacaaatgccagaatgctatttaaaaacagcctaggagtggattgagtatgaggtccggaacgaggtgaagcgggttccaggagtgagatgtatttgttttgagagtgaggttttccccttacatactagaaatcagtgctgggggtagggggagagggctggctggggagttggtggggcagcagttgattaacgaagacgtacagatctgaatttgaaaaataataggattgtgtggaagtatgatttctccatattgatgtaaagtcataaaaccactacattttagcatatgtactttttttcctcccttacctccgggggtacaaatttgttaaaagtcagcgacatgtttggctttgaatacgttcaagatttaactaaataccttttttgcagatttctgttgccttatgaaattagtttattcgtaggctatgtagttcagtagtgatttattttaaactaagctgcaagtatgatatttctaaaattaggtttgttttttcgttttcagtaatgatgtagacatggaaacagatcactactccaatggagttggagaaacttcatccaatggtttcctaaatggtagctctaaacatgaccacgaaatggaagattgtgacaccgaaatggaagttgattcaagtcagttgagacgccagttgtgtggaggaagtcaggccgccatagaaagaatgatccactttggacgagagctgcaagcaatgagtgaacagctaaggagagactgtggcaagaacactgcaaacaaaaaaatgttgaaggatgcattcagtctactagcatattcagatccctggaacagcccagttggaaatcagcttgacccgattcagagagaacctgtgtgctcagctcttaacagtgcaatattagaaacccacaatctgccaaagcaacctccacttgccctagcaatgggacaggccacacaatgtctaggactgatggctcgatcaggaattggatcctgcgcatttgccacagtggaagactacctacattagctatgcatttcaagagctcacacttatattgtggcatatagtcaacatggaagtagaccagctctgctgatttgaaatttagattttttaaattatgtactggggacaggtttttgtcgctttacattgcttcctagtttacagcatgatgcaaatgattttctaacttagtgttaggagaaattattttccatctttaacctcttagttgtctaagagttaaatattactgaatttcagacgttcaaattgatcatcacaaatcctttaaaacaattacctaaaagaaaccaaaaatcctgccttctttgtgggggaggggggagagaggggaaggaaatggaacaagttgtgtttgtgttagcatgtgggtgatgtaaacttcaaattgggagatgttccgacccccactcccatataagcattcaatcagtgtaacttgcaaaatgcataaacatccgacagtttgaatttatagtgttgatggaagaaatcatttttaatgtgtactgtaaaacttgaaatactcaggagctgagtgaatatgtttgttgctacttacaatcccgacctgttagtcccagtagttttgttttaacatggtctttttcaactttgtttcctgtttaactacagatgacttctgttgtagactcacaagtttaactgttgtattataacagtattacatgtcaacggtgtggttatgacctttatttatataaaaaccaaatatttagtcaatttaccgtgtcttaatttaatctttgtacaccttccatttttaagtgcttaaatgagtactatattgcaataaaatgtagtgatataattaaccagccattaaaaatttacttctaca

SEQ ID NO: 358115 - DNA, 2259 bp, Homo sapiens
gcgctccggccaacgttctctcccggcctcccgggcccgccgcctactcccgcgtctccgagctcctcaaccgccgcggtctccctgggcgcgcggcccgccgcctgcttccggggcgggcggactgggcgcctggtgccggcggccgcagcgacagcgcccccgggaagcagaggaggaaggagagaagaggtggaggtggccgcaggctgagtcgcggccgggatgtccgggcagccgccgccgccgccgccgcagcagcagcaacagcagcagcagctgtcgccgccaccgccggcggccttggccccagtctccggagtcgtcctgccggcgcccccggccgtcagcgccggctcttctccggccggctcgcccggcggcggtgcgggcggcgaaggcttaggggccgcggcggccgccctgctcctccaccctccgccgccgccgcccccggccaccgcggccccgccgcccccgccgccgcccccgcctccccctgcctcagcggctgcccccgccagcgggccgcccgctcccccgggccttgcagcgggccccggcccggctggaggggccccgaccccagctctggtggcgggcagcagcgccgcggcccccttccctcacggggactcggccctgaacgagcaggagaaggagttgcagcggcggctgaagcgtctctacccggccgtggacgaacaagagacgccgctgcctcggtcctggagcccgaaggacaagttcagctacatcggcctctctcagaacaacctgcgggtgcactacaaaggtcatggcaaaaccccaaaagatgccgcgtcagttcgagccacgcatccaataccagcagcctgtgggatttattattttgaagtaaaaattgtcagtaagggaagagatggttacatgggaattggtctttctgctcaaggtgtgaacatgaatagactaccaggttgggataagcattcatatggttaccatggggatgatggacattcgttttgttcttctggaactggacaaccttatggaccaactttcactactggtgatgtcattggctgttgtgttaatcttatcaacaatacctgcttttacaccaagaatggacatagtttaggtattgctttcactgacctaccgccaaatttgtatcctactgtggggcttcaaacaccaggagaagtggtcgatgccaattttgggcaacatcctttcgtgtttgatatagaagactatatgcgggagtggagaaccaaaatccaggcacagatagatcgatttcctatcggagatcgagaaggagaatggcagaccatgatacaaaaaatggtttcatcttatttagtccaccatgggtactgtgccacagcagaggcctttgccagatctacagaccagaccgttctagaagaattagcttccattaagaatagacaaagaattcagaaattggtattagcaggaagaatgggagaagccattgaaacaacacaacagttatacccaagtttacttgaaagaaatcctaatctccttttcacattaaaagtgcgtcagtttatagaaatggtgaatggtacagatagtgaagtacgatgtttgggaggccgaagtccaaagtctcaagacagttatcctgttagtcctcgaccttttagtagtccaagtatgagccccagccatggaatgaatatccacaatttagcatcaggcaaaggaagcaccgcacatttttcaggttttgaaagttgtagtaatggtgtaatatcaaataaagcacatcaatcatattgccatagtaataaacaccagtcatccaacttgaatgtaccagaactaaacagtataaatatgtcaagatcacagcaagttaataacttcaccaggtaagtaatttcactgacttttgcactaatataagcaacctagttataggtgtaatcgttgtaataattttgaaagaacttgaattatgtgacccacagaggggctctgggagttcttaagcccccagagaataaaagcgtagggagtcagttccccaaagctttttagtctcctattatgcacatgagctctttccttagtttcttcctcttctctactaccttcttccctctagtaaagttataaggacaaattcagggcttcatgcattgtcttcctgccagccacagagctatacaaatgatcacataaatgccatttgttatgttttcacagtggttaagacacagtagcatattt

SEQ ID NO: 358116 - DNA, 358 bp, Homo sapiens
tttaatgaaatatgctatcttaccaaatttgtatcctactgtggggcttcaaacaccaggagaagtggtcgatgccaattttgggcaacatcctttcgtgtttgatatagaagactatatgcgggagtggagaaccaaaatccaggcacagatagatcgatttcctatcggagatcgagaaggagaatggcagaccatgatacaaaagtaagagtgaagaaatttcaattgatgctattcagaatctgttttttataagacatttattctgttggtatccacagaagctttttaatccactaatttatatactgacatatctattatattattgattttaatctctcaacgaaaagta

SEQ ID NO: 358117 - DNA, 805 bp, Homo sapiens
aggagaaagtaaacaacaccccaagtgtccgggaacaaaggcaagttgtctttctacggtgccgcagccgtgtgcctcttctgaagaataagagctattattattctttatgtcttatccttttttttttttaaaaaaaaaccaagtttccttctaagggaaataaacaccaaaggtaggattccaaggaaatgactcacagcggctggcagggctctggcggggctggcccgggcccccgcgctccagcccgcagcagatgtcggcccggccttccctccctcccttgccggccaaacccgctggaagcccgcggttgcgggagcgccctgcgcccgtgggacctggcggcgaggacgcctattccctgcttctgcgaccacagctgggcactcggaaagttgctagggccgaagaggcgggaggggaggaagggaagcgagaggcggaggcgtggaccaggcgggcagcagcctcagcccgccgaggagtgatcctccgactgtgaaaaaccagacctctggctgcctggctccctaggaatcaagaagacgcacagactgaaaatcaagggaggaaggaacaagatcaaggatgaggattagcatctgcaaattgaactctatctaatttgcatgtttatttcttagaattgtaattaaatttgtgtaataaatgttttccatttcatttgtacacttaaaacttgggtgactgacatgcagttaagtgaatttcctttttttaaaagcaaatgtagattattcaataaagcagcaaaccaatattaaacataattagaact

SEQ ID NO: 358118 - DNA, 607 bp, Homo sapiens
gcggccgcagcgcttgagctgctgctggtccgctctgggctcggcgccagcccggccgccggtgcacactcgcgggtcccggcccggccgcccgctcggcggtgactgcgggtgcgcggcgggcaagggtcccggcaggtcccgccgccgcgactggggcgctgcgccgccgtcgctgcagacggttatggtaatgagcggctctgtctagcgaggagcgtgtgaaacccgtcaatcctgtttgccatttccccgtggatttccgaggagaggttctgcaggatgcccccaggtgatcctccgactgtgaaaaaccagacctctggctgcctggctccctaggaatcaagaagacgcacagactgaaaatcaagggaggaaggaacaagatcaaggatgaggattagcatctgcaaattgaactctatctaatttgcatgtttatttcttagaattgtaattaaatttgtgtaataaatgttttccatttcatttgtacacttaaaacttgggtgactgacatgcagttaagtgaatttcctttttttaaaagcaaatgtagattattcaataaagcagcaaaccaatattaaacataattagaact

SEQ ID NO: 358119 - DNA, 533 bp, Homo sapiens
tcagagtttattttttaaaatcattaattcataacttctgtctagggacccctccatagtcgagatgggtcatttcaggtgtaatgaaggcagaggcttggaaggcatagacctaataaaatcgggagaaggcacctgcacaaaagtgttacaaagactataatgtttgtttactgccactataccagatgtgctaaatataacacttctttaaaacagtgatcctccgactgtgaaaaaccagacctctggctgcctggctccctaggaatcaagaagacgcacagactgaaaatcaagggaggaaggaacaagatcaaggatgaggattagcatctgcaaattgaactctatctaatttgcatgtttatttcttagaattgtaattaaatttgtgtaataaatgttttccatttcatttgtacacttaaaacttgggtgactgacatgcagttaagtgaatttcctttttttaaaagcaaatgtagattattcaataaagcagcaaaccaatattaaacataattagaact

SEQ ID NO: 358120 - DNA, 489 bp, Homo sapiens
aggagaaagtaaacaacaccccaagtgtccgggaacaaaggcaagttgtctttctacggtgccgcagccgtgtgcctcttctgaagaataagagctattattattctttatgtcttatccttttttttttttaaaaaaaaaccaagtttccttctaagggaaataaacaccaaagtgatcctccgactgtgaaaaaccagacctctggctgcctggctccctaggaatcaagaagacgcacagactgaaaatcaagggaggaaggaacaagatcaaggatgaggattagcatctgcaaattgaactctatctaatttgcatgtttatttcttagaattgtaattaaatttgtgtaataaatgttttccatttcatttgtacacttaaaacttgggtgactgacatgcagttaagtgaatttcctttttttaaaagcaaatgtagattattcaataaagcagcaaaccaatattaaacataattagaact

SEQ ID NO: 358121 - DNA, 732 bp, Homo sapiens
gtcagagcagcagcatgggctgctggttgcccatttttgtgcctttttcttgattatttgctaaaaaggggtagattatttcatgcttcccctttttagaccataagggtaacttcctgacattgccacagcatttgtaaactgtcatactgctgatgggagcaagactggtcttctcccaccagagcctcccactgaccaaatctaactggaaaccaacaggcatgggagctgagaaatgtaatttaccggagtagctcctgtgagacagagtagggagaggaagagtgaagaatggatctgagagcaaataagcagatgaggagcacgaatcctcccaccagcattgtattcctggtacaacagaggctctccaagatcgtgcatcatcttgtaaccaaagaagatctacccacaagttcagaacagtttagcatagagtcaagtattaggaggccttgcttcttacctctatggtttcacgtcattgtatcgcctccctttggatctctcccttattttgggtggaggagcttctttggctggagcctatgctgatgggaccaacgttagagctttgatgcagagaaaaatttaaattctgcaggtacatactgttcttcctccccttctttgccatcttgtagacctgggccttttattgcagaggggaccaggcgagagagaagctaggggttcagtgcatcccgtctttctcctgggaaaacagga

SEQ ID NO: 358122 - DNA, 446 bp, Homo sapiens
aaaaaaaaaaaaaaaaaaaaaatgaaagttgcaagccaataaatggctttactaatctgcctcctcattttttagtggggtcaaaggtgttaatgaagaagccccggtgcatagccctcttgtctgccactatcccttttccttccttgtcctatatacttgtctctaataacgttaacataatctgatcctattaatatttacttcatgttttcctgcaggaagttggaaatctgtatgacatgttccacactcgcaactctttacaccgtagagcttatcaacacaaagttggcaacattattgatacaatgtaagaaacttgattgtcatttccctataaaattttccttgatacttggctagagtatcatactaggctcaactagacatttctagatgagttcaagtgaatattaagtgattaaattgaaaatggtttcctt

SEQ ID NO: 358123 - DNA, 939 bp, Homo sapiens
aagagccgctaggctgccctgcccgaagggctcaactgtcagtgagcctgcgcaggaggccaataggctgccaatactccttggactccccgccagggccctgctgtcagtgcgcctgcgcgcgggtccggcgccgaggttcttgactgctgtgccggacgccaggtgtagccatgcagcgagccgattccgagcagccctccaagcgtccccgttgcgatgacagcccgagaaccccctcaaacaccccttccgcagaggcagactggtccccgggcctggaactccatcccgactacaagacatggggtccggagcaggtgtgctccttcctcaggcgcggtggctttgaagagccggtgctgctgaagaacatccgagaaaatgaaatcacaggcgcattactgccttgtcttgatgagtctcgttttgaaaatcttggagtaagttccttgggggagaggaagaagctgcttagttatatccagcgattggttcaaatccacgttgatacaatgaagggtggggtatctagcaggatgtctagttcacgcactgggtgaaaaacaaccagagctgcagataagtgaacgagatgttctctgtgttcagattgctggactttgtcatgatctcggtcatgggccattttctcacatgtttgatggacgatttattccacttgctcgcccggaggtgaaatggacggtatgtattcatacagtcaatagtcaataaaaagaaagactatttaagcaggttatttagttaatttatctgtttggttccactactgtgttataaaatacttccccattacagtgtccagggtgctttcattcacatatatatatatatgcttttgtttggttctcacagtagtctgtaaggaagttatcgttatctccctttttacaaataaaggaacttgaaactctt

SEQ ID NO: 358124 - DNA, 3832 bp, Homo sapiens
aagagccgctaggctgccctgcccgaagggctcaactgtcagtgagcctgcgcaggaggccaataggctgccaatactccttggactccccgccagggccctgctgtcagtgcgcctgcgcgcgggtccggcgccgaggttcttgactgctgtgccggacgccaggtgtagccatgcagcgagccgattccgagcagccctccaagcgtccccgttgcgatgacagcccgagaaccccctcaaacaccccttccgcagaggcagactggtccccgggcctggaactccatcccgactacaagacatggggtccggagcaggtgtgctccttcctcaggcgcggtggctttgaagagccggtgctgctgaagaacatccgagaaaatgaaatcacaggcgcattactgccttgtcttgatgagtctcgttttgaaaatcttggagtaagttccttgggggagaggaagaagctgcttagttatatccagcgattggttcaaatccacgttgatacaatgaaggtaattaatgatcctatccatggccacattgagctccaccctctcctcgtccgaatcattgatacacctcaatttcaacgtcttcgatacatcaaacagctgggaggtggttactatgtttttccaggagcttcacacaatcgatttgagcatagtctaggggtggggtatctagcaggatgtctagttcacgcactgggtgaaaaacaaccagagctgcagataagtgaacgagatgttctctgtgttcagattgctggactttgtcatgatctcggtcatgggccattttctcacatgtttgatggacgatttattccacttgctcgcccggaggtgaaatggacgcatgaacaaggctcagttatgatgtttgagcaccttattaattctaatggaattaagcctgtcatggaacaatatggtctcatccctgaagaagatatttgctttataaaggaacaaattgtaggaccacttgaatcacctgtcgaagattcattgtggccatataaagggcgtcctgaaaacaaaagcttcctttatgagatagtatctaataaaagaaatggcattgatgtggacaaatgggattattttgccagggactgccatcatcttggaatccaaaataattttgattacaagcgctttattaagtttgcccgtgtctgtgaagtagacaatgagttgcgtatttgtgctagagataaggaagttggaaatctgtatgacatgttccacactcgcaactctttacaccgtagagcttatcaacacaaagttggcaacattattgatacaatgattacagatgctttcctcaaagcagatgactacatagagattacaggtgctggaggaaaaaagtatcgcatttctacagcaattgacgacatggaagcctatactaagctgacagataacatttttctggagattttatactctactgatcccaaattgaaagacgcacgagagattttaaaacaaattgaataccgtaatctattcaagtatgtgggtgagacgcagccaacaggacaaataaagattaaaagggaggactatgaatctcttccaaaagaggttgccagtgctaaacccaaagtattgctagacgtgaaactgaaggctgaagattttatagtggatgttatcaacatggattatggaatgcaagaaaagaatccaattgatcatgttagcttctattgtaagactgcccccaacagagcaatcaggattactaaaaaccaggtttcacaacttctgccagagaaatttgcagagcagctgattcgagtatattgtaagaaggtggacagaaagagtttgtatgccgcaagacaatattttgttcagtggtgtgcagacagaaatttcaccaagccgcaggatggcgatgttatagccccactcataacacctcaaaaaaaggaatggaacgacagtacttcagtccaaaatccaactcgcctccgagaagcatccaaaagcagagtccagctttttaaagatgacccaatgtgaatgtctgtagtcagttgtttacaaactccctctcctgcacaattcatttagaggcttcaatcatagaattctgcaaattaatgacaactcatgctttaattttgtattttgaatgtacacgcatgctgaagctaagtaacttttaatcaaagaaataagatggtattaggcaaatcttactatactatgaaaagcattaccttgcctatttttaatattattaaagcctttctccttcagtagtctattttcttagaataacaactcttttatctattctgaactctattttttttcttttttaagagacaaggttttgctctgttgcccagcttggactcgaactttcctgggctcaagcgaccctcctgcctcagccccccaagtagctgggactaaagtcatgtgccaccacacccagcttactctgaacttttatgacagatgattgttttttgtttttaatgtagaaatgagacaagggtacaaattggaactagaaattgacattgtcattgacaaacatggctaaaaacaaaacatcaaatcctgcccccgtgaagagttccctgtcacctcaagtttgaggatagtcctctaagagtgacctaagcataagtgaaagacacctcccctcacccttctagccccctacaaggtgccaggttggggtaaagagttggagatgatggccaggagtggctccaacacgctggtgagaggcctgattaggttttggggaagatctgagagctctggcctcttcgtgagtggaacataaagccgcctcttgttgggagatcctaccccagtgacagaggaatcccccaaactaggctgtgccctggctccgtggcggctccagacccgggtagtgcctttgtcccctgaatactcactcccccggtccagagggccttcccactgcccagcctggagaaggcctcccctgacctgctctctcagtatcctggagagctggccagaggccatcacaggcatcatcctcagagctcctcagacctgggactttgtttttgctggttcagtgcattttgtgtatttaagagcaaacactagccaggcgtggcggcgtgtgcctgtagtcccagctacttgggaggctgaggcaggaggattgctcgaacctgggaggcggaggttgcagtgagcctagatcacgccattgcactccagcctgggtgacagagtgagactccatctccaaaaaaaaaagcacaaacactgcactgcctgtgctgaaattagtgaccacccagtgggctccaggctccgctaggtaacttcgttttcccagcagtggagtgggcaccaccttggtggggcagtgcccctgtgcccagggcacacctcattcccagttctatagcaattcaccaagaacaaagtctgcagttagagccaaagctggtggtggccagagggtgctgaagatacaggccagtggggatgggagccatgagccccgaatgtcttctgctctgatgctccccggactaagcctccctggcacactgggagtgaggggcagcctgagcaagtaggggaactcagaccacaggccagcagatttcccagcagtccatcactggccaccgtgtagccagattctgttccgtccacactggggtgaagagtacttggaatgtctgccatcctgtatgatcaccccaccccctgtccatccatcagtagataataagggttggttacaattcataagagaatagttaaaacacttctcctctcatgcctac

SEQ ID NO: 358125 - DNA, 1803 bp, Homo sapiens
  misc_feature (33)..(33): n is a, c, g, or t
gagggtatgaaatgatccatagtgtcaattagnctgtttgcatgcacccagcctctctctgcttcacgagtggatagatcatcgccggactccctatatcgactcgtacattcaataccgactgagacggtggttaaccagtctttaactgaagtcggtacacacaactcgatttgagcatagtctaggggtggggtatctagcaggatgtctagttcacgcactgggtgaaaaacaaccagagctgcagataagtgaacgagatgttctctgtgttcagattgctggactttgtcatgatctcggtcatgggccattttctcacatgtttgatggacgatttattccacttgctcgcccggaggtgaaatggacgcatgaacaaggctcagttatgatgtttgagcaccttattaattctaatggaattaagcctgtcatggaacaatatggtctcatccctgaagaagatatttgctttataaaggaacaaattgtaggaccacttgaatcacctgtcgaagattcattgtggccatataaagggcgtcctgaaaacaaaagcttcctttatgagatagtatctaataaaagaaatggcattgatgtggacaaatgggattattttgccagggactgccatcatcttggaatccaaaataattttgattacaagcgctttattaagtttgcccgtgtctgtgaagtagacaatgagttgcgtatttgtgctagagataaggaagttggaaatctgtatgacatgttccacactcgcaactctttacaccgtagagcttatcaacacaaagttggcaacattattgatacaatgattacagatgctttcctcaaagcagatgactacatagagattacaggtgctggaggaaaaaagtatcgcatttctacagcaattgacgacatggaagcctatactaagctgacagataacatttttctggagattttatactctactgatcccaaattgaaagacgcacgagagattttaaaacaaattgaataccgtaatctattcaagtatgtgggtgagacgcagccaacaggacaaataaagattaaaagggaggactatgaatctcttccaaaagaggttgccagtgctaaacccaaagtattgctagacgtgaaactgaaggctgaagattttatagtggatgttatcaacatggattatggaatgcaagaaaagaatccaattgatcatgttagcttctattgtaagactgcccccaacagagcaatcaggattactaaaaaccaggtttcacaacttctgccagagaaatttgcagagcagctgattcgagtatattgtaagaaggtggacagaaagagtttgtatgccgcaagacaatattttgttcagtggtgtgcagacagaaatttcaccaagccgcaggatggcgatgttatagccccactcataacacctcaaaaaaaggaatggaacgacagtacttcagtccaaaatccaactcgcctccgagaagcatccaaaagcagagtccagctttttaaagatgacccaatgtgaatgtctgtagtcagttgtttacaaactccctctcctgcacaattcatttagaggcttcaatcatagaattctgcaaattaatgacaactcatgctttaattttgtattttgaatgtacacgcatgctgaagctaagtaacttttaatcaaagaaataagatggtattaggcaaatcttactatactatgaaaagcattaccttgcctatttttaatattattaaagcctttctccttcagta

SEQ ID NO: 358126 - DNA, 1899 bp, Homo sapiens
taatcagctcggtaccgtcttgatgagtctcgttttgaaaatcttggagtattccttgggggagaggaagaagctgcttagttatatccagcgattggttcaaatccacgttgatacaatgaaggtaattaatgatcctatccatggccacattgagctccaccctctcctcgtccgaatcattgatacacctcaatttcaacgtcttcgatacatcaaacagctgggaggtggttactatgtttttccaggagcttcacacaatcgatttgagcatagtctaggggtggggtatctagcaggatgtctagttcacgcactgggtgaaaaacaaccagagctgcagataagtgaacgagatgttctctgtgttcagattgctggactttgtcatgatctcggtcatgggccattttctcacatgtttgatggacgatttattccacttgctcgcccggaggtgaaatggacgcatgaacaaggctcagttatgatgtttgagcaccttattaattctaatggaattaagcctgtcatggaacaatatggtctcatccctgaagaagatatttgctttataaaggaacaaattgtaggaccacttgaatcacctgtcgaagattcattgtggccatataaagggcgtcctgaaaacaaaagcttcctttatgagatagtatctaataaaagaaatggcattgatgtggacaaatgggattattttgccagggactgccatcatcttggaatccaaaataattttgattacaagcgctttattaagtttgcccgtgtctgtgaagtagacaatgagttgcgtatttgtgctagagataaggaagttggaaatctgtatgacatgttccacactcgcaactctttacaccgtagagcttatcaacacaaagttggcaacattattgatacaatgattacagatgctttcctcaaagcagatgactacatagagattacaggtgctggaggaaaaaagtatcgcatttctacagcaattgacgacatggaagcctatactaagctgacagataacatttttctggagattttatactctactgatcccaaattgaaagacgcacgagagattttaaaacaaattgaataccgtaatctattcaagtatgtgggtgagacgcagccaacaggacaaataaagattaaaagggaggactatgaatctcttccaaaagaggttgccagtgctaaacccaaagtattgctagacgtgaaactgaaggctgaagattttatagtggatgttatcaacatggattatggaatgcaagaaaagaatccaattgatcatgttagcttctattgtaagactgcccccaacagagcaatcaggattactaaaaaccaggtttcacaacttctgccagagaaatttgcagagcagctgattcgagtatattgtaagaaggtggacagaaagagtttgtatgccgcaagacaatattttgttcagtggtgtgcagacagaaatttcaccaagccgcaggatggcgatgttatagccccactcataacacctcaaaaaaaggaatggaacgacagtacttcagtccaaaatccaactcgcctccgagaagcatccaaaagcagagtccagctttttaaagatgacccaatgtgaatgtctgtagtcagttgtttacaaactccctctcctgcacaattcatttagaggcttcaatcatagaattctgcaaattaatgacaactcatgctttaattttgtattttgaatgtacacgcatgctgaagctaagtaacttttaatcaaagaaataagatggtattaggcaaatcttactatactatgaaaagcattaccttgcctatttttaatattattaaagcctttctccttcagta

SEQ ID NO: 358127 - DNA, 1282 bp, Homo sapiens
aaaaaaaaaaaaaaaaaaaaaatgaaagttgcaagccaataaatggctttactaatctgcctcctcattttttagtggggtcaaaggtgttaatgaagaagccccggtgcatagccctcttgtctgccactatcccttttccttccttgtcctatatacttgtctctaataacgttaacataatctgatcctattaatatttacttcatgttttcctgcaggaagttggaaatctgtatgacatgttccacactcgcaactctttacaccgtagagcttatcaacacaaagttggcaacattattgatacaatgattacagatgctttcctcaaagcagatgactacatagagattacaggtgctggaggaaaaaagtatcgcatttctacagcaattgacgacatggaagcctatactaagctgacagataacatttttctggagattttatactctactgatcccaaattgaaagacgcacgagagattttaaaacaaattgaataccgtaatctattcaagtatgtgggtgagacgcagccaacaggacaaataaagattaaaagggaggactatgaatctcttccaaaagaggttgccagtgctaaacccaaagtattgctagacgtgaaactgaaggctgaagattttatagtggatgttatcaacatggattatggaatgcaagaaaagaatccaattgatcatgttagcttctattgtaagactgcccccaacagagcaatcaggattactaaaaaccaggtttcacaacttctgccagagaaatttgcagagcagctgattcgagtatattgtaagaaggtggacagaaagagtttgtatgccgcaagacaatattttgttcagtggtgtgcagacagaaatttcaccaagccgcaggatggcgatgttatagccccactcataacacctcaaaaaaaggaatggaacgacagtacttcagtccaaaatccaactcgcctccgagaagcatccaaaagcagagtccagctttttaaagatgacccaatgtgaatgtctgtagtcagttgtttacaaactccctctcctgcacaattcatttagaggcttcaatcatagaattctgcaaattaatgacaactcatgctttaattttgtattttgaatgtacacgcatgctgaagctaagtaacttttaatcaaagaaataagatggtattaggcaaatcttactatactatgaaaagcattaccttgcctatttttaatattattaaagcctttctccttcagta

SEQ ID NO: 358128 - DNA, 1180 bp, Homo sapiens
tagacagtctcgctctgtcacccaggttggaatgcagtggcacacaatcttggctcactgcaacctccacctcccggattcaagcaattctccagcctaagcctcccgagtagttgggattacaggcacccgccaccacgcccagctaatttttgtatttttagtagagacggggtttcaccatgtcggtcaggctggtctcgaactcccgacctcatgatccgcccacctgggcctcccaaagtgctgggattatagacgtgagccactgcgcctggccactttttacaattttttacaaaaatgctctctttgtttaacgagtgacattggtaggagctatatttgttaaggatatctctaatcgtttttcttagttaggtgccattttcataaagagaacctgtttgtggctcaaagacttgatgaaaaatggattctaacatggggagtcttgtgttttccaggaggactatgaatctcttccaaaagaggttgccagtgctaaacccaaagtattgctagacgtgaaactgaaggctgaagattttatagtggatgttatcaacatggattatggaatgcaagaaaagaatccaattgatcatgttagcttctattgtaagactgcccccaacagagcaatcaggattactaaaaaccaggtttcacaacttctgccagagaaatttgcagagcagctgattcgagtatattgtaagaaggtggacagaaagagtttgtatgccgcaagacaatattttgttcagtggtgtgcagacagaaatttcaccaagccgcaggatggcgatgttatagccccactcataacacctcaaaaaaaggaatggaacgacagtacttcagtccaaaatccaactcgcctccgagaagcatccaaaagcagagtccagctttttaaagatgacccaatgtgaatgtctgtagtcagttgtttacaaactccctctcctgcacaattcatttagaggcttcaatcatagaattctgcaaattaatgacaactcatgctttaattttgtattttgaatgtacacgcatgctgaagctaagtaacttttaatcaaagaaataagatggtattaggcaaatcttactatactatgaaaagcattaccttgcctatttttaatattattaaagcctttctccttcagta

SEQ ID NO: 358129 - DNA, 1970 bp, Homo sapiens
  misc_feature (1925)..(1925): n is a, c, g, or t
  misc_feature (1939)..(1939): n is a, c, g, or t
aagagccgctaggctgccctgcccgaagggctcaactgtcagtgagcctgcgcaggaggccaataggctgccaatactccttggactccccgccagggccctgctgtcagtgcgcctgcgcgcgggtccggcgccgaggttcttgactgctgtgccggacgccaggtgtagccatgcagcgagccgattccgagcagccctccaagcgtccccgttgcgatgacagcccgagaaccccctcaaacaccccttccgcagaggcagactggtccccgggcctggaactccatcccgactacaagacatggggtccggagcaggtgtgctccttcctcaggcgcggtggctttgaagagccggtgctgctgaagaacatccgagaaaatgaaatcacaggcgcattactgccttgtcttgatgagtctcgttttgaaaatcttggagtaagttccttgggggagaggaagaagctgcttagttatatccagcgattggttcaaatccacgttgatacaatgaaggtaattaatgatcctatccatggccacattgagctccaccctctcctcgtccgaatcattgatacacctcaatttcaacgtcttcgatacatcaaacagctgggaggtggttactatgtttttccaggagcttcacacaatcgatttgagcatagtctaggggtggggtatctagcaggatgtctagttcacgcactgggtgaaaaacaaccagagctgcagataagtgaacgagatgttctctgtgttcagattgctggactttgtcatgatctcggtcatgggccattttctcacatgtttgatggacgatttattccacttgctcgcccggaggtgaaatggacgcatgaacaaggctcagttatgatgtttgagcaccttattaattctaatggaattaagcctgtcatggaacaatatggtctcatccctgaagaagatatttgctttataaaggaacaaattgtaggaccacttgaatcacctgtcgaagattcattgtggccatataaagggcgtcctgaaaacaaaagcttcctttatgagatagtatctaataaaagaaatggcattgatgtggacaaatgggattattttgccagggactgccatcatcttggaatccaaaataattttgattacaagcgctttattaagtttgcccgtgtctgtgaagtagacaatgagttgcgtatttgtgctagagataaggaagttggaaatctgtatgacatgttccacactcgcaactctttacaccgtagagcttatcaacacaaagttggcaacattattgatacaatgattacagatgctttcctcaaagcagatgactacatagagattacaggtgctggaggaaaaaagtatcgcatttctacagcaattgacgacatggaagcctatactaagctgacagataacatttttctggagattttatactctactgatcccaaattgaaagacgcacgagagattttaaaacaaattgaataccgtaatctattcaagtatgtgggtgagacgcagccaacaggacaaataaagattaaaagggaggactatgaatctcttccaaaagaggttgccagtgctaaacccaaagtattgctagacgtgaaactgaaggctgaagattttatagtggatgttatcaacatggattatggaatgcaagaaaagaatccaattgatcatgttagcttctattgtaagactgcccccaacagagcaatcaggattactaaaaaccaggtttcacaacttctgccagagaaatttgcagagcagctgattcgagtatattgtaagaaggtggacagaaagagtttgtatgccgcaagacaatattttgttcagtggtgtgcagacagaaatttcaccaagccgcagatggcnatgttatagccccnctatagtcactacgtccggggatcctgtagt

SEQ ID NO: 358130 - DNA, 1927 bp, Homo sapiens
aagagccgctaggctgccctgcccgaagggctcaactgtcagtgagcctgcgcaggaggccaataggctgccaatactccttggactccccgccagggccctgctgtcagtgcgcctgcgcgcgggtccggcgccgaggttcttgactgctgtgccggacgccaggtgtagccatgcagcgagccgattccgagcagccctccaagcgtccccgttgcgatgacagcccgagaaccccctcaaacaccccttccgcagaggcagactggtccccgggcctggaactccatcccgactacaagacatggggtccggagcaggtgtgctccttcctcaggcgcggtggctttgaagagccggtgctgctgaagaacatccgagaaaatgaaatcacaggcgcattactgccttgtcttgatgagtctcgttttgaaaatcttggagtaagttccttgggggagaggaagaagctgcttagttatatccagcgattggttcaaatccacgttgatacaatgaaggtaattaatgatcctatccatggccacattgagctccaccctctcctcgtccgaatcattgatacacctcaatttcaacgtcttcgatacatcaaacagctgggaggtggttactatgtttttccaggagcttcacacaatcgatttgagcatagtctaggggtggggtatctagcaggatgtctagttcacgcactgggtgaaaaacaaccagagctgcagataagtgaacgagatgttctctgtgttcagattgctggactttgtcatgatctcggtcatgggccattttctcacatgtttgatggacgatttattccacttgctcgcccggaggtgaaatggacgcatgaacaaggctcagttatgatgtttgagcaccttattaattctaatggaattaagcctgtcatggaacaatatggtctcatccctgaagaagatatttgctttataaaggaacaaattgtaggaccacttgaatcacctgtcgaagattcattgtggccatataaagggcgtcctgaaaacaaaagcttcctttatgagatagtatctaataaaagaaatggcattgatgtggacaaatgggattattttgccagggactgccatcatcttggaatccaaaataattttgattacaagcgctttattaagtttgcccgtgtctgtgaagtagacaatgagttgcgtatttgtgctagagataaggaagttggaaatctgtatgacatgttccacactcgcaactctttacaccgtagagcttatcaacacaaagttggcaacattattgatacaatgattacagatgctttcctcaaagcagatgactacatagagattacaggtgctggaggaaaaaagtatcgcatttctacagcaattgacgacatggaagcctatactaagctgacagataacatttttctggagattttatactctactgatcccaaattgaaagacgcacgagagattttaaaacaaattgaataccgtaatctattcaagtatgtgggtgagacgcagccaacaggacaaataaagattaaaagggtgagttatcaggcatctttccattagtgaaaggttatctctgtcctccaagaggagaccactaacctatcgtgatactatgactctgtactaagtgctttacgtttattctcatttaatcttcacagtagtgcaggggtcttaggcctgttttacagatagagaaactgaggcttcactgagattaaataacttgctcatgaaagcatatttagccaggattcaaaagccaggtctaacttaactccaaatctttgatctcatccaggaagtgagagtgggtctccaattttggctagattcagacatgagaaaatgaatataagggaaaggaacctcaaaag

SEQ ID NO: 358131 - DNA, 2391 bp, Homo sapiens
acagagacccttgaacacacaggattcaactgtaagtctactttatatgtggatttatttcaataaatatattgacatattttttggaggtttgccaacaattcgaaaacacttgcggacaaaccaaaattaagaaaaagagttgtccatgaatgcataagacatatgtagcctcatcttacgcatttactcacgataaaatatacataaatctattacatacaaagttgcagcatttatcaaaacttatgcacacaaactcttacagaccgtatatggtaccattcacattgagagaaatgtaaacaaacgtaaagatgcacacggtactctgtatggggtttcacaacttctgccagagaaatttgcagagcagctgattcgagtatattgtaagaaggtggacagaaagagtttgtatgccgcaagacaatattttgttcagtggtgtgcagacagaaatttcaccaagccgcaggatggcgatgttatagccccactcataacacctcaaaaaaaggaatggaacgacagtacttcagtccaaaatccaactcgcctccgagaagcatccaaaagcagagtccagctttttaaagatgacccaatgtgaatgtctgtagtcagttgtttacaaactccctctcctgcacaattcatttagaggcttcaatcatagaattctgcaaattaatgacaactcatgctttaattttgtattttgaatgtacacgcatgctgaagctaagtaacttttaatcaaagaaataagatggtattaggcaaatcttactatactatgaaaagcattaccttgcctatttttaatattattaaagcctttctccttcagtagtctattttcttagaataacaactcttttatctattctgaactctattttttttcttttttaagagacaaggttttgctctgttgcccagcttggactcgaactttcctgggctcaagcgaccctcctgcctcagccccccaagtagctgggactaaagtcatgtgccaccacacccagcttactctgaacttttatgacagatgattgttttttgtttttaatgtagaaatgagacaagggtacaaattggaactagaaattgacattgtcattgacaaacatggctaaaaacaaaacatcaaatcctgcccccgtgaagagttccctgtcacctcaagtttgaggatagtcctctaagagtgacctaagcataagtgaaagacacctcccctcacccttctagccccctacaaggtgccaggttggggtaaagagttggagatgatggccaggagtggctccaacacgctggtgagaggcctgattaggttttggggaagatctgagagctctggcctcttcgtgagtggaacataaagccgcctcttgttgggagatcctaccccagtgacagaggaatcccccaaactaggctgtgccctggctccgtggcggctccagacccgggtagtgcctttgtcccctgaatactcactcccccggtccagagggccttcccactgcccagcctggagaaggcctcccctgacctgctctctcagtatcctggagagctggccagaggccatcacaggcatcatcctcagagctcctcagacctgggactttgtttttgctggttcagtgcattttgtgtatttaagagcaaacactagccaggcgtggcggcgtgtgcctgtagtcccagctacttgggaggctgaggcaggaggattgctcgaacctgggaggcggaggttgcagtgagcctagatcacgccattgcactccagcctgggtgacagagtgagactccatctccaaaaaaaaaagcacaaacactgcactgcctgtgctgaaattagtgaccacccagtgggctccaggctccgctaggtaacttcgttttcccagcagtggagtgggcaccaccttggtggggcagtgcccctgtgcccagggcacacctcattcccagttctatagcaattcaccaagaacaaagtctgcagttagagccaaagctggtggtggccagagggtgctgaagatacaggccagtggggatgggagccatgagccccgaatgtcttctgctctgatgctccccggactaagcctccctggcacactgggagtgaggggcagcctgagcaagtaggggaactcagaccacaggccagcagatttcccagcagtccatcactggccaccgtgtagccagattctgttccgtccacactggggtgaagagtacttggaatgtctgccatcctgtatgatcaccccaccccctgtccatccatcagtagataataagggttggttacaattcataagagaatagttaaaacacttctcctctcatgcctac

SEQ ID NO: 358132 - DNA, 1039 bp, Homo sapiens
ctgggtagaaatagagatgagtttaaagacaaataaatactgttgattttgagataggcctttaagtacaagtatcatgacaataggatgacttttttttgagacagagtcttgctctgttgcccaggctggagtgcaagagcaaaattccatctcaaaaaaaaataataacacattttttaaaaactatttttaatagttctatcaagtcagatccagtgtagttcaacagaaaaaatttaacatgggggtgagatacaaaagttttggcagagctaaatgagcatagaggacagtgattcaacagcaggaagctgctaccacctctaggataggagagaccaagggagcaggtgggagtccaggagctggggccacctgcaaaagctagaaccacagaatagtcactgccactgccgctcgtgccagaggaggtagggagagaaaaaacctgacttctctgccctcttctcacctccagtctcccaccagagcctcccactgaccaaatctaactggaaaccaacaggcatgggagctgagaaatgtaatttaccggagtagctcctgtgagacagagtagggagaggaagagtgaagaatggatctgagagcaaataagcagatgaggagcacgaatcctcccaccagcattgtattcctggtacaacagaggctctccaagatcgtgcatcatcttgtaaccaaagaagatctacccacaagttcagaacagtttagcatagagtcaagtattaggaggccttgcttcttacctctatggtttcacgtcattgtatcgcctccctttggatctctcccttattttgggtggaggagcttctttggctggagcctatgctgatgggaccaacgttagagctttgatgcagagaaaaatttaaattctgcaggtacatactgttcttcctccccttctttgccatcttgtagacctgggccttttattgcagaggggaccaggcgagagagaagctaggggttcagtgcatcccgtctttctcctgggaaaacagga

SEQ ID NO: 358133 - DNA, 1036 bp, Homo sapiens
  misc_feature (908)..(908): n is a, c, g, or t
aagagccgctaggctgccctgcccgaagggctcaactgtcagtgagcctgcgcaggaggccaataggctgccaatactccttggactccccgccagggccctgctgtcagtgcgcctgcgcgcgggtccggcgccgaggttcttgactgctgtgccggacgccaggtgtagccatgcagcgagccgattccgagcagccctccaagcgtccccgttgcgatgacagcccgagaaccccctcaaacaccccttccgcagaggcagactggtccccgggcctggaactccatcccgactacaagacatggggtccggagcaggtgtgctccttcctcaggcgcggtggctttgaagagccggtgctgctgaagaacatccgagaaaatgaaatcacaggcgcattactgccttgtcttgatgagtctcgttttgaaaatcttggagtaagttccttgggggagaggaagaagctgcttagttatatccagcgattggttcaaatccacgttgatacaatgaaggtaattaatgatcctatccatggccacattgagctccaccctctcctcgtccgaatcattgatacacctcaatttcaacgtcttcgatacatcaaacagctgggaggtggttactatgtttttccaggagcttcacacaatcgatttgagcatagtctagggtaagaagggaatggggtggggaacttgcagtttttaagtattttctctgtctcatgaaatagttatcttaggccaggcatggtggctcacacctataatcccagcactttgggaggcagaggtgggtggatcacatgaggtcaggagttcaagaccagcctggccaacattgtgaaaccccatctttactacaaatacaaaattagccagacatgattgtgcgcncctgtaatcctagctactcaggaggctgaggcaggaggatcacttgaacccaggaggttggtggttgcagtgagctgagattgcaccatcgcactccagcctaggcaacaagagcaaaaccccatctc

SEQ ID NO: 358134 - DNA, 858 bp, Homo sapiens
aagagccgctaggctgccctgcccgaagggctcaactgtcagtgagcctgcgcaggaggccaataggctgccaatactccttggactccccgccagggccctgctgtcagtgcgcctgcgcgcgggtccggcgccgaggttcttgactgctgtgccggacgccaggtgtagccatgcagcgagccgattccgagcagccctccaagcgtccccgttgcgatgacagcccgagaaccccctcaaacaccccttccgcagaggcagactggtccccgggcctggaactccatcccgactacaagacatggggtccggagcaggtgtgctccttcctcaggcgcggtggctttgaagagccggtgctgctgaagaacatccgagaaaatgaaatcacaggcgcattactgccttgtcttgatgagtctcgttttgaaaatcttggagtaagttccttgggggagaggaagaagctgcttagttatatccagcgattggttcaaatccacgttgatacaatgaaggtaagaggatctgagtttgttatgttttttgaatataaagtgatataactcaattatgtaaaattcattttgaagagaataggaggaaatctgcttctcagtgatagaattgtgagtagtggatcttttctaaactttctgcactttctaaaatgagcacagagtatttaaatcagaagaagaactaaaatatgtttaagcatacagaaaagcataagtagaccactacccaacttgtcaaatattaatattttgcctaatttgcttcaagtctgttatttttagagcaaaatattagaaactattgaagacctcctttgtacattctttttttttt

SEQ ID NO: 358135 - DNA, 873 bp, Homo sapiens
ttgattgtgaatgagtgagcagagagagatgagcaaacaggccaattggagatttcaagggagatctttgtttttactggcaagtttgcagttaccccttttcaccactagatggtagtgcctaacagagcttataactgcacgtgttcaaaggctgatgaaaaaataaaattcaattttatgatgatatttattaaaatgtaattctgtctacatgatcttataatattcatttaggaactgtaaatgattatatcattaaatgcattaaatatgtttatgaaataagttttgtaaaaggtttgtagactactagtaaaatgaaaaatctgacaggtttttaaaaatgttcctaagattgtggttagaaactagagaattaatatgcaatagacctttatctcagaattacttggaattgaggataattttgttagtcagggctcccaatgggctagaatctttaacacatcatattgtgcttacttttcctagcatgaacaaggctcagttatgatgtttgagcaccttattaattctaatggaattaagcctgtcatggaacaatatggtctcatccctgaagaagatatttgctttataaaggaacaaattgtaggaccacttgaatcacctgtcgaagattcattggtaagtttatgtacagcttaattttaactgactggtgcttttcatctagccttttcatgattccttctgagttatacatttggctattttagaggctaaatgataaaatatgagttctatgtttctactgtttaatgcaaaaaataaaaggcttatatttttttctacctctcaactgaattagttagaagttacttcccaaaaatatatatacagaaattc

SEQ ID NO: 358136 - DNA, 2296 bp, Homo sapiens
aagagccgctaggctgccctgcccgaagggctcaactgtcagtgagcctgcgcaggaggccaataggctgccaatactccttggactccccgccagggccctgctgtcagtgcgcctgcgcgcgggtccggcgccgaggttcttgactgctgtgccggacgccaggtgtagccatgcagcgagccgattccgagcagccctccaagcgtccccgttgcgatgacagcccgagaaccccctcaaacaccccttccgcagaggcagactggtccccgggcctggaactccatcccgactacaagacatggggtccggagcaggtgtgctccttcctcaggcgcggtggctttgaagagccggtgctgctgaagaacatccgagaaaatgaaatcacaggcgcattactgccttgtcttgatgagtctcgttttgaaaatcttggagtaagttccttgggggagaggaagaagctgcttagttatatccagcgattggttcaaatccacgttgatacaatgaaggtaattaatgatcctatccatggccacattgagctccaccctctcctcgtccgaatcattgatacacctcaatttcaacgtcttcgatacatcaaacagctgggaggtggttactatgtttttccaggagcttcacacaatcgatttgagcatagtctaggggtggggtatctagcaggatgtctagttcacgcactgggtgaaaaacaaccagagctgcagataagtgaacgagatgttctctgtgttcagattgctggactttgtcatgatctcggtcatgggccattttctcacatgtttgatggacgatttattccacttgctcgcccggaggtgaaatggacgcatgaacaaggctcagttatgatgtttgagcaccttattaattctaatggaattaagcctgtcatggaacaatatggtctcatccctgaagaagatatttgctttataaaggaacaaattgtaggaccacttgaatcacctgtcgaagattcattgtggccatataaagggcgtcctgaaaacaaaagcttcctttatgagatagtatctaataaaagaaatggcattgatgtggacaaatgggattattttgccagggactgccatcatcttggaatccaaaataattttgattacaagcgctttattaagtttgcccgtgtctgtgaagtagacaatgagttgcgtatttgtgctagagataaggaagttggaaatctgtatgacatgttccacactcgcaactctttacaccgtagagcttatcaacacaaagttggcaacattattgatacaatgattacagatgctttcctcaaagcagatgactacatagagattacaggtgctggaggaaaaaagtatcgcatttctacagcaattgacgacatggaagcctatactaagctgacagataacatttttctggagattttatactctactgatcccaaattgaaagacgcacgagagattttaaaacaaattgaataccgtaatctattcaagtatgtgggtgagacgcagccaacaggacaaataaagattaaaagggaggactatgaatctcttccaaaagaggttgccagtgctaaacccaaagtattgctagacgtgaaactgaaggctgaagattttatagtggatgttatcaacatggattatggaatgcaagaaaagaatccaattgatcatgttagcttctattgtaagactgcccccaacagagcaatcaggattactaaaaaccaggtttcacaacttctgccagagaaatttgcagagcagctgattcgagtatattgtaagaaggtggacagaaagagtttgtatgccgcaagacaatattttgttcagtggtgtgcagacagaaatttcaccaagccgcaggatggcgatgttatagccccactcataacacctcaaaaaaaggaatggaacgacagtacttcagtccaaaatccaactcgcctccgagaagcatccaaaagcagagtccagctttttaaagatgacccaatgtgaatgtctgtagtcagttgtttacaaactccctctcctgcacaattcatttagaggcttcaatcatagaattctgcaaattaatgacaactcatgctttaattttgtattttgaatgtacacgcatgctgaagctaagtaacttttaatcaaagaaataagatggtattaggcaaatcttactatactatgaaaagcattaccttgcctatttttaatattattaaagcctttctccttcagta

SEQ ID NO: 358137 - DNA, 2800 bp, Homo sapiens
aagagccgctaggctgccctgcccgaagggctcaactgtcagtgagcctgcgcaggaggccaataggctgccaatactccttggactccccgccagggccctgctgtcagtgcgcctgcgcgcgggtccggcgccgaggttcttgactgctgtgccggacgccaggtgtagccatgcagcgagccgattccgagcagccctccaagcgtccccgttgcgatgacagcccgagaaccccctcaaacaccccttccgcagaggcagactggtccccgggcctggaactccatcccgactacaagacatggggtccggagcaggtgtgctccttcctcaggcgcggtggctttgaagagccggtgctgctgaagaacatccgagaaaatgaaatcacaggcgcattactgccttgtcttgatgagtctcgttttgaaaatcttggagtaagttccttgggggagaggaagaagctgcttagttatatccagcgattggttcaaatccacgttgatacaatgaaggtaattaatgatcctatccatggccacattgagctccaccctctcctcgtccgaatcattgatacacctcaatttcaacgtcttcgatacatcaaacagctgggaggtggttactatgtttttccaggagcttcacacaatcgatttgagcatagtctaggggtggggtatctagcaggatgtctagttcacgcactgggtgaaaaacaaccagagctgcagataagtgaacgagatgttctctgtgttcagattgctggactttgtcatgatctcggtcatgggccattttctcacatgtttgatggacgatttattccacttgctcgcccggaggtgaaatggacgcatgaacaaggctcagttatgatgtttgagcaccttattaattctaatggaattaagcctgtcatggaacaatatggtctcatccctgaagaagatatttgctttataaaggaacaaattgtaggaccacttgaatcacctgtcgaagattcattgtggccatataaagggcgtcctgaaaacaaaagcttcctttatgagatagtatctaataaaagaaatggcattgatgtggacaaatgggattattttgccagggactgccatcatcttggaatccaaaataattttgattacaagcgctttattaagtttgcccgtgtctgtgaagtagacaatgagttgcgtatttgtgctagagataaggaagttggaaatctgtatgacatgttccacactcgcaactctttacaccgtagagcttatcaacacaaagttggcaacattattgatacaatgattacagatgctttcctcaaagcagatgactacatagagattacaggtgctggaggaaaaaagtatcgcatttctacagcaattgacgacatggaagcctatactaagctgacagataacatttttctggagattttatactctactgatcccaaattgaaagacgcacgagagattttaaaacaaattgaataccgtaatctattcaagtatgtgggtgagacgcagccaacaggacaaataaagattaaaagggaggactatgaatctcttccaaaagaggttgccagtgctaaacccaaagtattgctagacgtgaaactgaaggctgaagattttatagtggatgttatcaacatggattatggaatgcaagaaaagaatccaattgatcatgttagcttctattgtaagactgcccccaacagagcaatcaggattactaaaaaccaggtttcacaacttctgccagagaaatttgcagagcagctgattcgagtatattgtaagaaggtggacagaaagagtttgtatgccgcaagacaatattttgttcagtggtgtgcagacagaaatttcaccaagccgcaggatggcgatgttatagccccactcataacacctcaaaaaaaggaatggaacgacagtacttcagtccaaaatccaactcgcctccgagaagcatccaaaagcagagtccagctttttaaagatgacccaatgtgaatgtctgtagtcagttgtttacaaactccctctcctgcacaattcatttagaggcttcaatcatagaattctgcaaattaatgacaactcatgctttaattttgtattttgaatgtacacgcatgctgaagctaagtaacttttaatcaaagaaataagatggtattaggcaaatcttactatactatgaaaagcattaccttgcctatttttaatattattaaagcctttctccttcagtagtctattttcttagaataacaactcttttatctattctgaactctattttttttcttttttaagagacaaggttttgctctgttgcccagcttggactcgaactttcctgggctcaagcgaccctcctgcctcagccccccaagtagctgggactaaagtcatgtgccaccacacccagcttactctgaacttttatgacagatgattgttttttgtttttaatgtagaaatgagacaagggtacaaattggaactagaaattgacattgtcattgacaaacatggctaaaaacaaaacatcaaatcctgcccccgccatgagatgttggaaggaggcatccttccaacatctcatggcgagctcaggtgattgatactcctgatgcgagtaatacggatgtgtttaggagtgggacttctaggggatttagcggggtgatgcctgttgggggccagtgccctcctaattggggggtaggggctaggcatgagatgttggaagg

SEQ ID NO: 358138 - DNA, 2343 bp, Homo sapiens
aagagccgctaggctgccctgcccgaagggctcaactgtcagtgagcctgcgcaggaggccaataggctgccaatactccttggactccccgccagggccctgctgtcagtgcgcctgcgcgcgggtccggcgccgaggttcttgactgctgtgccggacgccaggtgtagccatgcagcgagccgattccgagcagccctccaagcgtccccgttgcgatgacagcccgagaaccccctcaaacaccccttccgcagaggcagactggtccccgggcctggaactccatcccgactacaagacatggggtccggagcaggtgtgctccttcctcaggcgcggtggctttgaagagccggtgctgctgaagaacatccgagaaaatgaaatcacaggcgcattactgccttgtcttgatgagtctcgttttgaaaatcttggagtaagttccttgggggagaggaagaagctgcttagttatatccagcgattggttcaaatccacgttgatacaatgaaggtaattaatgatcctatccatggccacattgagctccaccctctcctcgtccgaatcattgatacacctcaatttcaacgtcttcgatacatcaaacagctgggaggtggttactatgtttttccaggagcttcacacaatcgatttgagcatagtctaggggtggggtatctagcaggatgtctagttcacgcactgggtgaaaaacaaccagagctgcagataagtgaacgagatgttctctgtgttcagattgctggactttgtcatgatctcggtcatgggccattttctcacatgtttgatggacgatttattccacttgctcgcccggaggtgaaatggacgcatgaacaaggctcagttatgatgtttgagcaccttattaattctaatggaattaagcctgtcatggaacaatatggtctcatccctgaagaagatatttgctttataaaggaacaaattgtaggaccacttgaatcacctgtcgaagattcattgatttggtgcctatcctaaaacttccagtgggttttcttgccttccagtggccatataaagggcgtcctgaaaacaaaagcttcctttatgagatagtatctaataaaagaaatggcattgatgtggacaaatgggattattttgccagggactgccatcatcttggaatccaaaataattttgattacaagcgctttattaagtttgcccgtgtctgtgaagtagacaatgagttgcgtatttgtgctagagataaggaagttggaaatctgtatgacatgttccacactcgcaactctttacaccgtagagcttatcaacacaaagttggcaacattattgatacaatgattacagatgctttcctcaaagcagatgactacatagagattacaggtgctggaggaaaaaagtatcgcatttctacagcaattgacgacatggaagcctatactaagctgacagataacatttttctggagattttatactctactgatcccaaattgaaagacgcacgagagattttaaaacaaattgaataccgtaatctattcaagtatgtgggtgagacgcagccaacaggacaaataaagattaaaagggaggactatgaatctcttccaaaagaggttgccagtgctaaacccaaagtattgctagacgtgaaactgaaggctgaagattttatagtggatgttatcaacatggattatggaatgcaagaaaagaatccaattgatcatgttagcttctattgtaagactgcccccaacagagcaatcaggattactaaaaaccaggtttcacaacttctgccagagaaatttgcagagcagctgattcgagtatattgtaagaaggtggacagaaagagtttgtatgccgcaagacaatattttgttcagtggtgtgcagacagaaatttcaccaagccgcaggatggcgatgttatagccccactcataacacctcaaaaaaaggaatggaacgacagtacttcagtccaaaatccaactcgcctccgagaagcatccaaaagcagagtccagctttttaaagatgacccaatgtgaatgtctgtagtcagttgtttacaaactccctctcctgcacaattcatttagaggcttcaatcatagaattctgcaaattaatgacaactcatgctttaattttgtattttgaatgtacacgcatgctgaagctaagtaacttttaatcaaagaaataagatggtattaggcaaatcttactatactatgaaaagcattaccttgcctatttttaatattattaaagcctttctccttcagta

SEQ ID NO: 358139 - DNA, 1738 bp, Homo sapiens
taatcagctcggtaccgtcttgatgagtctcgttttgaaaatcttggagtattccttgggggagaggaagaagctgcttagttatatccagcgattggttcaaatccacgttgatacaatgaagggtggggtatctagcaggatgtctagttcacgcactgggtgaaaaacaaccagagctgcagataagtgaacgagatgttctctgtgttcagattgctggactttgtcatgatctcggtcatgggccattttctcacatgtttgatggacgatttattccacttgctcgcccggaggtgaaatggacgcatgaacaaggctcagttatgatgtttgagcaccttattaattctaatggaattaagcctgtcatggaacaatatggtctcatccctgaagaagatatttgctttataaaggaacaaattgtaggaccacttgaatcacctgtcgaagattcattgtggccatataaagggcgtcctgaaaacaaaagcttcctttatgagatagtatctaataaaagaaatggcattgatgtggacaaatgggattattttgccagggactgccatcatcttggaatccaaaataattttgattacaagcgctttattaagtttgcccgtgtctgtgaagtagacaatgagttgcgtatttgtgctagagataaggaagttggaaatctgtatgacatgttccacactcgcaactctttacaccgtagagcttatcaacacaaagttggcaacattattgatacaatgattacagatgctttcctcaaagcagatgactacatagagattacaggtgctggaggaaaaaagtatcgcatttctacagcaattgacgacatggaagcctatactaagctgacagataacatttttctggagattttatactctactgatcccaaattgaaagacgcacgagagattttaaaacaaattgaataccgtaatctattcaagtatgtgggtgagacgcagccaacaggacaaataaagattaaaagggaggactatgaatctcttccaaaagaggttgccagtgctaaacccaaagtattgctagacgtgaaactgaaggctgaagattttatagtggatgttatcaacatggattatggaatgcaagaaaagaatccaattgatcatgttagcttctattgtaagactgcccccaacagagcaatcaggattactaaaaaccaggtttcacaacttctgccagagaaatttgcagagcagctgattcgagtatattgtaagaaggtggacagaaagagtttgtatgccgcaagacaatattttgttcagtggtgtgcagacagaaatttcaccaagccgcaggatggcgatgttatagccccactcataacacctcaaaaaaaggaatggaacgacagtacttcagtccaaaatccaactcgcctccgagaagcatccaaaagcagagtccagctttttaaagatgacccaatgtgaatgtctgtagtcagttgtttacaaactccctctcctgcacaattcatttagaggcttcaatcatagaattctgcaaattaatgacaactcatgctttaattttgtattttgaatgtacacgcatgctgaagctaagtaacttttaatcaaagaaataagatggtattaggcaaatcttactatactatgaaaagcattaccttgcctatttttaatattattaaagcctttctccttcagta

SEQ ID NO: 358140 - DNA, 2477 bp, Homo sapiens
aagagccgctaggctgccctgcccgaagggctcaactgtcagtgagcctgcgcaggaggccaataggctgccaatactccttggactccccgccagggccctgctgtcagtgcgcctgcgcgcgggtccggcgccgaggttcttgactgctgtgccggacgccaggtgtagccatgcagcgagccgattccgagcagccctccaagcgtccccgttgcgatgacagcccgagaaccccctcaaacaccccttccgcagaggcagactggtccccgggcctggaactccatcccgactacaagacatggggtccggagcaggtgtgctccttcctcaggcgcggtggctttgaagagccggtgctgctgaagaacatccgagaaaatgaaatcacaggcgcattactgccttgtcttgatgagtctcgttttgaaaatcttggagtaagttccttgggggagaggaagaagctgcttagttatatccagcgattggttcaaatccacgttgatacaatgaaggtaattaatgatcctatccatggccacattgagctccaccctctcctcgtccgaatcattgatacacctcaatttcaacgtcttcgatacatcaaacagctgggaggtggttactatgtttttccaggagcttcacacaatcgatttgagcatagtctaggggtggggtatctagcaggatgtctagttcacgcactgggtgaaaaacaaccagagctgcagataagtgaacgagatgttctctgtgttcagattgctggactttgtcatgatctcggtcatgggccattttctcacatgtttgatggacgatttattccacttgctcgcccggaggtgaaatggacgcatgaacaaggctcagttatgatgtttgagcaccttattaattctaatggaattaagcctgtcatggaacaatatggtctcatccctgaagaagatatttgctttataaaggaacaaattgtaggaccacttgaatcacctgtcgaagattcattgtggccatataaagggcgtcctgaaaacaaaagcttcctttatgagatagtatctaataaaagaaatggcattgatgtggacaaatgggattattttgccagggactgccatcatcttggaatccaaaataattttgattacaagcgctttattaagtttgcccgtgtctgtgaagtagacaatgagttgcgtatttgtgctagagataaggaagttggaaatctgtatgacatgttccacactcgcaactctttacaccgtagagcttatcaacacaaagttggcaacattattgatacaatgattacagatgctttcctcaaagcagatgactacatagagattacaggtgctggaggaaaaaagtatcgcatttctacagcaattgacgacatggaagcctatactaagctgacagataacatttttctggagattttatactctactgatcccaaattgaaagacgcacgagagattttaaaacaaattgaataccgtaatctattcaagtatgtgggtgagacgcagccaacaggacaaataaagattaaaagggaggactatgaatctcttccaaaagaggttgccagtgctaaacccaaagtattgctagacgtgaaactgaaggctgaagattttatagtggatgttatcaacatggattatggaatgcaagaaaagaatccaattgatcatgttagcttctattgtaagactgcccccaacagagcaatcaggattactaaaaaccaggtttcacaacttctgccagagaaatttgcagagcagctgattcgagtatattgtaagaaggtggacagaaagagtttgtatgccgcaagacaatattttgttcagtggtgtgcagacagaaatttcaccaagccgcagtctcccaccagagcctcccactgaccaaatctaactggaaaccaacaggcatgggagctgagaaatgtaatttaccggagtagctcctgtgagacagagtagggagaggaagagtgaagaatggatctgagagcaaataagcagatgaggagcacgaatcctcccaccagcattgtattcctggtacaacagaggctctccaagatcgtgcatcatcttgtaaccaaagaagatctacccacaagttcagaacagtttagcatagagtcaagtattaggaggccttgcttcttacctctatggtttcacgtcattgtatcgcctccctttggatctctcccttattttgggtggaggagcttctttggctggagcctatgctgatgggaccaacgttagagctttgatgcagagaaaaatttaaattctgcaggtacatactgttcttcctccccttctttgccatcttgtagacctgggccttttattgcagaggggaccaggcgagagagaagctaggggttcagtgcatcccgtctttctcctgggaaaacagga

SEQ ID NO: 358141 - DNA, 2047 bp, Homo sapiens
aagagccgctaggctgccctgcccgaagggctcaactgtcagtgagcctgcgcaggaggccaataggctgccaatactccttggactccccgccagggccctgctgtcagtgcgcctgcgcgcgggtccggcgccgaggttcttgactgctgtgccggacgccaggtgtagccatgcagcgagccgattccgagcagccctccaagcgtccccgttgcgatgacagcccgagaaccccctcaaacaccccttccgcagaggcagactggtccccgggcctggaactccatcccgactacaagacatggggtccggagcaggtgtgctccttcctcaggcgcggtggctttgaagagccggtgctgctgaagaacatccgagaaaatgaaatcacaggcgcattactgccttgtcttgatgagtctcgttttgaaaatcttggagtaagttccttgggggagaggaagaagctgcttagttatatccagcgattggttcaaatccacgttgatacaatgaaggtaattaatgatcctatccatggccacattgagctccaccctctcctcgtccgaatcattgatacacctcaatttcaacgtcttcgatacatcaaacagctgggaggtggttactatgtttttccaggagcttcacacaatcgatttgagcatagtctaggggtggggtatctagcaggatgtctagttcacgcactgggtgaaaaacaaccagagctgcagataagtgaacgagatgttctctgtgttcagattgctggactttgtcatgatctcggtcatgggccattttctcacatgtttgatggacgatttattccacttgctcgcccggaggtgaaatggacgcatgaacaaggctcagttatgatgtttgagcaccttattaattctaatggaattaagcctgtcatggaacaatatggtctcatccctgaagaagatatttgctttataaaggaacaaattgtaggaccacttgaatcacctgtcgaagattcattgtggccatataaagggcgtcctgaaaacaaaagcttcctttatgagatagtatctaataaaagaaatggcattgatgtggacaaatgggattattttgccagggactgccatcatcttggaatccaaaataattttgattacaagcgctttattaagtttgcccgtgtctgtgaagtagacaatgagttgcgtatttgtgctagagataaggaagttggaaatctgtatgacatgttccacactcgcaactctttacaccgtagagcttatcaacacaaagttggcaacattattgatacaatgattacagatgctttcctcaaagcagatgactacatagagattacaggtgctggaggaaaaaagtatcgcatttctacagcaattgacgacatggaagcctatactaagctgacagataacatttttctggagattttatactctactgatcccaaattgaaagacgcacgagagattttaaaacaaattgaataccgtaatctattcaagtatgtgggtgagacgcagccaacaggacaaataaagattaaaagggaggactatgaatctcttccaaaagaggttgccagtgctaaacccaaagtattgctagacgtgaaactgaaggctgaagattttatagtggatgttatcaacatggattatggaatgcaagaaaagaatccaattgatcatgttagcttctattgtaagactgcccccaacagagcaatcaggattactaaaaaccaggtttcacaacttctgccagagaaatttgcagagcagctgattcgagtatattgtaagaaggtggacagaaagagtttgtatgccgcaagacaatattttgttcagtggtgtgcagacagaaatttcaccaagccgcaggtaggtggctgttactcacaaactttgcacaattttttatttttaagtaaaaaccaaaagtaagtctatctgctgaaaagttcccatttaagttatagtcatttggttatggttttgaaaataaggtc

SEQ ID NO: 358142 - DNA, 1405 bp, Homo sapiens
aagagccgctaggctgccctgcccgaagggctcaactgtcagtgagcctgcgcaggaggccaataggctgccaatactccttggactccccgccagggccctgctgtcagtgcgcctgcgcgcgggtccggcgccgaggttcttgactgctgtgccggacgccaggtgtagccatgcagcgagccgattccgagcagccctccaagcgtccccgttgcgatgacagcccgagaaccccctcaaacaccccttccgcagaggcagactggtccccgggcctggaactccatcccgactacaagacatggggtccggagcaggtgtgctccttcctcaggcgcggtggctttgaagagccggtgctgctgaagaacatccgagaaaatgaaatcacaggcgcattactgccttgtcttgatgagtctcgttttgaaaatcttggagtaagttccttgggggagaggaagaagctgcttagttatatccagcgattggttcaaatccacgttgatacaatgaaggtaattaatgatcctatccatggccacattgagctccaccctctcctcgtccgaatcattgatacacctcaatttcaacgtcttcgatacatcaaacagctgggaggtggttactatgtttttccaggagcttcacacaatcgatttgagcatagtctaggggtggggtatctagcaggatgtctagttcacgcactgggtgaaaaacaaccagagctgcagataagtgaacgagatgttctctgtgttcagattgctggactttgtcatgatctcggtcatgggccattttctcacatgtttgatggacgatttattccacttgctcgcccggaggtgaaatggacgcatgaacaaggctcagttatgatgtttgagcaccttattaattctaatggaattaagcctgtcatggaacaatatggtctcatccctgaagaagatatttgctttataaaggaacaaattgtaggaccacttgaatcacctgtcgaagattcattgtggccatataaagggcgtcctgaaaacaaaagcttcctttatgagatagtatctaataaaagaaatggcattgatgtggacaaatgggattattttgccagtttgcccgtgtctgtgaagtagacaatgagttgcgtatttgtgctagagataaggaagttggaaatctgtatgacatgttccacactcgcaactctttacaccgtagagcttatcaacacaaagttggcaacattattgatacaatgtaagaaacttgattgtcatttccctataaaattttccttgatacttggctagagtatcatactaggctcaactagacatttctagatgagttcaagtgaatattaagtgattaaattgaaaatggtttcctt

SEQ ID NO: 358143 - DNA, 905 bp, Homo sapiens
cagcactttgggaatccaaggcaggcggattgcttgaggccaggagttcgagaccagcctggccaatgtggcaaaaccctgtctctagactttgtcccagaaaaaaaaaaaaaggagctgtgttttcagacagagcttagtgcagccagttcttgatggctgtgcaatgctttccttttaagagtggagttagcctcgtcataaagcgtgtttttgagtctgttcgaacgggtcaacaacgaagggaagtttcaggcagatcttgtatgcctggccctggtggctgctttcatttccttccagtatcagtgctaaacaggaatgaacatgttcaagccccgtctcacccacctctggcatcttcgccctaactctgccctagaagacctttccttccgtatcgtcaagaaaactgaagttgctgtttcactccttctcccacccagaaactttgctgcatcttcctggatccctagctccttgcacccatgatcctgtctccttcctcagcccggcttctggctgagcagcctgcacttgctgtcttcactcctacacgctgcccccactcctacacgctgcccctgcgtgcttctcacttctctacccttccagccctgcactctggggacctgtgcgtatgtttgtgtgattatcaatctgttgaacccaggaggtcgaggctgcagtgaggcataatcacgccactgcactccagcctgggtaatagagcaagatcctgtctttaaaataataattatgattgggtatggtggcacacatctgtagtcccagctactcgggaggctgaggcacaagaattgcttgagacccagaggcggaggttggagtgagctaggatggtgccactgcattccagcctgggcggcagagtgagactgtct

SEQ ID NO: 358144 - DNA, 385 bp, Homo sapiens
tcaaaaggaaattctcattaaaacaactatgagaatgagagaaatcatgatactaagatagtatgtaatctttagagtttaaaatagttgttcctagcccctaaagtgatattattttgacttccttaagcatagagaactttgtttacagtagttctactctgcagttaggtgtaataaaccagcattctttacaaaactcaaatgagaccttggaacctgagctatatgagtaacacatatatgatcctgtgatctatatgatatattatttgtcatttctctattcccagcttgaaatttaatataaaaaaaagtttcactgcttcattctaaatcctgtttgatccaacatggaaaacattgttttagatttcttaatgta

SEQ ID NO: 358145 - DNA, 6187 bp, Homo sapiens
tggggacgttgacaagtggatccaagatggcgtagaaagtaatgacaggatttggatgaagtaatggatcactaatgaactacagtgctggtgagatgtgtaagaaattataaagagctctgatgggctatttgggtgatacccagtgcagtgaactgcaggatttttgtccctgagtcatggaagacagaagagctgaaaagtcatgtgaacaagcatgtgaatcacttaagaggcaggactatgaaatggccctcaagcactgcacagaggcccttctttctcttggccagtactccatggcagacttcacagggccttgtccattggaaatagaacgcatcacaatcgagagtcttctctacagaattgcctcatttttgcaactgaaaaattatgtgcaagctgatgaagattgtagacatgtgctgggagaaggactggccaagggagaagatgcctttcgggcagtgctttgctgcatgcagctgaaagggaagctccaacctgtatccaccattcttgccaagtcactcacaggagagtccctgaatgggatggtaacaaaggatttgacaagactaaaaacacttctctcagaaacagagatttttagaacaaggaatctgtaggtatggtgcccagtgtacttcagcacattcccaggaagaactagcagaatggcagaaaagatatgcttcacggctgataaaattgaaacagcaaaatgagaataaacagctctcaggcagttacatggaaaccttgatagaaaagtggatgaattcattgtctcctgagaaagtgcttagtgaatgtatagaaggagtaaaggtagagcacaatcctgacctgtcagttactgtcagcaccaaaaaatcccaccagacatggacctttgctctcacttgtaagcctgcaagaatgctgtatcgtgtagcattgctttatgatgctcatcgtcctcattttagtatcattgcaatatctgccggagatagtactacccaggtatcacaagaagtcccagaaaactgtcaagaatggataggaggaaagatggcccaaaatggattagatcattacgtgtataaagtcgggatagcatttaacacagaaatatttggaacttttcgccaaaccatagttttcgactttggattggaaccagtactcatgcaaagagtaatgattgatgcagcttctacagaagatctcgaatacctgatgcatgcaaaacagcagctagtaaccacagctaaacgttgggattcttcctctaagactattatagattttgaacctaatgaaactactgatttggagaagagccttcttatcagataccaaattcccctctctgctgaccagctatttactcagtccgttttagacaaatcattgaccaagagcaactatcagtcacggttacatgaccttctttatattgaggagatagcccagtataaagaaatcagcaagttcaaccttaaagtgcaattgcagattctggcaagcttcatgctcactggtgtttctggaggtgcaaagtatgctcagaatggacaactttttggtcgctttaagcttactgaaacactttctgaagatactttggctggacgactggtgatgaccaaagtcaatgctgtttatttattaccagtccctaaacagaagttagtacagacccagggaaccaaagagaaggtttatgaagctactattgaagaaaaaacaaaggaatatatatttttaaggctatctagggaatgctgtgaagaacttaatcttcggcctgactgtgacacacaggttgaacttcagtttcaattaaatcgattacccctctgtgaaatgcactatgcactagacaggatcaaggacaatggggttttgtttccagacatcagtatgactcccaccataccatggagtcctaacagacaatgggatgaacagttggatcctcgactaaatgcaaaacagaaagaggctgttctggccattaccactccacttgcaatccagctgccgcctgtgcttatcatcggaccctatgggacaggcaaaacgttcactctagctcaggctgtcaaacatattctgcagcaacaggagactaggattctcatttgcacccattctaatagtgctgctgatctctacataaaggattatttacatccatatgtagaagcaggcaatccccaggcaagacctctcagggtatatttcagaaatcgctgggtaaagactgtccacccagttgtgcatcagtactgtttgatctcaagcgcacattccacctttcagatgccccagaaagaagatattcttaaacatcgagtggtggttgttaccttgaatacttcccagtacctctgtcagttggaccttgaacctgggttttttacacacattctattagatgaagctgcccaggccatggagtgtgaaaccattatgcctctagcattagcaactcaaaacactcggattgtcttggctggtgatcacatgcagctcagtccttttgtttacagcgagtttgccagggagagaaaccttcacgtttcattacttgaccgactctatgagcattaccctgctgagttcccatgtaggattctcctgtgtgagaactaccgctcccatgaagctatcatcaattatacctctgagcttttctatgagggcaaactgatggccagtgggaagcagccagcacacaaagatttctacccactaactttctttacagcacgaggagaagatgtacaagaaaaaaatagcacagctttttataataatgcagaggtgtttgaagtggtggaacgtgtagaagagttaagaaggaagtggccagtagcgtgggggaagttagatgatggcagtattggtgtggtgactccatatgctgatcaagtgtttagaatacgtgctgaacttcgaaaaaagagattatctgatgttaatgtagaaagggtgctaaatgttcaaggaaagcaattcagagttttgtttcttagcacagtacgtacaagacatacttgtaaacataaacagacaccaattaaaaagaaagagcaacttctggaagattccacagaggacttagattatggttttttatctaactacaagcttctcaatactgccatcacaagagcacaatccctggttgctgtggtgggtgatcccattgctctgtgctctattggaagatgcaggaaattttgggaacggtttattgccctgtgtcatgaaaacagtagcctacatggaatcacttttgaacagatcaaagcccagttagaggctttagaactaaagaagacatatgtgttgaatccgctggcacctgaatttatcccccgggctctaagactgcagcattcaggaagtaccaacaaacagcagcaatcaccacccaaggggaaaagtcttcatcatacccagaatgatcacttccagaatgatggaattgttcagcccaatccttctgtacttattggcaatcctattagagcatatactcctccaccccctcttggacctcacccaaatttgggaaaatctccaagccctgttcaaagaatagatcctcacactgggacaagtattctttatgtacctgctgtctatggagggaatgtagttatgtcggtgcctttacctgtaccatggacaggataccagggtaggtttgcagttgatcctcgaattattacacatcaggcagcaatggcctataacatgaacctattacagacacatggacgaggatctcctattccttatggccttggacatcacccacctgtcaccataggccagccacaaaatcagcatcaggagaaggatcaacatgagcaaaatcgaaatggtaaaagtgatacaaataattccggacctgaaattaataagattcgaacaccagagaaaaagccaacagaaccaaaacaggttgatttggaatcaaatccacagaacagaagtcctgaatcacgtcctagtgttgtttatcccagtaccaaatttcctcgcaaagataatctcaacccaagacacataaatcttccccttcctgctccccacgcacagtatgcaatccctaatcgccactttcatccccttccccagctaccaagaccaccctttccaattccacagcagcacaccttgttaaatcagcagcagaataatttgcctgaacaaccaaatcagataccacctcagccaaatcaggtagtccagcagcaaagtcagttgaatcagcagcctcagcagccacctcctcagctttctcctgcatatcaggcgggacccaacaatgctttttttaatagtgcagttgctcatcggccacagtctcctcctgcagaagctgtaattccggagcagcagccccctcccatgctgcaagaaggccacagtcctctgagagccattgcacaacccggccccattcttccttcacatctgaatagcttcattgatgagaacccctcgggattacctataggggaggctttagatcgtatacatgggagtgtcgctctggaaacattaaggcagcagcaggcacggttccagcagtggagcgagcatcatgcctttctcagtcagggcagcgttccatacccacaccatcaccatcctcacctccagcatcttcctcagccgcccctgggattacatcagccgccagtgcgggcagactggaagctcaccagcagtgccgaagatgaagtggagaccacatactcaaggtttcaagacttaatcagagaactgtctcatcgtgatcaaagtgaaacacgggaactagctgaaatgccaccacctcaatcaagacttttgcaatatagacaagtacagagtagaagcccaccagcagtcccatctcccccatccagtacagaccacagtagccacttttctaactttaatgataacagcagagacattgaagtagccagcaacccagcatttccacagcgcctcccaccccagatattcaactcacctttctcgttgccatctgaacaccttgcccctcctcccttgaaatacctggcacctgatggagcatggacttttgctaacttgcaacagaatcacctaatggggccaggttttccctatggcctacctccattgcctcacaggccaccgcagaacccttttgtacaaatacagaatcatcaacatgctattggtcaagagccatttcacccattgtcatctcgaacagtatcttcttcttcgctccctagcttagaagagtatgagcccagaggacctggtcggcccttgtaccaaagaagaatctcatctagctcagttcaaccttgttctgaagaagtaagcactcctcaagacagtctggctcagtgtaaagagcttcaggaccacagtaaccaatcttctttcaacttttcatccccggagtcctgggtaaacaccacctcatctactccttatcagaacattccgtgcaatggatccagcaggacagctcagcccagagagttgatagcgccacccaagactgtcaaaccccctgaggatcaactgaagtcggagaacctcgaggtgtccagttccttcaactacagtgtgctgcagcatcttggccagtttccaccccttatgcctaacaagcagatcgcggagtcggccaatagcagtagcccccagagctctgcggggggcaagcccgccatgtcctatgccagcgctctgcgggcccctccaaagcccaggccccctcctgagcaggccaagaagagtagcgaccctctgtctctcttccaggaactgagctttccctcaagggagaatgttttaatttctgtttgtatcagtagaattaaggtagttggacttcatctatagatgcacagttccctttgttttaatattaaatatgttctcacttaattgctttgctgctagacttgcaactaatttttttaaagtatattccattattttgcatttttgatgtgtcaaaactttgacagcttttatgtagaataaaaaaatttttaaatttgtgtattgttacatatgtttgcatcaagctagcagccaagaggttaattgtgctcctattctgtaaaagactgcaagtattgtttgtgtacaatgtatgtaaaaaaagaacaaaaaacgcgag

SEQ ID NO: 358146 - DNA, 5428 bp, Homo sapiens
tggggacgttgacaagtggatccaagatggcgtagaaagtaatgacaggatttggatgaagtaatggatcactaatgaactacagtgctggtgagatgtgtaagaaattataaagagctctgatgggctatttgggtgatacccagtgcagtgaactgcaggatttttgtccctgagtcatggaagacagaagagctgaaaagtcatgtgaacaagcatgtgaatcacttaagaggcaggactatgaaatggccctcaagcactgcacagaggcccttctttctcttggccagtactccatggcagacttcacagggccttgtccattggaaatagaacgcatcacaatcgagagtcttctctacagaattgcctcatttttgcaactgaaaaattatgtgcaagctgatgaagattgtagacatgtgctgggagaaggactggccaagggagaagatgcctttcgggcagtgctttgctgcatgcagctgaaagggaagctccaacctgtatccaccattcttgccaagtcactcacaggagagtccctgaatgggatggtaacaaaggatttgacaagactaaaaacacttctctcagaaacagagatttttagaacaaggaatctgtaggtatggtgcccagtgtacttcagcacattcccaggaagaactagcagaatggcagaaaagatatgcttcacggctgataaaattgaaacagcaaaatgagaataaacagctctcaggcagttacatggaaaccttgatagaaaagtggatgaattcattgtctcctgagaaagtgcttagtgaatgtatagaaggagtaaaggtagagcacaatcctgacctgtcagttactgtcagcaccaaaaaatcccaccagacatggacctttgctctcacttgtaagcctgcaagaatgctgtatcgtgtagcattgctttatgatgctcatcgtcctcattttagtatcattgcaatatctgccggagatagtactacccaggtatcacaagaagtcccagaaaactgtcaagaatggataggaggaaagatggcccaaaatggattagatcattacgtgtataaagtcgggatagcatttaacacagaaatatttggaacttttcgccaaaccatagttttcgactttggattggaaccagtactcatgcaaagagtaatgattgatgcagcttctacagaagatctcgaatacctgatgcatgcaaaacagcagctagtaaccacagctaaacgttgggattcttcctctaagactattatagattttgaacctaatgaaactactgatttggagaagagccttcttatcagataccaaattcccctctctgctgaccagctatttactcagtccgttttagacaaatcattgaccaagagcaactatcagtcacggttacatgaccttctttatattgaggagatagcccagtataaagaaatcagcaagttcaaccttaaagtgcaattgcagattctggcaagcttcatgctcactggtgtttctggaggtgcaaagtatgctcagaatggacaactttttggtcgctttaagcttactgaaacactttctgaagatactttggctggacgactggtgatgaccaaagtcaatgctgtttatttattaccagtccctaaacagaagttagtacagacccagggaaccaaagagaaggtttatgaagctactattgaagaaaaaacaaaggaatatatatttttaaggctatctagggaatgctgtgaagaacttaatcttcggcctgactgtgacacacaggttgaacttcagtttcaattaaatcgattacccctctgtgaaatgcactatgcactagacaggatcaaggacaatggggttttgtttccagacatcagtatgactcccaccataccatggagtcctaacagacaatgggatgaacagttggatcctcgactaaatgcaaaacagaaagaggctgttctggccattaccactccacttgcaatccagctgccgcctgtgcttatcatcggaccctatgggacaggcaaaacgttcactctagctcaggctgtcaaacatattctgcagcaacaggagactaggattctcatttgcacccattctaatagtgctgctgatctctacataaaggattatttacatccatatgtagaagcaggcaatccccaggcaagacctctcagggtatatttcagaaatcgctgggtaaagactgtccacccagttgtgcatcagtactgtttgatctcaagcgcacattccacctttcagatgccccagaaagaagatattcttaaacatcgagtggtggttgttaccttgaatacttcccagtacctctgtcagttggaccttgaacctgggttttttacacacattctattagatgaagctgcccaggccatggagtgtgaaaccattatgcctctagcattagcaactcaaaacactcggattgtcttggctggtgatcacatgcagctcagtccttttgtttacagcgagtttgccagggagagaaaccttcacgtttcattacttgaccgactctatgagcattaccctgctgagttcccatgtaggattctcctgtgtgagaactaccgctcccatgaagctatcatcaattatacctctgagcttttctatgagggcaaactgatggccagtgggaagcagccagcacacaaagatttctacccactaactttctttacagcacgaggagaagatgtacaagaaaaaaatagcacagctttttataataatgcagaggtgtttgaagtggtggaacgtgtagaagagttaagaaggaagtggccagtagcgtgggggaagttagatgatggcagtattggtgtggtgactccatatgctgatcaagtgtttagaatacgtgctgaacttcgaaaaaagagattatctgatgttaatgtagaaagggtgctaaatgttcaaggaaagcaattcagagttttgtttcttagcacagtacgtacaagacatacttgtaaacataaacagacaccaattaaaaagaaagagcaacttctggaagattccacagaggacttagattatggttttttatctaactacaagcttctcaatactgccatcacaagagcacaatccctggttgctgtggtgggtgatcccattgctctgtgctctattggaagatgcaggaaattttgggaacggtttattgccctgtgtcatgaaaacagtagcctacatggaatcacttttgaacagatcaaagcccagttagaggctttagaactaaagaagacatatgtgttgaatccgctggcacctgaatttatcccccgggctctaagactgcagcattcaggaagtaccaacaaacagcagcaatcaccacccaaggggaaaagtcttcatcatacccagaatgatcacttccagaatgatggaattgttcagcccaatccttctgtacttattggcaatcctattagagcatatactcctccaccccctcttggacctcacccaaatttgggaaaatctccaagccctgttcaaagaatagatcctcacactgggacaagtattctttatgtacctgctgtctatggagggaatgtagttatgtcggtgcctttacctgtaccatggacaggataccagggtaggtttgcagttgatcctcgaattattacacatcaggcagcaatggcctataacatgaacctattacagacacatggacgaggatctcctattccttatggccttggacatcacccacctgtcaccataggccagccacaaaatcagcatcaggagaaggatcaacatgagcaaaatcgaaatggtaaaagtgatacaaataattccggacctgaaattaataagattcgaacaccagagaaaaagccaacagaaccaaaacaggttgatttggaatcaaatccacagaacagaagtcctgaatcacgtcctagtgttgtttatcccagtaccaaatttcctcgcaaagataatctcaacccaagacacataaatcttccccttcctgctccccacgcacagtatgcaatccctaatcgccactttcatccccttccccagctaccaagaccaccctttccaattccacagcagcacaccttgttaaatcagcagcagaataatttgcctgaacaaccaaatcagataccacctcagccaaatcaggtagtccagcagcaaagtcagttgaatcagcagcctcagcagccacctcctcagctttctcctgcatatcaggcgggacccaacaatgctttttttaatagtgcagttgctcatcggccacagtctcctcctgcagaagctgtaattccggagcagcagccccctcccatgctgcaagaaggccacagtcctctgagagccattgcacaacccggccccattcttccttcacatctgaatagcttcattgatgagaacccctcgggattacctataggggaggctttagatcgtatacatgggagtgtcgctctggaaacattaaggcagcagcaggcacggttccagcagtggagcgagcatcatgcctttctcagtcagggcagcgttccatacccacaccatcaccatcctcacctccagcatcttcctcagccgcccctgggattacatcagccgccagtgcgggcagactggaagctcaccagcagtgccgaagatgaagtggagaccacatactcaaggtttcaagacttaatcagagaactgtctcatcgtgatcaaagtgaaacacgggaactagctgaaatgccaccacctcaatcaagacttttgcaatatagacaagtacagagtagaagcccaccagcagtcccatctcccccatccagtacagaccacagtagccacttttctaactttaatgataacagcagagacattgaagtagccagcaacccagcatttccacagcgcctcccaccccagatattcaactcacctttctcgttgccatctgaacaccttgcccctcctcccttgaaatacctggcacctgatggagcatggacttttgctaacttgcaacagaatcacctaatggggccaggttttccctatggcctacctccattgcctcacaggccaccgcagaacccttttgtacaaatacagaatcatcaacatgctattggtcaagagccatttcacccattgtcatctcgaacagtatcttcttcttcgctccctagcttagaagaggtaaatgtcttcttattttccttttgttattagctgattgtgaaaaatatcagtatttattgatttgataataggaaggcacagatcttattgaatttaacagcgtattaaagataatcctttcttgggaattatt

SEQ ID NO: 358147 - DNA, 1925 bp, Homo sapiens
tggggacgttgacaagtggatccaagatggcgtagaaagtaatgacaggatttggatgaagtaatggatcactaatgaactacagtgctggtgagatgtgtaagaaattataaagagctctgatgggctatttgggtgatacccagtgcagtgaactgcaggatttttgtccctgagtcatggaagacagaagagctgaaaagtcatgtgaacaagcatgtgaatcacttaagaggcaggactatgaaatggccctcaagcactgcacagaggcccttctttctcttggccagtactccatggcagacttcacagggccttgtccattggaaatagaacgcatcacaatcgagagtcttctctacagaattgcctcatttttgcaactgaaaaattatgtgcaagctgatgaagattgtagacatgtgctgggagaaggactggccaagggagaagatgcctttcgggcagtgctttgctgcatgcagctgaaagggaagctccaacctgtatccaccattcttgccaagtcactcacaggagagtccctgaatgggatggtaacaaaggatttgacaagactaaaaacacttctctcagaaacagagatttttagaacaaggaatctgtaggtatggtgcccagtgtacttcagcacattcccaggaagaactagcagaatggcagaaaagatatgcttcacggctgataaaattgaaacagcaaaatgagaataaacagctctcaggcagttacatggaaaccttgatagaaaagtggatgaattcattgtctcctgagaaagtgcttagtgaatgtatagaaggagtaaaggtagagcacaatcctgacctgtcagttactgtcagcaccaaaaaatcccaccagacatggacctttgctctcacttgtaagcctgcaagaatgctgtatcgtgtagcattgctttatgatgctcatcgtcctcattttagtatcattgcaatatctgccggagatagtactacccaggtatcacaagaagtcccagaaaactgtcaagaatggataggaggaaagatggcccaaaatggattagatcattacgtgtataaagtcgggatagcatttaacacagaaatatttggaacttttcgccaaaccatagttttcgactttggattggaaccagtactcatgcaaagagtaatgattgatgcagcttctacagaagatctcgaatacctgatgcatgcaaaacagcagctagtaaccacagctaaacgttgggattcttcctctaagactattatagattttgaacctaatgaaactactgatttggagaagagccttcttatcagataccaaattcccctctctgctgaccagctatttactcagtccgttttagacaaatcattgaccaagagcaactatcagtcacggttacatgaccttctttatattgaggagatagcccagtataaagaaatcagcaaagatgggattttgccatgttgcccagggaagatctggaactcctgggctcaagtgatccacccgctctggcctcccaaggtgctgggattacaggcatgagccaccgcccctggcccagtttgtgtgatctatctggagagctgtttggcagtttgtatccaggaccttaagtttgaatcttttggtgtggaaattccacatatgggggatcataagcaataatcagagtcaaagatgtctggacacatgtcttgcaaagagtagtgaagaataagttaattatgatatagctatatgattgaatgttatacaacttgaaattatgttcttgaagaatttttaatgcagtgatgatgctcatgatataatattagggaagaaaatatgctagttataataccttattgccattctaattttttatagatgcctatacacatacg

SEQ ID NO: 358148 - DNA, 411 bp, Homo sapiens
tatagatgctatgctatttcagtggttttaatggttcactgaaattcacgatactcgtgtgttatgttctatttattaacgagatgcatgtgtttaacataaatttttattttccatagacaatgggatgaacagttggatcctcgactaaatgcaaaacagaaagaggctgttctggccattaccactccacttgcaatccagctgccgcctgtgcttatcatcggaccctatgggacaggcaaaacgttcactctagctcaggctgtcaaacatattctgcagcaacaggagactaggtgagagggtgggaagcgtgctcatatttccctggtaggatactacctctgttcttgttttaaatacacaatgagggctagcaagacagttttcatgcagctcttaaacatg

SEQ ID NO: 358149 - DNA, 248 bp, Homo sapiens
aaggtggagagcaactgaatttgaatcttctgcagttaaaaaaggcttcttctttttttctaggttgatttggaatcaaatccacagaacagaagtcctgaatcacgtcctagtgttgtttatcccagtaccaaatttcctcgcaaagataatctcaacccaagacacataaatcttccccttcctgctccccacgcacagtatgcaatccctaatcgccactttcatccccttccccagctaccaag

SEQ ID NO: 358150 - DNA, 351 bp, Homo sapiens
tgagagcctcacaaatatgttttccatatttaattatagtttaacgtagaaaaaaacaaaaatcattggcaacatattaatgttattaaaaatttctgagtattccaacttcacctttgttttaatattgaaaatgttcaagtttagttcagcatcaacgttattcttgtttaaaaaattctttcatttggaaaattgcagacagcaactagtaacgccctctctggatatcacgtggaagacttagatgagggtaagtgccaaatgctgtgtaacttctggtagctgtgaataagggctttgcttttattaattattgggagaaaatttactgagttacagtacatataa

SEQ ID NO: 358151 - DNA, 362 bp, Homo sapiens
aattattttaacttccttgtagcctgcaagaatgctgtatcgtgtagcattgctttatgatgctcatcgtcctcattttagtatcattgcaatatctgccggagatagtactacccaggtatcacaagaagtcccagaaaactgtcaagaatggataggaggaaagatggcccaaaatggattagatcattacgtgtataaagtcgggatagcatttaacacagaaatatttggaacttttcgccaaaccatagttttcgactttggattggaaccagtactcatgcaaagagtaatgattgatgcagcttctacagaaggtaatatttagacttttttcccccgatacaatgtgttaaaaa

SEQ ID NO: 358152 - DNA, 7265 bp, Homo sapiens
tggggacgttgacaagtggatccaagatggcgtagaaagtaatgacaggatttggatgaagtaatggatcactaatgaactacagtgctggtgagatgtgtaagaaattataaagagctctgatgggctatttgggtgatacccagtgcagtgaactgcaggatttttgtccctgagtcatggaagacagaagagctgaaaagtcatgtgaacaagcatgtgaatcacttaagaggcaggactatgaaatggccctcaagcactgcacagaggcccttctttctcttggccagtactccatggcagacttcacagggccttgtccattggaaatagaacgcatcacaatcgagagtcttctctacagaattgcctcatttttgcaactgaaaaattatgtgcaagctgatgaagattgtagacatgtgctgggagaaggactggccaagggagaagatgcctttcgggcagtgctttgctgcatgcagctgaaagggaagctccaacctgtatccaccattcttgccaagtcactcacaggagagtccctgaatgggatggtaacaaaggatttgacaagactaaaaacacttctctcagaaacagagacagcaactagtaacgccctctctggatatcacgtggaagacttagatgaggggtcttgtaatggttggcatttccgcccaccacctaggggaatcacaagcagcgaggaatatactttgtgtaaaagatttttagaacaaggaatctgtaggtatggtgcccagtgtacttcagcacattcccaggaagaactagcagaatggcagaaaagatatgcttcacggctgataaaattgaaacagcaaaatgagaataaacagctctcaggcagttacatggaaaccttgatagaaaagtggatgaattcattgtctcctgagaaagtgcttagtgaatgtatagaaggagtaaaggtagagcacaatcctgacctgtcagttactgtcagcaccaaaaaatcccaccagacatggacctttgctctcacttgtaagcctgcaagaatgctgtatcgtgtagcattgctttatgatgctcatcgtcctcattttagtatcattgcaatatctgccggagatagtactacccaggtatcacaagaagtcccagaaaactgtcaagaatggataggaggaaagatggcccaaaatggattagatcattacgtgtataaagtcgggatagcatttaacacagaaatatttggaacttttcgccaaaccatagttttcgactttggattggaaccagtactcatgcaaagagtaatgattgatgcagcttctacagaagatctcgaatacctgatgcatgcaaaacagcagctagtaaccacagctaaacgttgggattcttcctctaagactattatagattttgaacctaatgaaactactgatttggagaagagccttcttatcagataccaaattcccctctctgctgaccagctatttactcagtccgttttagacaaatcattgaccaagagcaactatcagtcacggttacatgaccttctttatattgaggagatagcccagtataaagaaatcagcaagttcaaccttaaagtgcaattgcagattctggcaagcttcatgctcactggtgtttctggaggtgcaaagtatgctcagaatggacaactttttggtcgctttaagcttactgaaacactttctgaagatactttggctggacgactggtgatgaccaaagtcaatgctgtttatttattaccagtccctaaacagaagttagtacagacccagggaaccaaagagaaggtttatgaagctactattgaagaaaaaacaaaggaatatatatttttaaggctatctagggaatgctgtgaagaacttaatcttcggcctgactgtgacacacaggttgaacttcagtttcaattaaatcgattacccctctgtgaaatgcactatgcactagacaggatcaaggacaatggggttttgtttccagacatcagtatgactcccaccataccatggagtcctaacagacaatgggatgaacagttggatcctcgactaaatgcaaaacagaaagaggctgttctggccattaccactccacttgcaatccagctgccgcctgtgcttatcatcggaccctatgggacaggcaaaacgttcactctagctcaggctgtcaaacatattctgcagcaacaggagactaggattctcatttgcacccattctaatagtgctgctgatctctacataaaggattatttacatccatatgtagaagcaggcaatccccaggcaagacctctcagggtatatttcagaaatcgctgggtaaagactgtccacccagttgtgcatcagtactgtttgatctcaagcgcacattccacctttcagatgccccagaaagaagatattcttaaacatcgagtggtggttgttaccttgaatacttcccagtacctctgtcagttggaccttgaacctgggttttttacacacattctattagatgaagctgcccaggccatggagtgtgaaaccattatgcctctagcattagcaactcaaaacactcggattgtcttggctggtgatcacatgcagctcagtccttttgtttacagcgagtttgccagggagagaaaccttcacgtttcattacttgaccgactctatgagcattaccctgctgagttcccatgtaggattctcctgtgtgagaactaccgctcccatgaagctatcatcaattatacctctgagcttttctatgagggcaaactgatggccagtgggaagcagccagcacacaaagatttctacccactaactttctttacagcacgaggagaagatgtacaagaaaaaaatagcacagctttttataataatgcagaggtgtttgaagtggtggaacgtgtagaagagttaagaaggaagtggccagtagcgtgggggaagttagatgatggcagtattggtgtggtgactccatatgctgatcaagtgtttagaatacgtgctgaacttcgaaaaaagagattatctgatgttaatgtagaaagggtgctaaatgttcaaggaaagcaattcagagttttgtttcttagcacagtacgtacaagacatacttgtaaacataaacagacaccaattaaaaagaaagagcaacttctggaagattccacagaggacttagattatggttttttatctaactacaagcttctcaatactgccatcacaagagcacaatccctggttgctgtggtgggtgatcccattgctctgtgctctattggaagatgcaggaaattttgggaacggtttattgccctgtgtcatgaaaacagtagcctacatggaatcacttttgaacagatcaaagcccagttagaggctttagaactaaagaagacatatgtgttgaatccgctggcacctgaatttatcccccgggctctaagactgcagcattcaggaagtaccaacaaacagcagcaatcaccacccaaggggaaaagtcttcatcatacccagaatgatcacttccagaatgatggaattgttcagcccaatccttctgtacttattggcaatcctattagagcatatactcctccaccccctcttggacctcacccaaatttgggaaaatctccaagccctgttcaaagaatagatcctcacactgggacaagtattctttatgtacctgctgtctatggagggaatgtagttatgtcggtgcctttacctgtaccatggacaggataccagggtaggtttgcagttgatcctcgaattattacacatcaggcagcaatggcctataacatgaacctattacagacacatggacgaggatctcctattccttatggccttggacatcacccacctgtcaccataggccagccacaaaatcagcatcaggagaaggatcaacatgagcaaaatcgaaatggtaaaagtgatacaaataattccggacctgaaattaataagattcgaacaccagagaaaaagccaacagaaccaaaacaggttgatttggaatcaaatccacagaacagaagtcctgaatcacgtcctagtgttgtttatcccagtaccaaatttcctcgcaaagataatctcaacccaagacacataaatcttccccttcctgctccccacgcacagtatgcaatccctaatcgccactttcatccccttccccagctaccaagaccaccctttccaattccacagcagcacaccttgttaaatcagcagcagaataatttgcctgaacaaccaaatcagataccacctcagccaaatcaggtagtccagcagcaaagtcagttgaatcagcagcctcagcagccacctcctcagctttctcctgcatatcaggcgggacccaacaatgctttttttaatagtgcagttgctcatcggccacagtctcctcctgcagaagctgtaattccggagcagcagccccctcccatgctgcaagaaggccacagtcctctgagagccattgcacaacccggccccattcttccttcacatctgaatagcttcattgatgagaacccctcgggattacctataggggaggctttagatcgtatacatgggagtgtcgctctggaaacattaaggcagcagcaggcacggttccagcagtggagcgagcatcatgcctttctcagtcagggcagcgttccatacccacaccatcaccatcctcacctccagcatcttcctcagccgcccctgggattacatcagccgccagtgcgggcagactggaagctcaccagcagtgccgaagatgaagtggagaccacatactcaaggtttcaagacttaatcagagaactgtctcatcgtgatcaaagtgaaacacgggaactagctgaaatgccaccacctcaatcaagacttttgcaatatagacaagtacagagtagaagcccaccagcagtcccatctcccccatccagtacagaccacagtagccacttttctaactttaatgataacagcagagacattgaagtagccagcaacccagcatttccacagcgcctcccaccccagatattcaactcacctttctcgttgccatctgaacaccttgcccctcctcccttgaaatacctggcacctgatggagcatggacttttgctaacttgcaacagaatcacctaatggggccaggttttccctatggcctacctccattgcctcacaggccaccgcagaacccttttgtacaaatacagaatcatcaacatgctattggtcaagagccatttcacccattgtcatctcgaacagtatcttcttcttcgctccctagcttagaagagtatgagcccagaggacctggtcggcccttgtaccaaagaagaatctcatctagctcagttcaaccttgttctgaagaagtaagcactcctcaagacagtctggctcagtgtaaagagcttcaggaccacagtaaccaatcttctttcaacttttcatccccggagtcctgggtaaacaccacctcatctactccttatcagaacattccgtgcaatggatccagcaggacagctcagcccagagagttgatagcgccacccaagactgtcaaaccccctgaggatcaactgaagtcggagaacctcgaggtgtccagttccttcaactacagtgtgctgcagcatcttggccagtttccaccccttatgcctaacaagcagatcgcggagtcggccaatagcagtagcccccagagctctgcggggggcaagcccgccatgtcctatgccagcgctctgcgggcccctccaaagcccaggccccctcctgagcaggccaagaagagtagcgaccctctgtctctcttccaggaactgagcctagggagctcatctggcagcaatggcttttactcatattttaaataatcactttttttttccctcaagggagaatgttttaatttctgtttgtatcagtagaattaaggtagttggacttcatctatagatgcacagttccctttgttttaatattaaatatgttctcacttaattgctttgctgctagacttgcaactaatttttttaaagtatattccattattttgcatttttgatgtgtcaaaactttgacagcttttatgtagaataaaaaaatttttaaatttgtgtattgttacatatgtttgcatcaagctagcagccaagaggttaattgtgcaactataaaaaaaaaaaaaaaaagaaaagttggtctaaaatgtatttaaaaagaaaaaaaaattggtaagtagcatttacatttattcaataatattaccacatgcggggtttctgtaccagaaatggccagttgatgtacaaatgtatgttatttttgcttaaattcatttaaattttttttaaaataaaggggcagcatcttctaaataagttttatcagctttttttttttttttggtgacacgatgctgcattctaaaacttttatagttttagactatgtatgatgtgttgttgtaatctccatccaccataggatagagttaaaggcattctttgcaggcatattttgtatgccactgttttttgaaatgtgaaaaaaacgttggcatacttagttattttttggacaagctacacttcaagcttgtttttaatgttaatttgatagtgtgtgtttttttttttaaacaaatcaagaagctgaaaaatttttaggattgttggtgcttagtagacttgataactattttaaaaatgcgtgaatttagtaaaattctttttttctcactatgcatgtgtaaatgtttgtaacctggcttccctcttctccagtggtataaagaattgtgccgctttaaggtttgggtttttttctctccagtaaaaattttggtaccttatttgatgtttacattaaaatgtgacattatacgtggcaattcaaatattttgctagctgtcttgtttgaggaacaccattaaagaagaaatataatgtttgtcaaaaatgtatcaaaattcatcagaatctggggcagaaaactacccttgtttttcatgtctttcaattcttctaaaataccccttattgaacttgtacacaatataaaatttaaatagccatcttaaatattctaccatctaaaaattgctttgaatgaattttggtaaaatcca

SEQ ID NO: 358153 - DNA, 7115 bp, Homo sapiens
tggggacgttgacaagtggatccaagatggcgtagaaagtaatgacaggatttggatgaagtaatggatcactaatgaactacagtgctggtgagatgtgtaagaaattataaagagctctgatgggctatttgggtgatacccagtgcagtgaactgcaggatttttgtccctgagtcatggaagacagaagagctgaaaagtcatgtgaacaagcatgtgaatcacttaagaggcaggactatgaaatggccctcaagcactgcacagaggcccttctttctcttggccagtactccatggcagacttcacagggccttgtccattggaaatagaacgcatcacaatcgagagtcttctctacagaattgcctcatttttgcaactgaaaaattatgtgcaagctgatgaagattgtagacatgtgctgggagaaggactggccaagggagaagatgcctttcgggcagtgctttgctgcatgcagctgaaagggaagctccaacctgtatccaccattcttgccaagtcactcacaggagagtccctgaatgggatggtaacaaaggatttgacaagactaaaaacacttctctcagaaacagagacagcaactagtaacgccctctctggatatcacgtggaagacttagatgaggggtcttgtaatggttggcatttccgcccaccacctaggggaatcacaagcagcgaggaatatactttgtgtaaaagatttttagaacaaggaatctgtaggtatggtgcccagtgtacttcagcacattcccaggaagaactagcagaatggcagaaaagatatgcttcacggctgataaaattgaaacagcaaaatgagaataaacagctctcaggcagttacatggaaaccttgatagaaaagtggatgaattcattgtctcctgagaaagtgcttagtgaatgtatagaaggagtaaaggtagagcacaatcctgacctgtcagttactgtcagcaccaaaaaatcccaccagacatggacctttgctctcacttgtaagcctgcaagaatgctgtatcgtgtagcattgctttatgatgctcatcgtcctcattttagtatcattgcaatatctgccggagatagtactacccaggtatcacaagaagtcccagaaaactgtcaagaatggataggaggaaagatggcccaaaatggattagatcattacgtgtataaagtcgggatagcatttaacacagaaatatttggaacttttcgccaaaccatagttttcgactttggattggaaccagtactcatgcaaagagtaatgattgatgcagcttctacagaagatctcgaatacctgatgcatgcaaaacagcagctagtaaccacagctaaacgttgggattcttcctctaagactattatagattttgaacctaatgaaactactgatttggagaagagccttcttatcagataccaaattcccctctctgctgaccagctatttactcagtccgttttagacaaatcattgaccaagagcaactatcagtcacggttacatgaccttctttatattgaggagatagcccagtataaagaaatcagcaagttcaaccttaaagtgcaattgcagattctggcaagcttcatgctcactggtgtttctggaggtgcaaagtatgctcagaatggacaactttttggtcgctttaagcttactgaaacactttctgaagatactttggctggacgactggtgatgaccaaagtcaatgctgtttatttattaccagtccctaaacagaagttagtacagacccagggaaccaaagagaaggtttatgaagctactattgaagaaaaaacaaaggaatatatatttttaaggctatctagggaatgctgtgaagaacttaatcttcggcctgactgtgacacacaggttgaacttcagtttcaattaaatcgattacccctctgtgaaatgcactatgcactagacaggatcaaggacaatggggttttgtttccagacatcagtatgactcccaccataccatggagtcctaacagacaatgggatgaacagttggatcctcgactaaatgcaaaacagaaagaggctgttctggccattaccactccacttgcaatccagctgccgcctgtgcttatcatcggaccctatgggacaggcaaaacgttcactctagctcaggctgtcaaacatattctgcagcaacaggagactaggattctcatttgcacccattctaatagtgctgctgatctctacataaaggattatttacatccatatgtagaagcaggcaatccccaggcaagacctctcagggtatatttcagaaatcgctgggtaaagactgtccacccagttgtgcatcagtactgtttgatctcaagcgcacattccacctttcagatgccccagaaagaagatattcttaaacatcgagtggtggttgttaccttgaatacttcccagtacctctgtcagttggaccttgaacctgggttttttacacacattctattagatgaagctgcccaggccatggagtgtgaaaccattatgcctctagcattagcaactcaaaacactcggattgtcttggctggtgatcacatgcagctcagtccttttgtttacagcgagtttgccagggagagaaaccttcacgtttcattacttgaccgactctatgagcattaccctgctgagttcccatgtaggattctcctgtgtgagaactaccgctcccatgaagctatcatcaattatacctctgagcttttctatgagggcaaactgatggccagtgggaagcagccagcacacaaagatttctacccactaactttctttacagcacgaggagaagatgtacaagaaaaaaatagcacagctttttataataatgcagaggtgtttgaagtggtggaacgtgtagaagagttaagaaggaagtggccagtagcgtgggggaagttagatgatggcagtattggtgtggtgactccatatgctgatcaagtgtttagaatacgtgctgaacttcgaaaaaagagattatctgatgttaatgtagaaagggtgctaaatgttcaaggaaagcaattcagagttttgtttcttagcacagtacgtacaagacatacttgtaaacataaacagacaccaattaaaaagaaagagcaacttctggaagattccacagaggacttagattatggttttttatctaactacaagcttctcaatactgccatcacaagagcacaatccctggttgctgtggtgggtgatcccattgctctgtgctctattggaagatgcaggaaattttgggaacggtttattgccctgtgtcatgaaaacagtagcctacatggaatcacttttgaacagatcaaagcccagttagaggctttagaactaaagaagacatatgtgttgaatccgctggcacctgaatttatcccccgggctctaagactgcagcattcaggaagtaccaacaaacagcagcaatcaccacccaaggggaaaagtcttcatcatacccagaatgatcacttccagaatgatggaattgttcagcccaatccttctgtacttattggcaatcctattagagcatatactcctccaccccctcttggacctcacccaaatttgggaaaatctccaagccctgttcaaagaatagatcctcacactgggacaagtattctttatgtacctgctgtctatggagggaatgtagttatgtcggtgcctttacctgtaccatggacaggataccagggtaggtttgcagttgatcctcgaattattacacatcaggcagcaatggcctataacatgaacctattacagacacatggacgaggatctcctattccttatggccttggacatcacccacctgtcaccataggccagccacaaaatcagcatcaggagaaggatcaacatgagcaaaatcgaaatggtaaaagtgatacaaataattccggacctgaaattaataagattcgaacaccagagaaaaagccaacagaaccaaaacaggttgatttggaatcaaatccacagaacagaagtcctgaatcacgtcctagtgttgtttatcccagtaccaaatttcctcgcaaagataatctcaacccaagacacataaatcttccccttcctgctccccacgcacagtatgcaatccctaatcgccactttcatccccttccccagctaccaagaccaccctttccaattccacagcagcacaccttgttaaatcagcagcagaataatttgcctgaacaaccaaatcagataccacctcagccaaatcaggtagtccagcagcaaagtcagttgaatcagcagcctcagcagccacctcctcagctttctcctgcatatcaggcgggacccaacaatgctttttttaatagtgcagttgctcatcggccacagtctcctcctgcagaagctgtaattccggagcagcagccccctcccatgctgcaagaaggccacagtcctctgagagccattgcacaacccggccccattcttccttcacatctgaatagcttcattgatgagaacccctcgggattacctataggggaggctttagatcgtatacatgggagtgtcgctctggaaacattaaggcagcagcaggcacggttccagcagtggagcgagcatcatgcctttctcagtcagggcagcgttccatacccacaccatcaccatcctcacctccagcatcttcctcagccgcccctgggattacatcagccgccagtgcgggcagactggaagctcaccagcagtgccgaagatgaagtggagaccacatactcaaggtttcaagacttaatcagagaactgtctcatcgtgatcaaagtgaaacacgggaactagctgaaatgccaccacctcaatcaagacttttgcaatatagacaagtacagagtagaagcccaccagcagtcccatctcccccatccagtacagaccacagtagccacttttctaactttaatgataacagcagagacattgaagtagccagcaacccagcatttccacagcgcctcccaccccagatattcaactcacctttctcgttgccatctgaacaccttgcccctcctcccttgaaatacctggcacctgatggagcatggacttttgctaacttgcaacagaatcacctaatggggccaggttttccctatggcctacctccattgcctcacaggccaccgcagaacccttttgtacaaatacagaatcatcaacatgctattggtcaagagccatttcacccattgtcatctcgaacagtatcttcttcttcgctccctagcttagaagagtatgagcccagaggacctggtcggcccttgtaccaaagaagaatctcatctagctcagttcaaccttgttctgaagaagtaagcactcctcaagacagtctggctcagtgtaaagagcttcaggaccacagtaaccaatcttctttcaacttttcatccccggagtcctgggtaaacaccacctcatctactccttatcagaacattccgtgcaatggatccagcaggacagctcagcccagagagttgatagcgccacccaagactgtcaaaccccctgaggatcaactgaagtcggagaacctcgaggtgtccagttccttcaactacagtgtgctgcagcatcttggccagtttccaccccttatgcctaacaagcagatcgcggagtcggccaatagcagtagcccccagagctctgcggggggcaagcccgccatgtcctatgccagcgctctgcgggcccctccaaagcccaggccccctcctgagcaggccaagaagagtagcgaccctctgtctctcttccaggaactgagcctagggagctcatctggcagcaatggcttttactcatattttaaataatcactttttttttccctcaagggagaatgttttaatttctgtttgtatcagtagaattaaggtagttggacttcatctatagatgcacagttccctttgttttaatattaaatatgttctcacttaattgctttgctgctagacttgcaactaatttttttaaagtatattccattattttgcatttttgatgtgtcaaaactttgacagcttttatgtagaataaaaaaatttttaaatttgtgtattgttacatatgtttgcatcaagctagcagccaagaggttaattgtgcaactataaaaaaaaaaaaaaaaagaaaagttggtctaaaatgtatttaaaaagaaaaaaaaattggtaagtagcatttacatttattcaataatattaccacatgcggggtttctgtaccagaaatggccagttgatgtacaaatgtatgttatttttgcttaaattcatttaaattttttttaaaataaaggggcagcatcttctaaataagttttatcagctttttttttttttttggtgacacgatgctgcattctaaaacttttatagttttagactatgtatgatgtgttgttgtaatctccatccaccataggatagagttaaaggcattctttgcaggcatattttgtatgccactgttttttgaaatgtgaaaaaaacgttggcatacttagttattttttggacaagctacacttcaagcttgtttttaatgttaatttgatagtgtgtgtttttttttttaaacaaatcaagaagctgaaaaatttttaggattgttggtgcttagtagacttgataactattttaaaaatgcgtgaatttagtaaaattctttttttctcactatgcatgtgtaaatgtttgtaacctggcttccctcttctccagtggtataaagaattgtgccgctttaaggtttgggtttttttctctccagtaaaaattttggtaccttatttgatgtttacattaaaatgtgacattatacgtggcaattcaaatattttgctagctgtcttgtttttggggaaacccctttttatgaaagaaaatttttaggggttgtgctcaaaaatgggtttc

SEQ ID NO: 358154 - DNA, 7137 bp, Homo sapiens
tggggacgttgacaagtggatccaagatggcgtagaaagtaatgacaggatttggatgaagtaatggatcactaatgaactacagtgctggtgagatgtgtaagaaattataaagagctctgatgggctatttgggtgatacccagtgcagtgaactgcaggatttttgtccctgagtcatggaagacagaagagctgaaaagtcatgtgaacaagcatgtgaatcacttaagaggcaggactatgaaatggccctcaagcactgcacagaggcccttctttctcttggccagtactccatggcagacttcacagggccttgtccattggaaatagaacgcatcacaatcgagagtcttctctacagaattgcctcatttttgcaactgaaaaattatgtgcaagctgatgaagattgtagacatgtgctgggagaaggactggccaagggagaagatgcctttcgggcagtgctttgctgcatgcagctgaaagggaagctccaacctgtatccaccattcttgccaagtcactcacaggagagtccctgaatgggatggtaacaaaggatttgacaagactaaaaacacttctctcagaaacagagatttttagaacaaggaatctgtaggtatggtgcccagtgtacttcagcacattcccaggaagaactagcagaatggcagaaaagatatgcttcacggctgataaaattgaaacagcaaaatgagaataaacagctctcaggcagttacatggaaaccttgatagaaaagtggatgaattcattgtctcctgagaaagtgcttagtgaatgtatagaaggagtaaaggtagagcacaatcctgacctgtcagttactgtcagcaccaaaaaatcccaccagacatggacctttgctctcacttgtaagcctgcaagaatgctgtatcgtgtagcattgctttatgatgctcatcgtcctcattttagtatcattgcaatatctgccggagatagtactacccaggtatcacaagaagtcccagaaaactgtcaagaatggataggaggaaagatggcccaaaatggattagatcattacgtgtataaagtcgggatagcatttaacacagaaatatttggaacttttcgccaaaccatagttttcgactttggattggaaccagtactcatgcaaagagtaatgattgatgcagcttctacagaagatctcgaatacctgatgcatgcaaaacagcagctagtaaccacagctaaacgttgggattcttcctctaagactattatagattttgaacctaatgaaactactgatttggagaagagccttcttatcagataccaaattcccctctctgctgaccagctatttactcagtccgttttagacaaatcattgaccaagagcaactatcagtcacggttacatgaccttctttatattgaggagatagcccagtataaagaaatcagcaagttcaaccttaaagtgcaattgcagattctggcaagcttcatgctcactggtgtttctggaggtgcaaagtatgctcagaatggacaactttttggtcgctttaagcttactgaaacactttctgaagatactttggctggacgactggtgatgaccaaagtcaatgctgtttatttattaccagtccctaaacagaagttagtacagacccagggaaccaaagagaaggtttatgaagctactattgaagaaaaaacaaaggaatatatatttttaaggctatctagggaatgctgtgaagaacttaatcttcggcctgactgtgacacacaggttgaacttcagtttcaattaaatcgattacccctctgtgaaatgcactatgcactagacaggatcaaggacaatggggttttgtttccagacatcagtatgactcccaccataccatggagtcctaacagacaatgggatgaacagttggatcctcgactaaatgcaaaacagaaagaggctgttctggccattaccactccacttgcaatccagctgccgcctgtgcttatcatcggaccctatgggacaggcaaaacgttcactctagctcaggctgtcaaacatattctgcagcaacaggagactaggattctcatttgcacccattctaatagtgctgctgatctctacataaaggattatttacatccatatgtagaagcaggcaatccccaggcaagacctctcagggtatatttcagaaatcgctgggtaaagactgtccacccagttgtgcatcagtactgtttgatctcaagcgcacattccacctttcagatgccccagaaagaagatattcttaaacatcgagtggtggttgttaccttgaatacttcccagtacctctgtcagttggaccttgaacctgggttttttacacacattctattagatgaagctgcccaggccatggagtgtgaaaccattatgcctctagcattagcaactcaaaacactcggattgtcttggctggtgatcacatgcagctcagtccttttgtttacagcgagtttgccagggagagaaaccttcacgtttcattacttgaccgactctatgagcattaccctgctgagttcccatgtaggattctcctgtgtgagaactaccgctcccatgaagctatcatcaattatacctctgagcttttctatgagggcaaactgatggccagtgggaagcagccagcacacaaagatttctacccactaactttctttacagcacgaggagaagatgtacaagaaaaaaatagcacagctttttataataatgcagaggtgtttgaagtggtggaacgtgtagaagagttaagaaggaagtggccagtagcgtgggggaagttagatgatggcagtattggtgtggtgactccatatgctgatcaagtgtttagaatacgtgctgaacttcgaaaaaagagattatctgatgttaatgtagaaagggtgctaaatgttcaaggaaagcaattcagagttttgtttcttagcacagtacgtacaagacatacttgtaaacataaacagacaccaattaaaaagaaagagcaacttctggaagattccacagaggacttagattatggttttttatctaactacaagcttctcaatactgccatcacaagagcacaatccctggttgctgtggtgggtgatcccattgctctgtgctctattggaagatgcaggaaattttgggaacggtttattgccctgtgtcatgaaaacagtagcctacatggaatcacttttgaacagatcaaagcccagttagaggctttagaactaaagaagacatatgtgttgaatccgctggcacctgaatttatcccccgggctctaagactgcagcattcaggaagtaccaacaaacagcagcaatcaccacccaaggggaaaagtcttcatcatacccagaatgatcacttccagaatgatggaattgttcagcccaatccttctgtacttattggcaatcctattagagcatatactcctccaccccctcttggacctcacccaaatttgggaaaatctccaagccctgttcaaagaatagatcctcacactgggacaagtattctttatgtacctgctgtctatggagggaatgtagttatgtcggtgcctttacctgtaccatggacaggataccagggtaggtttgcagttgatcctcgaattattacacatcaggcagcaatggcctataacatgaacctattacagacacatggacgaggatctcctattccttatggccttggacatcacccacctgtcaccataggccagccacaaaatcagcatcaggagaaggatcaacatgagcaaaatcgaaatggtaaaagtgatacaaataattccggacctgaaattaataagattcgaacaccagagaaaaagccaacagaaccaaaacaggttgatttggaatcaaatccacagaacagaagtcctgaatcacgtcctagtgttgtttatcccagtaccaaatttcctcgcaaagataatctcaacccaagacacataaatcttccccttcctgctccccacgcacagtatgcaatccctaatcgccactttcatccccttccccagctaccaagaccaccctttccaattccacagcagcacaccttgttaaatcagcagcagaataatttgcctgaacaaccaaatcagataccacctcagccaaatcaggtagtccagcagcaaagtcagttgaatcagcagcctcagcagccacctcctcagctttctcctgcatatcaggcgggacccaacaatgctttttttaatagtgcagttgctcatcggccacagtctcctcctgcagaagctgtaattccggagcagcagccccctcccatgctgcaagaaggccacagtcctctgagagccattgcacaacccggccccattcttccttcacatctgaatagcttcattgatgagaacccctcgggattacctataggggaggctttagatcgtatacatgggagtgtcgctctggaaacattaaggcagcagcaggcacggttccagcagtggagcgagcatcatgcctttctcagtcagggcagcgttccatacccacaccatcaccatcctcacctccagcatcttcctcagccgcccctgggattacatcagccgccagtgcgggcagactggaagctcaccagcagtgccgaagatgaagtggagaccacatactcaaggtttcaagacttaatcagagaactgtctcatcgtgatcaaagtgaaacacgggaactagctgaaatgccaccacctcaatcaagacttttgcaatatagacaagtacagagtagaagcccaccagcagtcccatctcccccatccagtacagaccacagtagccacttttctaactttaatgataacagcagagacattgaagtagccagcaacccagcatttccacagcgcctcccaccccagatattcaactcacctttctcgttgccatctgaacaccttgcccctcctcccttgaaatacctggcacctgatggagcatggacttttgctaacttgcaacagaatcacctaatggggccaggttttccctatggcctacctccattgcctcacaggccaccgcagaacccttttgtacaaatacagaatcatcaacatgctattggtcaagagccatttcacccattgtcatctcgaacagtatcttcttcttcgctccctagcttagaagagtatgagcccagaggacctggtcggcccttgtaccaaagaagaatctcatctagctcagttcaaccttgttctgaagaagtaagcactcctcaagacagtctggctcagtgtaaagagcttcaggaccacagtaaccaatcttctttcaacttttcatccccggagtcctgggtaaacaccacctcatctactccttatcagaacattccgtgcaatggatccagcaggacagctcagcccagagagttgatagcgccacccaagactgtcaaaccccctgaggatcaactgaagtcggagaacctcgaggtgtccagttccttcaactacagtgtgctgcagcatcttggccagtttccaccccttatgcctaacaagcagatcgcggagtcggccaatagcagtagcccccagagctctgcggggggcaagcccgccatgtcctatgccagcgctctgcgggcccctccaaagcccaggccccctcctgagcaggccaagaagagtagcgaccctctgtctctcttccaggaactgagcctagggagctcatctggcagcaatggcttttactcatattttaaataatcactttttttttccctcaagggagaatgttttaatttctgtttgtatcagtagaattaaggtagttggacttcatctatagatgcacagttccctttgttttaatattaaatatgttctcacttaattgctttgctgctagacttgcaactaatttttttaaagtatattccattattttgcatttttgatgtgtcaaaactttgacagcttttatgtagaataaaaaaatttttaaatttgtgtattgttacatatgtttgcatcaagctagcagccaagaggttaattgtgcaactataaaaaaaaaaaaaaaaagaaaagttggtctaaaatgtatttaaaaagaaaaaaaaattggtaagtagcatttacatttattcaataatattaccacatgcggggtttctgtaccagaaatggccagttgatgtacaaatgtatgttatttttgcttaaattcatttaaattttttttaaaataaaggggcagcatcttctaaataagttttatcagctttttttttttttttggtgacacgatgctgcattctaaaacttttatagttttagactatgtatgatgtgttgttgtaatctccatccaccataggatagagttaaaggcattctttgcaggcatattttgtatgccactgttttttgaaatgtgaaaaaaacgttggcatacttagttattttttggacaagctacacttcaagcttgtttttaatgttaatttgatagtgtgtgtttttttttttaaacaaatcaagaagctgaaaaatttttaggattgttggtgcttagtagacttgataactattttaaaaatgcgtgaatttagtaaaattctttttttctcactatgcatgtgtaaatgtttgtaacctggcttccctcttctccagtggtataaagaattgtgccgctttaaggtttgggtttttttctctccagtaaaaattttggtaccttatttgatgtttacattaaaatgtgacattatacgtggcaattcaaatattttgctagctgtcttgtttgaggaacaccattaaagaagaaatataatgtttgtcaaaaatgtatcaaaattcatcagaatctggggcagaaaactacccttgtttttcatgtctttcaattcttctaaaataccccttattgaacttgtacacaatataaaatttaaatagccatcttaaatattctaccatctaaaaattgctttgaatgaattttggtaaaatcca

SEQ ID NO: 358155 - DNA, 1463 bp, Homo sapiens
gcggccgcctactactactactgctcgaattcaagcttctaacgatgtacggggacatgtcctatgccagcgctctgcgggcccctccaaagcccaggccccctcctgagcaggccaagaagagtagcgaccctctgtctctcttccaggaactgagcctagggagctcatctggcagcaatggcttttactcatattttaaataatcactttttttttccctcaagggagaatgttttaatttctgtttgtatcagtagaattaaggtagttggacttcatctatagatgcacagttccctttgttttaatattaaatatgttctcacttaattgctttgctgctagacttgcaactaatttttttaaagtatattccattattttgcatttttgatgtgtcaaaactttgacagcttttatgtagaataaaaaaatttttaaatttgtgtattgttacatatgtttgcatcaagctagcagccaagaggttaattgtgcaactataaaaaaaaaaaaaaaaagaaaagttggtctaaaatgtatttaaaaagaaaaaaaaattggtaagtagcatttacatttattcaataatattaccacatgcggggtttctgtaccagaaatggccagttgatgtacaaatgtatgttatttttgcttaaattcatttaaattttttttaaaataaaggggcagcatcttctaaataagttttatcagctttttttttttttttggtgacacgatgctgcattctaaaacttttatagttttagactatgtatgatgtgttgttgtaatctccatccaccataggatagagttaaaggcattctttgcaggcatattttgtatgccactgttttttgaaatgtgaaaaaaacgttggcatacttagttattttttggacaagctacacttcaagcttgtttttaatgttaatttgatagtgtgtgtttttttttttaaacaaatcaagaagctgaaaaatttttaggattgttggtgcttagtagacttgataactattttaaaaatgcgtgaatttagtaaaattctttttttctcactatgcatgtgtaaatgtttgtaacctggcttccctcttctccagtggtataaagaattgtgccgctttaaggtttgggtttttttctctccagtaaaaattttggtaccttatttgatgtttacattaaaatgtgacattatacgtggcaattcaaatattttgctagctgtcttgtttgaggaacaccattaaagaagaaatataatgtttgtcaaaaatgtatcaaaattcatcagaatctggggcagaaaactacccttgtttttcatgtctttcaattcttctaaaataccccttattgaacttgtacacaatataaaatttaaatagccatcttaaatattctaccatctaaaaattgctttgaatgaattttggtaaaatcca

SEQ ID NO: 358156 - DNA, 1314 bp, Homo sapiens
tggggacgttgacaagtggatccaagatggcgtagaaagtaatgacaggatttggatgaagtaatggatcactaatgaactacagtgctggtgagatgtgtaagaaattataaagagctctgatgggctatttgggtgatacccagtgcagtgaactgcaggatttttgtccctgagtcatggaagacagaagagctgaaaagtcatgtgaacaagcatgtgaatcacttaagaggcaggactatgaaatggccctcaagcactgcacagaggcccttctttctcttggccagtactccatggcagacttcacagggccttgtccattggaaatagaacgcatcacaatcgagagtcttctctacagaattgcctcatttttgcaactgaaaaattatgtgcaagctgatgaagattgtagacatgtgctgggagaaggactggccaagggagaagatgcctttcgggcagtgctttgctgcatgcagctgaaagggaagctccaacctgtatccaccattcttgccaagtcactcacaggagagtccctgaatgggatggtaacaaaggatttgacaagactaaaaacacttctctcagaaacagagatttttagaacaaggaatctgtaggtatggtgcccagtgtacttcagcacattcccaggaagaactagcagaatggcagaaaagatatgcttcacggctgataaaattgaaacagcaaaatgagaataaacagctctcaggcagttacatggaaaccttgatagaaaagtggatgaattcattgtctcctgagaaagtgcttagtgaatgtatagaaggagtaaaggtagagcacaatcctgacctgtcagttactgtcagcaccaaaaaatcccaccagacatggacctttgctctcacttgtaagcctgcaagaatgctgtatcgtgtagcattgctttatgatgctcatcgtcctcattttagtatcattgcaatatctgccggagatagtactacccaggtatcacaagaagtcccagaaaactgtcaagaatggataggaggaaagatggcccaaaatggattagatcattacgtgtataaagtcgggatagcatttaacacagaaatatttggaacttttcgccaaaccatagttttcgactttggattggaaccagtactcatgcaaagagtaatgattgatgcagcttctacagaaggtaatatttagacttttttcccccgatacaatgtgttaaaaagcaacattcaaagatatgtattggcccctgaatatattccatggataggaagagaatag

SEQ ID NO: 358157 - DNA, 340 bp, Homo sapiens
tctctctgggcagagatgccacttgcctcccccaccatgccatctctgaagaatattacagaccattttggagcatggtgaataagaaattttcaccttaggagttcagttgaatagtcatttttatatttgtgactgcaagtcactcttaggggctgtacttccttagtactggtagcattattatccaatggacttttatagctttcattaggttttctttttttttttgagacagagtctcgctctgtctgtcacccaggctggagtgcagtggcacaatctcggctctctacaagctccgcctcctgggttcacgccattctcctgcgtcagcctc

SEQ ID NO: 358158 - DNA, 4150 bp, Homo sapiens
  misc_feature (12)..(12): n is a, c, g, or t
  misc_feature (4102)..(4102): n is a, c, g, or t
tgggacgacctnggggatacaggcgcccgccacacgcccggctaatttttgtacttttagtagtgacagcctggccaacatggtgaagccccatctctactaaaaatacaaaaattagctgggtgtggtggctcatgcctctagtcccaggtactcaggaggccgaggacagagaattgcttaaacccaggaggcgggggttgcagagattgtgccactgcacttcagcctgggtgacaaagtgatactccatctcaaaaaaaaataaataaaagcattttaacagtattatgtttgtgctttcaatttcaattctaagttacagtttttactaagtttgagtaaatccttgagatggacatagtaggatgaattttgaggagtaatttagcaactatcaggtattttttgttaactgttatagaagaatatgtattcattatagaatataagaaaatatagataatccttagtttttatggtgctggcttgatctgaatttaaattatctcattcctcattttaagaagaggaagaagtgattgttaccaagtaactcacagctgtctgcttcacaatctagttgagattggtttttggtattttttttaagcctttggatttataatctgttatgtcaagaacttgtggcttccttaggtaaggattacttaaattggatcggagttgttttctgttttaggtagctgacttagaaacctactaactaataagtctttaaaatagagaaaaattaacactaaacaactaatccaagttttttcttaaatccaattctgatgtataaattttgaataatattaggttcttaactggaaattaccatttcagggtttgaaaaggactaggtgcgtataaaaagttcagcccctcatctgttagactgattattggtaagactctttcacttagtcagcaagctgtgcaaagcaaatactggtatgcatcctcagcaattgagatttgaaattgtaagcaaaagctattcttttgcattcctgtgtccaaatgtcatcctaaagaacttgctgacttatgccagtttgggttttagagtaagttaactgcttgttatatggcaggtgattggctgatgctgcatttctcctccccaggcagcaattcccccaggcaagcaaccgtcttcactagcttctccaaatcctcccatggcaaagggctctgaacagggcttccagtcacctccagcaagtagtagttcagtaaccattaacacagcaccctttcaagccatgcagacagtatttaacgttaatgcacctctgcctccacgaaaagaacaagaaataaaagaatccccttattcacctggctacaatcaaagttttaccacagcaagtacacaaacaccaccccagtgccaactgccatctatacatgtagaacaaactgtccattctcaagagactggtaagatctttgcatatgatatttggaagacttagagggacagccaattgaatggacagcaagtctaggaagtctgtagtgacactttagaagtattttcctgaccagtaagcattatttctttacatgttcctccagtgttgagaaaaacctaatgcccttttttgtgttaagtttacctattaattttaatttttgtagagatagaacttagatgacggatttaaccttgaagtaggtttgtatttttaaatctatttgctttgattaccacagacagtgattgaggtagatgggcactatctggctgcttatatgaaggttttgaaaccattctgttaatccttttaacaaatggttatctgtccttttctatcttataataaaagattgaagatatgacttagtatgctcattgtactgtttgcttagagatgggaggctattttgatttttcatgctgttctaaatcatgaaagaataggtaactttgtactcatttcttaatttaaatttaagaagcacttgtagattttttgtattggtatttcagatccctattgagttttttaactgaagtcggagcaaatgaattgagcattctgagtacttggctaatcaagtgatgaagaggtagtaatatgaattctgggacctaggcatagatgacctgattctgttctcccctctactgttgaaagacagggcaggtgacttacgtaagggatatttttgtcaggtgccttctcagatattaattagaatccattttcttttactccctcatctggagtatttagcctgctttttaaaaattgtcgtaaagtatacataacataaaaattaccattttaatcatttttaactatatagttctgtggcattaagtacaaccaaactgttgtgtaattattaccactgtccacctccagaacttttcatctccccccaactgaaactttgtaatcatttaatactaactcctcctcctcctctccccccagcccctggcaaccaccattctactttctgattctgaaaatgactgctctaggtacctcatataagtggtatacaatatttgtgcttttgaaactagcttattttacttggcatgtcttaagggttcattcatgttgtagcatgggtcaaaattttcttccttttttaggctgaataatattccattatatatatgaattacgtatttgagtcatgtagatgaattatatacatgaatatatgtatctcctatttatttttaaaggcagcaaattgtattaatgattttgatatatattggcttttaagtataaagactattaccatttaactcttggaccctaaaatcgtttttcttaagcagcaaattatcatcctgatggaactattcaagtaagcaatggtagccttgccttttacccagcacagacgaatgtgtttcccagacctactcagccatttgtcaatagccggggatctgttagaggatgtactcgtggtgggagattaataaccaattcctatcggtcccctggtggttataaaggttttgatacttatagaggactcccttcaatttccaatggaaattatagccagctgcagttccaagctagagagtattctggagcaccttattcccaaagggataatttccagcagtgttataagcgaggagggacatctggtggtccacgagcaaattcgagagcagggtggagtgattcttctcaggtgagcagcccagaaagagacaacgaaacctttaacagtggtgactctggacaaggagactcccgtagcatgacccctgtggatgtgccagtgacaaatccagcagccaccatactgccagtacacgtctaccctctgcctcagcagatgcgagttgccttctcagcagccagaacctctaatctggcccctggaactttagaccaacctattgtgtttgatcttcttctgaacaacttaggagaaacttttgatcttcagcttggtagatttaattgcccagtgaatggcacttacgttttcatttttcacatgctaaagctggcagtgaatgtgccactgtatgtcaacctcatgaagaatgaagaggtcttggtatcagcctatgccaatgatggtgctccagaccatgaaactgctagcaatcatgcaattcttcagctcttccagggagaccagatatggttacgtctgcacaggggagcaatttatggaagtagctggaaatattctacgttttcaggctatcttctttatcaagattgaaagtcagtacagtattgacaataaaaggatggtgttctaattagtgggattgaaggaaaagtagtctttgccctcatgactgattggtttaggaaaatgtttttgttcctagagggaggaggtccttacttttttgttttccttcctgaggtgaaaaatcaagctgaatgacaattagcactaatctggcactttataaattgtgatgtagcctcgctagtcaagctgtgaatgtatattgtttgcacttaatccttaactgtattaacgttcagcttactaaactgactgcctcaagtccaggcaagttacaatgccttgttgtgcctcaataaaaaagtggcctcgttggcctcagcggtggagntctcggccgctctctttcaccatgacataaattttatgcctttcttac

SEQ ID NO: 358159 - DNA, 4131 bp, Homo sapiens
  misc_feature (4083)..(4083): n is a, c, g, or t
cggactgggtatgcgatggagtctgcgtgatggaaatggtgatactctagactcgatcgtgtgaagcctgatatctagtaacataggtacgtcgtttaacagcgtgttgagtgtcatgcctctagtcccaggtactcaggaggccgaggacagagaattgcttaaacccaggaggcgggggttgcagagattgtgccactgcacttcagcctgggtgacaaagtgatactccatctcaaaaaaaaataaataaaagcattttaacagtattatgtttgtgctttcaatttcaattctaagttacagtttttactaagtttgagtaaatccttgagatggacatagtaggatgaattttgaggagtaatttagcaactatcaggtattttttgttaactgttatagaagaatatgtattcattatagaatataagaaaatatagataatccttagtttttatggtgctggcttgatctgaatttaaattatctcattcctcattttaagaagaggaagaagtgattgttaccaagtaactcacagctgtctgcttcacaatctagttgagattggtttttggtattttttttaagcctttggatttataatctgttatgtcaagaacttgtggcttccttaggtaaggattacttaaattggatcggagttgttttctgttttaggtagctgacttagaaacctactaactaataagtctttaaaatagagaaaaattaacactaaacaactaatccaagttttttcttaaatccaattctgatgtataaattttgaataatattaggttcttaactggaaattaccatttcagggtttgaaaaggactaggtgcgtataaaaagttcagcccctcatctgttagactgattattggtaagactctttcacttagtcagcaagctgtgcaaagcaaatactggtatgcatcctcagcaattgagatttgaaattgtaagcaaaagctattcttttgcattcctgtgtccaaatgtcatcctaaagaacttgctgacttatgccagtttgggttttagagtaagttaactgcttgttatatggcaggtgattggctgatgctgcatttctcctccccaggcagcaattcccccaggcaagcaaccgtcttcactagcttctccaaatcctcccatggcaaagggctctgaacagggcttccagtcacctccagcaagtagtagttcagtaaccattaacacagcaccctttcaagccatgcagacagtatttaacgttaatgcacctctgcctccacgaaaagaacaagaaataaaagaatccccttattcacctggctacaatcaaagttttaccacagcaagtacacaaacaccaccccagtgccaactgccatctatacatgtagaacaaactgtccattctcaagagactggtaagatctttgcatatgatatttggaagacttagagggacagccaattgaatggacagcaagtctaggaagtctgtagtgacactttagaagtattttcctgaccagtaagcattatttctttacatgttcctccagtgttgagaaaaacctaatgcccttttttgtgttaagtttacctattaattttaatttttgtagagatagaacttagatgacggatttaaccttgaagtaggtttgtatttttaaatctatttgctttgattaccacagacagtgattgaggtagatgggcactatctggctgcttatatgaaggttttgaaaccattctgttaatccttttaacaaatggttatctgtccttttctatcttataataaaagattgaagatatgacttagtatgctcattgtactgtttgcttagagatgggaggctattttgatttttcatgctgttctaaatcatgaaagaataggtaactttgtactcatttcttaatttaaatttaagaagcacttgtagattttttgtattggtatttcagatccctattgagttttttaactgaagtcggagcaaatgaattgagcattctgagtacttggctaatcaagtgatgaagaggtagtaatatgaattctgggacctaggcatagatgacctgattctgttctcccctctactgttgaaagacagggcaggtgacttacgtaagggatatttttgtcaggtgccttctcagatattaattagaatccattttcttttactccctcatctggagtatttagcctgctttttaaaaattgtcgtaaagtatacataacataaaaattaccattttaatcatttttaactatatagttctgtggcattaagtacaaccaaactgttgtgtaattattaccactgtccacctccagaacttttcatctccccccaactgaaactttgtaatcatttaatactaactcctcctcctcctctccccccagcccctggcaaccaccattctactttctgattctgaaaatgactgctctaggtacctcatataagtggtatacaatatttgtgcttttgaaactagcttattttacttggcatgtcttaagggttcattcatgttgtagcatgggtcaaaattttcttccttttttaggctgaataatattccattatatatatgaattacgtatttgagtcatgtagatgaattatatacatgaatatatgtatctcctatttatttttaaaggcagcaaattgtattaatgattttgatatatattggcttttaagtataaagactattaccatttaactcttggaccctaaaatcgtttttcttaagcagcaaattatcatcctgatggaactattcaagtaagcaatggtagccttgccttttacccagcacagacgaatgtgtttcccagacctactcagccatttgtcaatagccggggatctgttagaggatgtactcgtggtgggagattaataaccaattcctatcggtcccctggtggttataaaggttttgatacttatagaggactcccttcaatttccaatggaaattatagccagctgcagttccaagctagagagtattctggagcaccttattcccaaagggataatttccagcagtgttataagcgaggagggacatctggtggtccacgagcaaattcgagagcagggtggagtgattcttctcaggtgagcagcccagaaagagacaacgaaacctttaacagtggtgactctggacaaggagactcccgtagcatgacccctgtggatgtgccagtgacaaatccagcagccaccatactgccagtacacgtctaccctctgcctcagcagatgcgagttgccttctcagcagccagaacctctaatctggcccctggaactttagaccaacctattgtgtttgatcttcttctgaacaacttaggagaaacttttgatcttcagcttggtagatttaattgcccagtgaatggcacttacgttttcatttttcacatgctaaagctggcagtgaatgtgccactgtatgtcaacctcatgaagaatgaagaggtcttggtatcagcctatgccaatgatggtgctccagaccatgaaactgctagcaatcatgcaattcttcagctcttccagggagaccagatatggttacgtctgcacaggggagcaatttatggaagtagctggaaatattctacgttttcaggctatcttctttatcaagattgaaagtcagtacagtattgacaataaaaggatggtgttctaattagtgggattgaaggaaaagtagtctttgccctcatgactgattggtttaggaaaatgtttttgttcctagagggaggaggtccttacttttttgttttccttcctgaggtgaaaaatcaagctgaatgacaattagcactaatctggcactttataaattgtgatgtagcctcgctagtcaagctgtgaatgtatattgtttgcacttaatccttaactgtattaacgttcagcttactaaactgactgcctcaagtccaggcaagttacaatgccttgttgtgcctcaataaaaaagtggcctcgttggcctcagcggtggagntctcggccgctctctttcaccatgacataaattttatgcctttcttac

SEQ ID NO: 358160 - DNA, 4165 bp, Homo sapiens
  misc_feature (4117)..(4117): n is a, c, g, or t
ctcctgcctcagcctcccgagcagctgggattacaggtgcccacgaccatgcccagctaatttttgtatttttagtagagacagcctggccaacatggtgaagccccatctctactaaaaatacaaaaattagctgggtgtggtggctcatgcctctagtcccaggtactcaggaggccgaggacagagaattgcttaaacccaggaggcgggggttgcagagattgtgccactgcacttcagcctgggtgacaaagtgatactccatctcaaaaaaaaataaataaaagcattttaacagtattatgtttgtgctttcaatttcaattctaagttacagtttttactaagtttgagtaaatccttgagatggacatagtaggatgaattttgaggagtaatttagcaactatcaggtattttttgttaactgttatagaagaatatgtattcattatagaatataagaaaatatagataatccttagtttttatggtgctggcttgatctgaatttaaattatctcattcctcattttaagaagaggaagaagtgattgttaccaagtaactcacagctgtctgcttcacaatctagttgagattggtttttggtattttttttaagcctttggatttataatctgttatgtcaagaacttgtggcttccttaggtaaggattacttaaattggatcggagttgttttctgttttaggtagctgacttagaaacctactaactaataagtctttaaaatagagaaaaattaacactaaacaactaatccaagttttttcttaaatccaattctgatgtataaattttgaataatattaggttcttaactggaaattaccatttcagggtttgaaaaggactaggtgcgtataaaaagttcagcccctcatctgttagactgattattggtaagactctttcacttagtcagcaagctgtgcaaagcaaatactggtatgcatcctcagcaattgagatttgaaattgtaagcaaaagctattcttttgcattcctgtgtccaaatgtcatcctaaagaacttgctgacttatgccagtttgggttttagagtaagttaactgcttgttatatggcaggtgattggctgatgctgcatttctcctccccaggcagcaattcccccaggcaagcaaccgtcttcactagcttctccaaatcctcccatggcaaagggctctgaacagggcttccagtcacctccagcaagtagtagttcagtaaccattaacacagcaccctttcaagccatgcagacagtatttaacgttaatgcacctctgcctccacgaaaagaacaagaaataaaagaatccccttattcacctggctacaatcaaagttttaccacagcaagtacacaaacaccaccccagtgccaactgccatctatacatgtagaacaaactgtccattctcaagagactggtaagatctttgcatatgatatttggaagacttagagggacagccaattgaatggacagcaagtctaggaagtctgtagtgacactttagaagtattttcctgaccagtaagcattatttctttacatgttcctccagtgttgagaaaaacctaatgcccttttttgtgttaagtttacctattaattttaatttttgtagagatagaacttagatgacggatttaaccttgaagtaggtttgtatttttaaatctatttgctttgattaccacagacagtgattgaggtagatgggcactatctggctgcttatatgaaggttttgaaaccattctgttaatccttttaacaaatggttatctgtccttttctatcttataataaaagattgaagatatgacttagtatgctcattgtactgtttgcttagagatgggaggctattttgatttttcatgctgttctaaatcatgaaagaataggtaactttgtactcatttcttaatttaaatttaagaagcacttgtagattttttgtattggtatttcagatccctattgagttttttaactgaagtcggagcaaatgaattgagcattctgagtacttggctaatcaagtgatgaagaggtagtaatatgaattctgggacctaggcatagatgacctgattctgttctcccctctactgttgaaagacagggcaggtgacttacgtaagggatatttttgtcaggtgccttctcagatattaattagaatccattttcttttactccctcatctggagtatttagcctgctttttaaaaattgtcgtaaagtatacataacataaaaattaccattttaatcatttttaactatatagttctgtggcattaagtacaaccaaactgttgtgtaattattaccactgtccacctccagaacttttcatctccccccaactgaaactttgtaatcatttaatactaactcctcctcctcctctccccccagcccctggcaaccaccattctactttctgattctgaaaatgactgctctaggtacctcatataagtggtatacaatatttgtgcttttgaaactagcttattttacttggcatgtcttaagggttcattcatgttgtagcatgggtcaaaattttcttccttttttaggctgaataatattccattatatatatgaattacgtatttgagtcatgtagatgaattatatacatgaatatatgtatctcctatttatttttaaaggcagcaaattgtattaatgattttgatatatattggcttttaagtataaagactattaccatttaactcttggaccctaaaatcgtttttcttaagcagcaaattatcatcctgatggaactattcaagtaagcaatggtagccttgccttttacccagcacagacgaatgtgtttcccagacctactcagccatttgtcaatagccggggatctgttagaggatgtactcgtggtgggagattaataaccaattcctatcggtcccctggtggttataaaggttttgatacttatagaggactcccttcaatttccaatggaaattatagccagctgcagttccaagctagagagtattctggagcaccttattcccaaagggataatttccagcagtgttataagcgaggagggacatctggtggtccacgagcaaattcgagagcagggtggagtgattcttctcaggtgagcagcccagaaagagacaacgaaacctttaacagtggtgactctggacaaggagactcccgtagcatgacccctgtggatgtgccagtgacaaatccagcagccaccatactgccagtacacgtctaccctctgcctcagcagatgcgagttgccttctcagcagccagaacctctaatctggcccctggaactttagaccaacctattgtgtttgatcttcttctgaacaacttaggagaaacttttgatcttcagcttggtagatttaattgcccagtgaatggcacttacgttttcatttttcacatgctaaagctggcagtgaatgtgccactgtatgtcaacctcatgaagaatgaagaggtcttggtatcagcctatgccaatgatggtgctccagaccatgaaactgctagcaatcatgcaattcttcagctcttccagggagaccagatatggttacgtctgcacaggggagcaatttatggaagtagctggaaatattctacgttttcaggctatcttctttatcaagattgaaagtcagtacagtattgacaataaaaggatggtgttctaattagtgggattgaaggaaaagtagtctttgccctcatgactgattggtttaggaaaatgtttttgttcctagagggaggaggtccttacttttttgttttccttcctgaggtgaaaaatcaagctgaatgacaattagcactaatctggcactttataaattgtgatgtagcctcgctagtcaagctgtgaatgtatattgtttgcacttaatccttaactgtattaacgttcagcttactaaactgactgcctcaagtccaggcaagttacaatgccttgttgtgcctcaataaaaaagtggcctcgttggcctcagcggtggagntctcggccgctctctttcaccatgacataaattttatgcctttcttac

SEQ ID NO: 358161 - DNA, 2786 bp, Homo sapiens
  misc_feature (12)..(12): n is a, c, g, or t
  misc_feature (2738)..(2738): n is a, c, g, or t
tgggacgacctnggggatacaggcgcccgccacacgcccggctaatttttgtacttttagtagtgacagcctggccaacatggtgaagccccatctctactaaaaatacaaaaattagctgggtgtggtggctcatgcctctagtcccaggtactcaggaggccgaggacagagaattgcttaaacccaggaggcgggggttgcagagattgtgccactgcacttcagcctgggtgacaaagtgatactccatctcaaaaaaaaataaataaaagcattttaacagtattatgtttgtgctttcaatttcaattctaagttacagtttttactaagtttgagtaaatccttgagatggacatagtaggatgaattttgaggagtaatttagcaactatcaggtattttttgttaactgttatagaagaatatgtattcattatagaatataagaaaatatagataatccttagtttttatggtgctggcttgatctgaatttaaattatctcattcctcattttaagaagaggaagaagtgattgttaccaagtaactcacagctgtctgcttcacaatctagttgagattggtttttggtattttttttaagcctttggatttataatctgttatgtcaagaacttgtggcttccttaggtaaggattacttaaattggatcggagttgttttctgttttaggtagctgacttagaaacctactaactaataagtctttaaaatagagaaaaattaacactaaacaactaatccaagttttttcttaaatccaattctgatgtataaattttgaataatattaggttcttaactggaaattaccatttcagggtttgaaaaggactaggtgcgtataaaaagttcagcccctcatctgttagactgattattggtaagactctttcacttagtcagcaagctgtgcaaagcaaatactggtatgcatcctcagcaattgagatttgaaattgtaagcaaaagctattcttttgcattcctgtgtccaaatgtcatcctaaagaacttgctgacttatgccagtttgggttttagagtaagttaactgcttgttatatggcaggtgattggctgatgctgcatttctcctccccaggcagcaattcccccaggcaagcaaccgtcttcactagcttctccaaatcctcccatggcaaagggctctgaacagggcttccagtcacctccagcaagtagtagttcagtaaccattaacacagcaccctttcaagccatgcagacagtatttaacgttaatgcacctctgcctccacgaaaagaacaagaaataaaagaatccccttattcacctggctacaatcaaagttttaccacagcaagtacacaaacaccaccccagtgccaactgccatctatacatgtagaacaaactgtccattctcaagagactgagcaaattatcatcctgatggaactattcaagtaagcaatggtagccttgccttttacccagcacagacgaatgtgtttcccagacctactcagccatttgtcaatagccggggatctgttagaggatgtactcgtggtgggagattaataaccaattcctatcggtcccctggtggttataaaggttttgatacttatagaggactcccttcaatttccaatggaaattatagccagctgcagttccaagctagagagtattctggagcaccttattcccaaagggataatttccagcagtgttataagcgaggagggacatctggtggtccacgagcaaattcgagagcagggtggagtgattcttctcaggtgagcagcccagaaagagacaacgaaacctttaacagtggtgactctggacaaggagactcccgtagcatgacccctgtggatgtgccagtgacaaatccagcagccaccatactgccagtacacgtctaccctctgcctcagcagatgcgagttgccttctcagcagccagaacctctaatctggcccctggaactttagaccaacctattgtgtttgatcttcttctgaacaacttaggagaaacttttgatcttcagcttggtagatttaattgcccagtgaatggcacttacgttttcatttttcacatgctaaagctggcagtgaatgtgccactgtatgtcaacctcatgaagaatgaagaggtcttggtatcagcctatgccaatgatggtgctccagaccatgaaactgctagcaatcatgcaattcttcagctcttccagggagaccagatatggttacgtctgcacaggggagcaatttatggaagtagctggaaatattctacgttttcaggctatcttctttatcaagattgaaagtcagtacagtattgacaataaaaggatggtgttctaattagtgggattgaaggaaaagtagtctttgccctcatgactgattggtttaggaaaatgtttttgttcctagagggaggaggtccttacttttttgttttccttcctgaggtgaaaaatcaagctgaatgacaattagcactaatctggcactttataaattgtgatgtagcctcgctagtcaagctgtgaatgtatattgtttgcacttaatccttaactgtattaacgttcagcttactaaactgactgcctcaagtccaggcaagttacaatgccttgttgtgcctcaataaaaaagtggcctcgttggcctcagcggtggagntctcggccgctctctttcaccatgacataaattttatgcctttcttac

SEQ ID NO: 358162 - DNA, 3419 bp, Homo sapiens
  misc_feature (12)..(12): n is a, c, g, or t
  misc_feature (3371)..(3371): n is a, c, g, or t
tgggacgacctnggggatacaggcgcccgccacacgcccggctaatttttgtacttttagtagtgacagcctggccaacatggtgaagccccatctctactaaaaatacaaaaattagctgggtgtggtggctcatgcctctagtcccaggtactcaggaggccgaggacagagaattgcttaaacccaggaggcgggggttgcagagattgtgccactgcacttcagcctgggtgacaaagtgatactccatctcaaaaaaaaataaataaaagcattttaacagtattatgtttgtgctttcaatttcaattctaagttacagtttttactaagtttgagtaaatccttgagatggacatagtaggatgaattttgaggagtaatttagcaactatcaggtattttttgttaactgttatagaagaatatgtattcattatagaatataagaaaatatagataatccttagtttttatggtgctggcttgatctgaatttaaattatctcattcctcattttaagaagaggaagaagtgattgttaccaagtaactcacagctgtctgcttcacaatctagttgagattggtttttggtattttttttaagcctttggatttataatctgttatgtcaagaacttgtggcttccttaggtaaggattacttaaattggatcggagttgttttctgttttaggtagctgacttagaaacctactaactaataagtctttaaaatagagaaaaattaacactaaacaactaatccaagttttttcttaaatccaattctgatgtataaattttgaataatattaggttcttaactggaaattaccatttcagggtttgaaaaggactaggtgcgtataaaaagttcagcccctcatctgttagactgattattggtaagactctttcacttagtcagcaagctgtgcaaagcaaatactggtatgcatcctcagcaattgagatttgaaattgtaagcaaaagctattcttttgcattcctgtgtccaaatgtcatcctaaagaacttgctgacttatgccagtttgggttttagagtaagttaactgcttgttatatggcaggtgattggctgatgctgcatttctcctccccaggcagcaattcccccaggcaagcaaccgtcttcactagcttctccaaatcctcccatggcaaagggctctgaacagggcttccagtcacctccagcaagtagtagttcagtaaccattaacacagcaccctttcaagccatgcagacagtatttaacgttaatgcacctctgcctccacgaaaagaacaagaaataaaagaatccccttattcacctggctacaatcaaagttttaccacagcaagtacacaaacaccaccccagtgccaactgccatctatacatgtagaacaaactgtccattctcaagagactggtaagatctttgcatatgatatttggaagacttagagggacagccaattgaatggacagcaagtctaggaagtctgtagtgacactttagaagtattttcctgaccagtaagcattatttctttacatgttcctccagtgttgagaaaaacctaatgcccttttttgtgttaagtttacctattaattttaatttttgtagagatagaacttagatgacggatttaaccttgaagtaggtttgtatttttaaatctatttgctttgattaccacagacagtgattgaggtagatgggcactatctggctgcttatatgaaggttttgaaaccattctgttaatccttttaacaaatggttatctgtccttttctatcttataataaaagattgaagatatgacttagtatgctcattgtactgtttgcttagagatgggaggctattttgatttttcatgctgttctaaatcatgaaagaataggtaactttgtactcatttcttaatttaaatttaagaagcacttgtagattttttgtattggtatttcagatccctattgagttttttaactgaagtcggagcaaatgaattgagcattctgagtacttggctaatcaagtgatgaagagagcaaattatcatcctgatggaactattcaagtaagcaatggtagccttgccttttacccagcacagacgaatgtgtttcccagacctactcagccatttgtcaatagccggggatctgttagaggatgtactcgtggtgggagattaataaccaattcctatcggtcccctggtggttataaaggttttgatacttatagaggactcccttcaatttccaatggaaattatagccagctgcagttccaagctagagagtattctggagcaccttattcccaaagggataatttccagcagtgttataagcgaggagggacatctggtggtccacgagcaaattcgagagcagggtggagtgattcttctcaggtgagcagcccagaaagagacaacgaaacctttaacagtggtgactctggacaaggagactcccgtagcatgacccctgtggatgtgccagtgacaaatccagcagccaccatactgccagtacacgtctaccctctgcctcagcagatgcgagttgccttctcagcagccagaacctctaatctggcccctggaactttagaccaacctattgtgtttgatcttcttctgaacaacttaggagaaacttttgatcttcagcttggtagatttaattgcccagtgaatggcacttacgttttcatttttcacatgctaaagctggcagtgaatgtgccactgtatgtcaacctcatgaagaatgaagaggtcttggtatcagcctatgccaatgatggtgctccagaccatgaaactgctagcaatcatgcaattcttcagctcttccagggagaccagatatggttacgtctgcacaggggagcaatttatggaagtagctggaaatattctacgttttcaggctatcttctttatcaagattgaaagtcagtacagtattgacaataaaaggatggtgttctaattagtgggattgaaggaaaagtagtctttgccctcatgactgattggtttaggaaaatgtttttgttcctagagggaggaggtccttacttttttgttttccttcctgaggtgaaaaatcaagctgaatgacaattagcactaatctggcactttataaattgtgatgtagcctcgctagtcaagctgtgaatgtatattgtttgcacttaatccttaactgtattaacgttcagcttactaaactgactgcctcaagtccaggcaagttacaatgccttgttgtgcctcaataaaaaagtggcctcgttggcctcagcggtggagntctcggccgctctctttcaccatgacataaattttatgcctttcttac

SEQ ID NO: 358163 - DNA, 4194 bp, Homo sapiens
  misc_feature (12)..(12): n is a, c, g, or t
  misc_feature (4146)..(4146): n is a, c, g, or t
tgggacgacctnggggatacaggcgcccgccacacgcccggctaatttttgtacttttagtagtgacagcctggccaacatggtgaagccccatctctactaaaaatacaaaaattagctgggtgtggtggctcatgcctctagtcccaggtactcaggaggccgaggacagagaattgcttaaacccaggaggcgggggttgcagagattgtgccactgcacttcagcctgggtgacaaagtgatactccatctcaaaaaaaaataaataaaagcattttaacagtattatgtttgtgctttcaatttcaattctaagttacagtttttactaagtttgagtaaatccttgagatggacatagtaggatgaattttgaggagtaatttagcaactatcaggtattttttgttaactgttatagaagaatatgtattcattatagaatataagaaaatatagataatccttagtttttatggtgctggcttgatctgaatttaaattatctcattcctcattttaagaagaggaagaagtgattgttaccaagtaactcacagctgtctgcttcacaatctagttgagattggtttttggtattttttttaagcctttggatttataatctgttatgtcaagaacttgtggcttccttaggtaaggattacttaaattggatcggagttgttttctgttttaggtagctgacttagaaacctactaactaataagtctttaaaatagagaaaaattaacactaaacaactaatccaagttttttcttaaatccaattctgatgtataaattttgaataatattaggttcttaactggaaattaccatttcagggtttgaaaaggactaggtgcgtataaaaagttcagcccctcatctgttagactgattattggtaagactctttcacttagtcagcaagctgtgcaaagcaaatactggtatgcatcctcagcaattgagatttgaaattgtaagcaaaagctattcttttgcattcctgtgtccaaatgtcatcctaaagaacttgctgacttatgccagtttgggttttagagtaagttaactgcttgttatatggcaggtgattggctgatgctgcatttctcctccccaggcagcaattcccccaggcaagcaaccgtcttcactagcttctccaaatcctcccatggcaaagggctctgaacagggcttccagtcacctccagcaagtagtagttcagtaaccattaacacagcaccctttcaagccatgcagacagtatttaacgttaatgcacctctgcctccacgaaaagaacaagaaataaaagaatccccttattcacctggctacaatcaaagttttaccacagcaagtacacaaacaccaccccagtgccaactgccatctatacatgtagaacaaactgtccattctcaagagactggtaagatctttgcatatgatatttggaagacttagagggacagccaattgaatggacagcaagtctaggaagtctgtagtgacactttagaagtattttcctgaccagtaagcattatttctttacatgttcctccagtgttgagaaaaacctaatgcccttttttgtgttaagtttacctattaattttaatttttgtagagatagaacttagatgacggatttaaccttgaagtaggtttgtatttttaaatctatttgctttgattaccacagacagtgattgaggtagatgggcactatctggctgcttatatgaaggttttgaaaccattctgttaatccttttaacaaatggttatctgtccttttctatcttataataaaagattgaagatatgacttagtatgctcattgtactgtttgcttagagatgggaggctattttgatttttcatgctgttctaaatcatgaaagaataggtaactttgtactcatttcttaatttaaatttaagaagcacttgtagattttttgtattggtatttcagatccctattgagttttttaactgaagtcggagcaaatgaattgagcattctgagtacttggctaatcaagtgatgaagaggtagtaatatgaattctgggacctaggcatagatgacctgattctgttctcccctctactgttgaaagacagggcaggtgacttacgtaagggatatttttgtcaggtgccttctcagatattaattagaatccattttcttttactccctcatctggagtatttagcctgctttttaaaaattgtcgtaaagtatacataacataaaaattaccattttaatcatttttaactatatagttctgtggcattaagtacaaccaaactgttgtgtaattattaccactgtccacctccagaacttttcatctccccccaactgaaactttgtaatcatttaatactaactcctcctcctcctctccccccagcccctggcaaccaccattctactttctgattctgaaaatgactgctctaggtacctcatataagtggtatacaatatttgtgcttttgaaactagcttattttacttggcatgtcttaagggttcattcatgttgtagcatgggtcaaaattttcttccttttttaggctgaataatattccattatatatatgaattacgtatttgagtcatgtagatgaattatatacatgaatatatgtatctcctatttatttttaaaggcagcaaattgtattaatgattttgatatatattggcttttaagtataaagactattaccatttaactcttggaccctaaaatcgtttttcttaagcagcaaattatcatcctgatggaactattcaagtaagcaatggtagccttgccttttacccagcacagacgaatgtgtttcccagacctactcagccatttgtcaatagccggggatctgttagaggatgtactcgtggtgggagattaataaccaattcctatcggtcccctggtggttataaaggttttgatacttatagaggactcccttcaatttccaatggaaattatagccagctgcagttccaagctagagagtattctggagcaccttattcccaaagggataatttccagcagtgttataagcgaggagggacatctggtggtccacgagcaaattcgagagctaactgcttcattatgagaaactcactgttgctaataaaacagcagggtggagtgattcttctcaggtgagcagcccagaaagagacaacgaaacctttaacagtggtgactctggacaaggagactcccgtagcatgacccctgtggatgtgccagtgacaaatccagcagccaccatactgccagtacacgtctaccctctgcctcagcagatgcgagttgccttctcagcagccagaacctctaatctggcccctggaactttagaccaacctattgtgtttgatcttcttctgaacaacttaggagaaacttttgatcttcagcttggtagatttaattgcccagtgaatggcacttacgttttcatttttcacatgctaaagctggcagtgaatgtgccactgtatgtcaacctcatgaagaatgaagaggtcttggtatcagcctatgccaatgatggtgctccagaccatgaaactgctagcaatcatgcaattcttcagctcttccagggagaccagatatggttacgtctgcacaggggagcaatttatggaagtagctggaaatattctacgttttcaggctatcttctttatcaagattgaaagtcagtacagtattgacaataaaaggatggtgttctaattagtgggattgaaggaaaagtagtctttgccctcatgactgattggtttaggaaaatgtttttgttcctagagggaggaggtccttacttttttgttttccttcctgaggtgaaaaatcaagctgaatgacaattagcactaatctggcactttataaattgtgatgtagcctcgctagtcaagctgtgaatgtatattgtttgcacttaatccttaactgtattaacgttcagcttactaaactgactgcctcaagtccaggcaagttacaatgccttgttgtgcctcaataaaaaagtggcctcgttggcctcagcggtggagntctcggccgctctctttcaccatgacataaattttatgcctttcttac

SEQ ID NO: 358164 - DNA, 2066 bp, Homo sapiens
  misc_feature (2018)..(2018): n is a, c, g, or t
ctctacccttccgaaggatccagtattgaggaaaggtagaggaagaacctacaggctaagcctggcatcaggctttaggttcttcctctacccttccgaaggatccagtattgaggaaagaaaaactgcaggatctgatgactcagattcaaggaacttgtaactttatgcaagagtctgttcttgactttgacaaaccttcaagtgcaattccaacgtcacaaccgccttcagctactccaggtagccccgtagcatctaaagaacaaaatctgtccagtcaaagtgattttcttcaagagccgttacaggctacttcttctccagttacttgtagctcaaatgcttgcttggttactaccgatcaggcttcttctggatctgaaacagagtttatgacctcagagactcctgaggcagcaattcccccaggcaagcaaccgtcttcactagcttctccaaatcctcccatggcaaagggctctgaacagggcttccagtcacctccagcaagtagtagttcagtaaccattaacacagcaccctttcaagccatgcagacagtatttaacgttaatgcacctctgcctccacgaaaagaacaagaaataaaagaatccccttattcacctggctacaatcaaagttttaccacagcaagtacacaaacaccaccccagtgccaactgccatctatacatgtagaacaaactgtccattctcaagagactgagcaaattatcatcctgatggaactattcaagtaagcaatggtagccttgccttttacccagcacagacgaatgtgtttcccagacctactcagccatttgtcaatagccggggatctgttagaggatgtactcgtggtgggagattaataaccaattcctatcggtcccctggtggttataaaggttttgatacttatagaggactcccttcaatttccaatggaaattatagccagctgcagttccaagctagagagtattctggagcaccttattcccaaagggataatttccagcagtgttataagcgaggagggacatctggtggtccacgagcaaattcgagagcagggtggagtgattcttctcaggtgagcagcccagaaagagacaacgaaacctttaacagtggtgactctggacaaggagactcccgtagcatgacccctgtggatgtgccagtgacaaatccagcagccaccatactgccagtacacgtctaccctctgcctcagcagatgcgagttgccttctcagcagccagaacctctaatctggcccctggaactttagaccaacctattgtgtttgatcttcttctgaacaacttaggagaaacttttgatcttcagcttggtagatttaattgcccagtgaatggcacttacgttttcatttttcacatgctaaagctggcagtgaatgtgccactgtatgtcaacctcatgaagaatgaagaggtcttggtatcagcctatgccaatgatggtgctccagaccatgaaactgctagcaatcatgcaattcttcagctcttccagggagaccagatatggttacgtctgcacaggggagcaatttatggaagtagctggaaatattctacgttttcaggctatcttctttatcaagattgaaagtcagtacagtattgacaataaaaggatggtgttctaattagtgggattgaaggaaaagtagtctttgccctcatgactgattggtttaggaaaatgtttttgttcctagagggaggaggtccttacttttttgttttccttcctgaggtgaaaaatcaagctgaatgacaattagcactaatctggcactttataaattgtgatgtagcctcgctagtcaagctgtgaatgtatattgtttgcacttaatccttaactgtattaacgttcagcttactaaactgactgcctcaagtccaggcaagttacaatgccttgttgtgcctcaataaaaaagtggcctcgttggcctcagcggtggagntctcggccgctctctttcaccatgacataaattttatgcctttcttac

SEQ ID NO: 358165 - DNA, 2830 bp, Homo sapiens
  misc_feature (12)..(12): n is a, c, g, or t
  misc_feature (2782)..(2782): n is a, c, g, or t
tgggacgacctnggggatacaggcgcccgccacacgcccggctaatttttgtacttttagtagtgacagcctggccaacatggtgaagccccatctctactaaaaatacaaaaattagctgggtgtggtggctcatgcctctagtcccaggtactcaggaggccgaggacagagaattgcttaaacccaggaggcgggggttgcagagattgtgccactgcacttcagcctgggtgacaaagtgatactccatctcaaaaaaaaataaataaaagcattttaacagtattatgtttgtgctttcaatttcaattctaagttacagtttttactaagtttgagtaaatccttgagatggacatagtaggatgaattttgaggagtaatttagcaactatcaggtattttttgttaactgttatagaagaatatgtattcattatagaatataagaaaatatagataatccttagtttttatggtgctggcttgatctgaatttaaattatctcattcctcattttaagaagaggaagaagtgattgttaccaagtaactcacagctgtctgcttcacaatctagttgagattggtttttggtattttttttaagcctttggatttataatctgttatgtcaagaacttgtggcttccttaggtaaggattacttaaattggatcggagttgttttctgttttaggtagctgacttagaaacctactaactaataagtctttaaaatagagaaaaattaacactaaacaactaatccaagttttttcttaaatccaattctgatgtataaattttgaataatattaggttcttaactggaaattaccatttcagggtttgaaaaggactaggtgcgtataaaaagttcagcccctcatctgttagactgattattggtaagactctttcacttagtcagcaagctgtgcaaagcaaatactggtatgcatcctcagcaattgagatttgaaattgtaagcaaaagctattcttttgcattcctgtgtccaaatgtcatcctaaagaacttgctgacttatgccagtttgggttttagagtaagttaactgcttgttatatggcaggtgattggctgatgctgcatttctcctccccaggcagcaattcccccaggcaagcaaccgtcttcactagcttctccaaatcctcccatggcaaagggctctgaacagggcttccagtcacctccagcaagtagtagttcagtaaccattaacacagcaccctttcaagccatgcagacagtatttaacgttaatgcacctctgcctccacgaaaagaacaagaaataaaagaatccccttattcacctggctacaatcaaagttttaccacagcaagtacacaaacaccaccccagtgccaactgccatctatacatgtagaacaaactgtccattctcaagagactgagcaaattatcatcctgatggaactattcaagtaagcaatggtagccttgccttttacccagcacagacgaatgtgtttcccagacctactcagccatttgtcaatagccggggatctgttagaggatgtactcgtggtgggagattaataaccaattcctatcggtcccctggtggttataaaggttttgatacttatagaggactcccttcaatttccaatggaaattatagccagctgcagttccaagctagagagtattctggagcaccttattcccaaagggataatttccagcagtgttataagcgaggagggacatctggtggtccacgagcaaattcgagagctaactgcttcattatgagaaactcactgttgctaataaaacagcagggtggagtgattcttctcaggtgagcagcccagaaagagacaacgaaacctttaacagtggtgactctggacaaggagactcccgtagcatgacccctgtggatgtgccagtgacaaatccagcagccaccatactgccagtacacgtctaccctctgcctcagcagatgcgagttgccttctcagcagccagaacctctaatctggcccctggaactttagaccaacctattgtgtttgatcttcttctgaacaacttaggagaaacttttgatcttcagcttggtagatttaattgcccagtgaatggcacttacgttttcatttttcacatgctaaagctggcagtgaatgtgccactgtatgtcaacctcatgaagaatgaagaggtcttggtatcagcctatgccaatgatggtgctccagaccatgaaactgctagcaatcatgcaattcttcagctcttccagggagaccagatatggttacgtctgcacaggggagcaatttatggaagtagctggaaatattctacgttttcaggctatcttctttatcaagattgaaagtcagtacagtattgacaataaaaggatggtgttctaattagtgggattgaaggaaaagtagtctttgccctcatgactgattggtttaggaaaatgtttttgttcctagagggaggaggtccttacttttttgttttccttcctgaggtgaaaaatcaagctgaatgacaattagcactaatctggcactttataaattgtgatgtagcctcgctagtcaagctgtgaatgtatattgtttgcacttaatccttaactgtattaacgttcagcttactaaactgactgcctcaagtccaggcaagttacaatgccttgttgtgcctcaataaaaaagtggcctcgttggcctcagcggtggagntctcggccgctctctttcaccatgacataaattttatgcctttcttac

SEQ ID NO: 358166 - DNA, 4194 bp, Homo sapiens
  misc_feature (12)..(12): n is a, c, g, or t
  misc_feature (4146)..(4146): n is a, c, g, or t
tgggacgacctnggggatacaggcgcccgccacacgcccggctaatttttgtacttttagtagtgacagcctggccaacatggtgaagccccatctctactaaaaatacaaaaattagctgggtgtggtggctcatgcctctagtcccaggtactcaggaggccgaggacagagaattgcttaaacccaggaggcgggggttgcagagattgtgccactgcacttcagcctgggtgacaaagtgatactccatctcaaaaaaaaataaataaaagcattttaacagtattatgtttgtgctttcaatttcaattctaagttacagtttttactaagtttgagtaaatccttgagatggacatagtaggatgaattttgaggagtaatttagcaactatcaggtattttttgttaactgttatagaagaatatgtattcattatagaatataagaaaatatagataatccttagtttttatggtgctggcttgatctgaatttaaattatctcattcctcattttaagaagaggaagaagtgattgttaccaagtaactcacagctgtctgcttcacaatctagttgagattggtttttggtattttttttaagcctttggatttataatctgttatgtcaagaacttgtggcttccttaggtaaggattacttaaattggatcggagttgttttctgttttaggtagctgacttagaaacctactaactaataagtctttaaaatagagaaaaattaacactaaacaactaatccaagttttttcttaaatccaattctgatgtataaattttgaataatattaggttcttaactggaaattaccatttcagggtttgaaaaggactaggtgcgtataaaaagttcagcccctcatctgttagactgattattggtaagactctttcacttagtcagcaagctgtgcaaagcaaatactggtatgcatcctcagcaattgagatttgaaattgtaagcaaaagctattcttttgcattcctgtgtccaaatgtcatcctaaagaacttgctgacttatgccagtttgggttttagagtaagttaactgcttgttatatggcaggtgattggctgatgctgcatttctcctccccaggcagcaattcccccaggcaagcaaccgtcttcactagcttctccaaatcctcccatggcaaagggctctgaacagggcttccagtcacctccagcaagtagtagttcagtaaccattaacacagcaccctttcaagccatgcagacagtatttaacgttaatgcacctctgcctccacgaaaagaacaagaaataaaagaatccccttattcacctggctacaatcaaagttttaccacagcaagtacacaaacaccaccccagtgccaactgccatctatacatgtagaacaaactgtccattctcaagagactggtaagatctttgcatatgatatttggaagacttagagggacagccaattgaatggacagcaagtctaggaagtctgtagtgacactttagaagtattttcctgaccagtaagcattatttctttacatgttcctccagtgttgagaaaaacctaatgcccttttttgtgttaagtttacctattaattttaatttttgtagagatagaacttagatgacggatttaaccttgaagtaggtttgtatttttaaatctatttgctttgattaccacagacagtgattgaggtagatgggcactatctggctgcttatatgaaggttttgaaaccattctgttaatccttttaacaaatggttatctgtccttttctatcttataataaaagattgaagatatgacttagtatgctcattgtactgtttgcttagagatgggaggctattttgatttttcatgctgttctaaatcatgaaagaataggtaactttgtactcatttcttaatttaaatttaagaagcacttgtagattttttgtattggtatttcagatccctattgagttttttaactgaagtcggagcaaatgaattgagcattctgagtacttggctaatcaagtgatgaagaggtagtaatatgaattctgggacctaggcatagatgacctgattctgttctcccctctactgttgaaagacagggcaggtgacttacgtaagggatatttttgtcaggtgccttctcagatattaattagaatccattttcttttactccctcatctggagtatttagcctgctttttaaaaattgtcgtaaagtatacataacataaaaattaccattttaatcatttttaactatatagttctgtggcattaagtacaaccaaactgttgtgtaattattaccactgtccacctccagaacttttcatctccccccaactgaaactttgtaatcatttaatactaactcctcctcctcctctccccccagcccctggcaaccaccattctactttctgattctgaaaatgactgctctaggtacctcatataagtggtatacaatatttgtgcttttgaaactagcttattttacttggcatgtcttaagggttcattcatgttgtagcatgggtcaaaattttcttccttttttaggctgaataatattccattatatatatgaattacgtatttgagtcatgtagatgaattatatacatgaatatatgtatctcctatttatttttaaaggcagcaaattgtattaatgattttgatatatattggcttttaagtataaagactattaccatttaactcttggaccctaaaatcgtttttcttaagcagcaaattatcatcctgatggaactattcaagtaagcaatggtagccttgccttttacccagcacagacgaatgtgtttcccagacctactcagccatttgtcaatagccggggatctgttagaggatgtactcgtggtgggagattaataaccaattcctatcggtcccctggtggttataaaggttttgatacttatagaggactcccttcaatttccaatggaaattatagccagctgcagttccaagctagagagtattctggagcaccttattcccaaaggtgtttggaaacatctgagcctctttggttgctggggaaggccaggataatttccagcagtgttataagcgaggagggacatctggtggtccacgagcaaattcgagagcagggtggagtgattcttctcaggtgagcagcccagaaagagacaacgaaacctttaacagtggtgactctggacaaggagactcccgtagcatgacccctgtggatgtgccagtgacaaatccagcagccaccatactgccagtacacgtctaccctctgcctcagcagatgcgagttgccttctcagcagccagaacctctaatctggcccctggaactttagaccaacctattgtgtttgatcttcttctgaacaacttaggagaaacttttgatcttcagcttggtagatttaattgcccagtgaatggcacttacgttttcatttttcacatgctaaagctggcagtgaatgtgccactgtatgtcaacctcatgaagaatgaagaggtcttggtatcagcctatgccaatgatggtgctccagaccatgaaactgctagcaatcatgcaattcttcagctcttccagggagaccagatatggttacgtctgcacaggggagcaatttatggaagtagctggaaatattctacgttttcaggctatcttctttatcaagattgaaagtcagtacagtattgacaataaaaggatggtgttctaattagtgggattgaaggaaaagtagtctttgccctcatgactgattggtttaggaaaatgtttttgttcctagagggaggaggtccttacttttttgttttccttcctgaggtgaaaaatcaagctgaatgacaattagcactaatctggcactttataaattgtgatgtagcctcgctagtcaagctgtgaatgtatattgtttgcacttaatccttaactgtattaacgttcagcttactaaactgactgcctcaagtccaggcaagttacaatgccttgttgtgcctcaataaaaaagtggcctcgttggcctcagcggtggagntctcggccgctctctttcaccatgacataaattttatgcctttcttac

SEQ ID NO: 358167 - DNA, 1814 bp, Homo sapiens
  misc_feature (1766)..(1766): n is a, c, g, or t
ctctacccttccgaaggatccagtattgaggaaaggtagaggaagaacctacaggctaagcctggcatcaggctttaggttcttcctctacccttccgaaggatccagtattgaggaaagaaaaactgcaggatctgatgactcagattcaaggaacttgtaactttatgcaagagtctgttcttgactttgacaaaccttcaagtgcaattccaacgtcacaaccgccttcagctactccaggtagccccgtagcatctaaagaacaaaatctgtccagtcaaagtgattttcttcaagagccgttacaggtatttaacgttaatgcacctctgcctccacgaaaagaacaagaaataaaagaatccccttattcacctggctacaatcaaagttttaccacagcaagtacacaaacaccaccccagtgccaactgccatctatacatgtagaacaaactgtccattctcaagagactgagcaaattatcatcctgatggaactattcaagtaagcaatggtagccttgccttttacccagcacagacgaatgtgtttcccagacctactcagccatttgtcaatagccggggatctgttagaggatgtactcgtggtgggagattaataaccaattcctatcggtcccctggtggttataaaggttttgatacttatagaggactcccttcaatttccaatggaaattatagccagctgcagttccaagctagagagtattctggagcaccttattcccaaagggataatttccagcagtgttataagcgaggagggacatctggtggtccacgagcaaattcgagagcagggtggagtgattcttctcaggtgagcagcccagaaagagacaacgaaacctttaacagtggtgactctggacaaggagactcccgtagcatgacccctgtggatgtgccagtgacaaatccagcagccaccatactgccagtacacgtctaccctctgcctcagcagatgcgagttgccttctcagcagccagaacctctaatctggcccctggaactttagaccaacctattgtgtttgatcttcttctgaacaacttaggagaaacttttgatcttcagcttggtagatttaattgcccagtgaatggcacttacgttttcatttttcacatgctaaagctggcagtgaatgtgccactgtatgtcaacctcatgaagaatgaagaggtcttggtatcagcctatgccaatgatggtgctccagaccatgaaactgctagcaatcatgcaattcttcagctcttccagggagaccagatatggttacgtctgcacaggggagcaatttatggaagtagctggaaatattctacgttttcaggctatcttctttatcaagattgaaagtcagtacagtattgacaataaaaggatggtgttctaattagtgggattgaaggaaaagtagtctttgccctcatgactgattggtttaggaaaatgtttttgttcctagagggaggaggtccttacttttttgttttccttcctgaggtgaaaaatcaagctgaatgacaattagcactaatctggcactttataaattgtgatgtagcctcgctagtcaagctgtgaatgtatattgtttgcacttaatccttaactgtattaacgttcagcttactaaactgactgcctcaagtccaggcaagttacaatgccttgttgtgcctcaataaaaaagtggcctcgttggcctcagcggtggagntctcggccgctctctttcaccatgacataaattttatgcctttcttac

SEQ ID NO: 358168 - DNA, 1210 bp, Homo sapiens
  misc_feature (1162)..(1162): n is a, c, g, or t
atactaatttatatttattttaataccaagaacgaaaacgcaaccgaaaaagatcttcgaggttttgatacttatagaggactcccttcaatttccaatggaaattatagccagctgcagttccaagctagagagtattctggagcaccttattcccaaagggataatttccagcagtgttataagcgaggagggacatctggtggtccacgagcaaattcgagagcagggtggagtgattcttctcaggtgagcagcccagaaagagacaacgaaacctttaacagtggtgactctggacaaggagactcccgtagcatgacccctgtggatgtgccagtgacaaatccagcagccaccatactgccagtacacgtctaccctctgcctcagcagatgcgagttgccttctcagcagccagaacctctaatctggcccctggaactttagaccaacctattgtgtttgatcttcttctgaacaacttaggagaaacttttgatcttcagcttggtagatttaattgcccagtgaatggcacttacgttttcatttttcacatgctaaagctggcagtgaatgtgccactgtatgtcaacctcatgaagaatgaagaggtcttggtatcagcctatgccaatgatggtgctccagaccatgaaactgctagcaatcatgcaattcttcagctcttccagggagaccagatatggttacgtctgcacaggggagcaatttatggaagtagctggaaatattctacgttttcaggctatcttctttatcaagattgaaagtcagtacagtattgacaataaaaggatggtgttctaattagtgggattgaaggaaaagtagtctttgccctcatgactgattggtttaggaaaatgtttttgttcctagagggaggaggtccttacttttttgttttccttcctgaggtgaaaaatcaagctgaatgacaattagcactaatctggcactttataaattgtgatgtagcctcgctagtcaagctgtgaatgtatattgtttgcacttaatccttaactgtattaacgttcagcttactaaactgactgcctcaagtccaggcaagttacaatgccttgttgtgcctcaataaaaaagtggcctcgttggcctcagcggtggagntctcggccgctctctttcaccatgacataaattttatgcctttcttac

SEQ ID NO: 358169 - DNA, 2250 bp, Homo sapiens
  misc_feature (12)..(12): n is a, c, g, or t
  misc_feature (2202)..(2202): n is a, c, g, or t
tgggacgacctnggggatacaggcgcccgccacacgcccggctaatttttgtacttttagtagtgacagcctggccaacatggtgaagccccatctctactaaaaatacaaaaattagctgggtgtggtggctcatgcctctagtcccaggtactcaggaggccgaggacagagaattgcttaaacccaggaggcgggggttgcagagattgtgccactgcacttcagcctgggtgacaaagtgatactccatctcaaaaaaaaataaataaaagcattttaacagtattatgtttgtgctttcaatttcaattctaagttacagtttttactaagtttgagtaaatccttgagatggacatagtaggatgaattttgaggagtaatttagcaactatcaggtattttttgttaactgttatagaagaatatgtattcattatagaatataagaaaatatagataatccttagtttttatggtgctggcttgatctgaatttaaattatctcattcctcattttaagaagaggaagaagtgattgttaccaagtaactcacagctgtctgcttcacaatctagttgagattggtttttggtattttttttaagcctttggatttataatctgttatgtcaagaacttgtggcttccttaggtaaggattacttaaattggatcggagttgttttctgttttaggtagctgacttagaaacctactaactaataagtctttaaaatagagaaaaattaacactaaacaactaatccaagttttttcttaaatccaattctgatgtataaattttgaataatattaggttcttaactggaaattaccatttcagggtttgaaaaggactaggtgcgtataaaaagttcagcccctcatctgttagactgattattggtaagactctttcacttagtcagcaagctgtgcaaagcaaatactggtatgcatcctcagcaattgagatttgaaattgtaagcaaaagctattcttttgcattcctgtgtccaaatgtcatcctaaagaacttgctgacttatgccagtttgggttttagagtaagttaactgcttgttatatggcaggtgattggctgatgctgcatttctcctccccaggcagcaattcccccaggcaagcaaccgtcttcactagcttctccaaatcctcccatggcaaagggctctgaacagggcttccagtcacctccagcaagtagtagttcagtaaccattaacacagcaccctttcaagccatgcagacagtatttaacgttaatgcacctctgcctccacgaaaagaacaagaaataaaagaatccccttattcacctggctacaatcaaagttttaccacagcaagtacacaaacaccaccccagtgccaactgccatctatacatgtagaacaaactgtccattctcaagagactgagcaaattatcatcctgatggaactattcaagtaagcaatggtagccttgccttttacccagcacagacgaatgtgtttcccagacctactcagccatttgtcaatagccggggatctgttagaggatgtactcgtggtgggagattaataaccaattcctatcggtcccctggtggttataaaggttttgatacttatagaggactcccttcaatttccctatgccaatgatggtgctccagaccatgaaactgctagcaatcatgcaattcttcagctcttccagggagaccagatatggttacgtctgcacaggggagcaatttatggaagtagctggaaatattctacgttttcaggctatcttctttatcaagattgaaagtcagtacagtattgacaataaaaggatggtgttctaattagtgggattgaaggaaaagtagtctttgccctcatgactgattggtttaggaaaatgtttttgttcctagagggaggaggtccttacttttttgttttccttcctgaggtgaaaaatcaagctgaatgacaattagcactaatctggcactttataaattgtgatgtagcctcgctagtcaagctgtgaatgtatattgtttgcacttaatccttaactgtattaacgttcagcttactaaactgactgcctcaagtccaggcaagttacaatgccttgttgtgcctcaataaaaaagtggcctcgttggcctcagcggtggagntctcggccgctctctttcaccatgacataaattttatgcctttcttac

SEQ ID NO: 358170 - DNA, 455 bp, Homo sapiens
ttcatgttgtagcatgggtcaaaattttcttccttttttaggctgaataatattccattatatatatgaattacgtatttgagtcatgtagatgaattatatacatgaatatatgtatctcctatttatttttaaaggcagcaaattgtattaatgattttgatatatattggcttttaagtataaagactattaccatttaactcttggaccctaaaatcgtttttcttaagcagcaaattatcatcctgatggaactattcaagtaagcaatggtagccttgccttttacccagcacagacgaatgtgtttcccagacctactcagccatttgtcaatagccggggatctgttagaggatgtactcgtggtgggagattaataaccaattcctatcggtcccctggtggttataaaggtatgccctgaataaaattgaattatactgaattat

SEQ ID NO: 358171 - DNA, 383 bp, Homo sapiens
attttttatcaatttcttaaaaaaaaattcccaaaccccaacacagttggtattggtcttcccagtttggtgtataaatagagcaaggttgagaaaagtctgtgtttttgctttatgatgtccttttatactgagatgagggacagaggaccatgccacatttaaaaatttctctcattacctagcattgtatcttttacatagtattctccaagtgctttgttgtttttcaggtattaacagatctgattggtcaggttaattaacaggtgaagcaagtaatgccactgttgcccttgctttgtttttcttagtgtttggaaacatctgagcctctttggttgctggggaaggccaggtaaagaactaaggggactaatctt

SEQ ID NO: 358172 - DNA, 3430 bp, Homo sapiens
  misc_feature (3382)..(3382): n is a, c, g, or t
ctctacccttccgaaggatccagtattgaggaaaggtagaggaagaacctacaggctaagcctggcatcaggctttaggttcttcctctacccttccgaaggatccagtattgaggaaagaaaaactgcaggatctgatgactcagattcaaggaacttgtaactttatgcaagagtctgttcttgactttgacaaaccttcaagtgcaattccaacgtcacaaccgccttcagctactccaggtagccccgtagcatctaaagaacaaaatctgtccagtcaaagtgattttcttcaagagccgttacaggctacttcttctccagttacttgtagctcaaatgcttgcttggttactaccgatcaggcttcttctggatctgaaacagagtttatgacctcagagactcctgaggcagcaattcccccaggcaagcaaccgtcttcactagcttctccaaatcctcccatggcaaagggctctgaacagggcttccagtcacctccagcaagtagtagttcagtaaccattaacacagcaccctttcaagccatgcagacagtatttaacgttaatgcacctctgcctccacgaaaagaacaagaaataaaagaatccccttattcacctggctacaatcaaagttttaccacagcaagtacacaaacaccaccccagtgccaactgccatctatacatgtagaacaaactgtccattctcaagagactggtaagatctttgcatatgatatttggaagacttagagggacagccaattgaatggacagcaagtctaggaagtctgtagtgacactttagaagtattttcctgaccagtaagcattatttctttacatgttcctccagtgttgagaaaaacctaatgcccttttttgtgttaagtttacctattaattttaatttttgtagagatagaacttagatgacggatttaaccttgaagtaggtttgtatttttaaatctatttgctttgattaccacagacagtgattgaggtagatgggcactatctggctgcttatatgaaggttttgaaaccattctgttaatccttttaacaaatggttatctgtccttttctatcttataataaaagattgaagatatgacttagtatgctcattgtactgtttgcttagagatgggaggctattttgatttttcatgctgttctaaatcatgaaagaataggtaactttgtactcatttcttaatttaaatttaagaagcacttgtagattttttgtattggtatttcagatccctattgagttttttaactgaagtcggagcaaatgaattgagcattctgagtacttggctaatcaagtgatgaagaggtagtaatatgaattctgggacctaggcatagatgacctgattctgttctcccctctactgttgaaagacagggcaggtgacttacgtaagggatatttttgtcaggtgccttctcagatattaattagaatccattttcttttactccctcatctggagtatttagcctgctttttaaaaattgtcgtaaagtatacataacataaaaattaccattttaatcatttttaactatatagttctgtggcattaagtacaaccaaactgttgtgtaattattaccactgtccacctccagaacttttcatctccccccaactgaaactttgtaatcatttaatactaactcctcctcctcctctccccccagcccctggcaaccaccattctactttctgattctgaaaatgactgctctaggtacctcatataagtggtatacaatatttgtgcttttgaaactagcttattttacttggcatgtcttaagggttcattcatgttgtagcatgggtcaaaattttcttccttttttaggctgaataatattccattatatatatgaattacgtatttgagtcatgtagatgaattatatacatgaatatatgtatctcctatttatttttaaaggcagcaaattgtattaatgattttgatatatattggcttttaagtataaagactattaccatttaactcttggaccctaaaatcgtttttcttaagcagcaaattatcatcctgatggaactattcaagtaagcaatggtagccttgccttttacccagcacagacgaatgtgtttcccagacctactcagccatttgtcaatagccggggatctgttagaggatgtactcgtggtgggagattaataaccaattcctatcggtcccctggtggttataaaggttttgatacttatagaggactcccttcaatttccaatggaaattatagccagctgcagttccaagctagagagtattctggagcaccttattcccaaagggataatttccagcagtgttataagcgaggagggacatctggtggtccacgagcaaattcgagagcagggtggagtgattcttctcaggtgagcagcccagaaagagacaacgaaacctttaacagtggtgactctggacaaggagactcccgtagcatgacccctgtggatgtgccagtgacaaatccagcagccaccatactgccagtacacgtctaccctctgcctcagcagatgcgagttgccttctcagcagccagaacctctaatctggcccctggaactttagaccaacctattgtgtttgatcttcttctgaacaacttaggagaaacttttgatcttcagcttggtagatttaattgcccagtgaatggcacttacgttttcatttttcacatgctaaagctggcagtgaatgtgccactgtatgtcaacctcatgaagaatgaagaggtcttggtatcagcctatgccaatgatggtgctccagaccatgaaactgctagcaatcatgcaattcttcagctcttccagggagaccagatatggttacgtctgcacaggggagcaatttatggaagtagctggaaatattctacgttttcaggctatcttctttatcaagattgaaagtcagtacagtattgacaataaaaggatggtgttctaattagtgggattgaaggaaaagtagtctttgccctcatgactgattggtttaggaaaatgtttttgttcctagagggaggaggtccttacttttttgttttccttcctgaggtgaaaaatcaagctgaatgacaattagcactaatctggcactttataaattgtgatgtagcctcgctagtcaagctgtgaatgtatattgtttgcacttaatccttaactgtattaacgttcagcttactaaactgactgcctcaagtccaggcaagttacaatgccttgttgtgcctcaataaaaaagtggcctcgttggcctcagcggtggagntctcggccgctctctttcaccatgacataaattttatgcctttcttac

SEQ ID NO: 358173 - DNA, 1961 bp, Homo sapiens
  misc_feature (1913)..(1913): n is a, c, g, or t
ctctacccttccgaaggatccagtattgaggaaaggtagaggaagaacctacaggctaagcctggcatcaggctttaggttcttcctctacccttccgaaggatccagtattgaggaaagaaaaactgcaggatctgatgactcagattcaaggaacttgtaactttatgcaagagtctgttcttgactttgacaaaccttcaagtgcaattccaacgtcacaaccgccttcagctactccaggtagccccgtagcatctaaagaacaaaatctgtccagtcaaagtgattttcttcaagagccgttacaggcagcaattcccccaggcaagcaaccgtcttcactagcttctccaaatcctcccatggcaaagggctctgaacagggcttccagtcacctccagcaagtagtagttcagtaaccattaacacagcaccctttcaagccatgcagacagtatttaacgttaatgcacctctgcctccacgaaaagaacaagaaataaaagaatccccttattcacctggctacaatcaaagttttaccacagcaagtacacaaacaccaccccagtgccaactgccatctatacatgtagaacaaactgtccattctcaagagactgagcaaattatcatcctgatggaactattcaagtaagcaatggtagccttgccttttacccagcacagacgaatgtgtttcccagacctactcagccatttgtcaatagccggggatctgttagaggatgtactcgtggtgggagattaataaccaattcctatcggtcccctggtggttataaaggttttgatacttatagaggactcccttcaatttccaatggaaattatagccagctgcagttccaagctagagagtattctggagcaccttattcccaaagggataatttccagcagtgttataagcgaggagggacatctggtggtccacgagcaaattcgagagcagggtggagtgattcttctcaggtgagcagcccagaaagagacaacgaaacctttaacagtggtgactctggacaaggagactcccgtagcatgacccctgtggatgtgccagtgacaaatccagcagccaccatactgccagtacacgtctaccctctgcctcagcagatgcgagttgccttctcagcagccagaacctctaatctggcccctggaactttagaccaacctattgtgtttgatcttcttctgaacaacttaggagaaacttttgatcttcagcttggtagatttaattgcccagtgaatggcacttacgttttcatttttcacatgctaaagctggcagtgaatgtgccactgtatgtcaacctcatgaagaatgaagaggtcttggtatcagcctatgccaatgatggtgctccagaccatgaaactgctagcaatcatgcaattcttcagctcttccagggagaccagatatggttacgtctgcacaggggagcaatttatggaagtagctggaaatattctacgttttcaggctatcttctttatcaagattgaaagtcagtacagtattgacaataaaaggatggtgttctaattagtgggattgaaggaaaagtagtctttgccctcatgactgattggtttaggaaaatgtttttgttcctagagggaggaggtccttacttttttgttttccttcctgaggtgaaaaatcaagctgaatgacaattagcactaatctggcactttataaattgtgatgtagcctcgctagtcaagctgtgaatgtatattgtttgcacttaatccttaactgtattaacgttcagcttactaaactgactgcctcaagtccaggcaagttacaatgccttgttgtgcctcaataaaaaagtggcctcgttggcctcagcggtggagntctcggccgctctctttcaccatgacataaattttatgcctttcttac

SEQ ID NO: 358174 - DNA, 1857 bp, Homo sapiens
  misc_feature (1809)..(1809): n is a, c, g, or t
ctctacccttccgaaggatccagtattgaggaaaggtagaggaagaacctacaggctaagcctggcatcaggctttaggttcttcctctacccttccgaaggatccagtattgaggaaagaaaaactgcaggatctgatgactcagattcaaggaacttgtaactttatgcaagagtctgttcttgactttgacaaaccttcaagtgcaattccaacgtcacaaccgccttcagctactccaggtagccccgtagcatctaaagaacaaaatctgtccagtcaaagtgattttcttcaagagccgttacaggctacttcttctccagttacttgtagctcaaatgcttgcttggttactaccgatcaggcttcttctggatctgaaacagagtttatgacctcagagactcctgaggtatttaacgttaatgcacctctgcctccacgaaaagaacaagaaataaaagaatccccttattcacctggctacaatcaaagttttaccacagcaagtacacaaacaccaccccagtgccaactgccatctatacatgtagaacaaactgtccattctcaagagactgcacagacgaatgtgtttcccagacctactcagccatttgtcaatagccggggatctgttagaggatgtactcgtggtgggagattaataaccaattcctatcggtcccctggtggttataaaggttttgatacttatagaggactcccttcaatttccaatggaaattatagccagctgcagttccaagctagagagtattctggagcaccttattcccaaagggataatttccagcagtgttataagcgaggagggacatctggtggtccacgagcaaattcgagagcagggtggagtgattcttctcaggtgagcagcccagaaagagacaacgaaacctttaacagtggtgactctggacaaggagactcccgtagcatgacccctgtggatgtgccagtgacaaatccagcagccaccatactgccagtacacgtctaccctctgcctcagcagatgcgagttgccttctcagcagccagaacctctaatctggcccctggaactttagaccaacctattgtgtttgatcttcttctgaacaacttaggagaaacttttgatcttcagcttggtagatttaattgcccagtgaatggcacttacgttttcatttttcacatgctaaagctggcagtgaatgtgccactgtatgtcaacctcatgaagaatgaagaggtcttggtatcagcctatgccaatgatggtgctccagaccatgaaactgctagcaatcatgcaattcttcagctcttccagggagaccagatatggttacgtctgcacaggggagcaatttatggaagtagctggaaatattctacgttttcaggctatcttctttatcaagattgaaagtcagtacagtattgacaataaaaggatggtgttctaattagtgggattgaaggaaaagtagtctttgccctcatgactgattggtttaggaaaatgtttttgttcctagagggaggaggtccttacttttttgttttccttcctgaggtgaaaaatcaagctgaatgacaattagcactaatctggcactttataaattgtgatgtagcctcgctagtcaagctgtgaatgtatattgtttgcacttaatccttaactgtattaacgttcagcttactaaactgactgcctcaagtccaggcaagttacaatgccttgttgtgcctcaataaaaaagtggcctcgttggcctcagcggtggagntctcggccgctctctttcaccatgacataaattttatgcctttcttac

SEQ ID NO: 358175 - DNA, 1249 bp, Homo sapiens
  misc_feature (1201)..(1201): n is a, c, g, or t
tacacgttaaaacatcatccacaccactcacaccgaaacaaaacaaaaacctcagggttttgatacttatagaggactcccttcaatttccaatggaaattatagccagctgcagttccaagctagagagtattctggagcaccttattcccaaagggataatttccagcagtgttataagcgaggagggacatctggtggtccacgagcaaattcgagagctaactgcttcattatgagaaactcactgttgctaataaaacagcagggtggagtgattcttctcaggtgagcagcccagaaagagacaacgaaacctttaacagtggtgactctggacaaggagactcccgtagcatgacccctgtggatgtgccagtgacaaatccagcagccaccatactgccagtacacgtctaccctctgcctcagcagatgcgagttgccttctcagcagccagaacctctaatctggcccctggaactttagaccaacctattgtgtttgatcttcttctgaacaacttaggagaaacttttgatcttcagcttggtagatttaattgcccagtgaatggcacttacgttttcatttttcacatgctaaagctggcagtgaatgtgccactgtatgtcaacctcatgaagaatgaagaggtcttggtatcagcctatgccaatgatggtgctccagaccatgaaactgctagcaatcatgcaattcttcagctcttccagggagaccagatatggttacgtctgcacaggggagcaatttatggaagtagctggaaatattctacgttttcaggctatcttctttatcaagattgaaagtcagtacagtattgacaataaaaggatggtgttctaattagtgggattgaaggaaaagtagtctttgccctcatgactgattggtttaggaaaatgtttttgttcctagagggaggaggtccttacttttttgttttccttcctgaggtgaaaaatcaagctgaatgacaattagcactaatctggcactttataaattgtgatgtagcctcgctagtcaagctgtgaatgtatattgtttgcacttaatccttaactgtattaacgttcagcttactaaactgactgcctcaagtccaggcaagttacaatgccttgttgtgcctcaataaaaaagtggcctcgttggcctcagcggtggagntctcggccgctctctttcaccatgacataaattttatgcctttcttac

SEQ ID NO: 358176 - DNA, 391 bp, Homo sapiens
agtgtttgtttttaggtaagagtacattggtgttttacacgtaccctttgggttcattgcatgtttattccttggctcttctgaactgcttgcttcctttcgcctctttttagaacgtttaacttttggcctcctcttatgtttcctccttctgcttctctcatgttcaagttcactttctgaagatgattctgaagaagaggaggaattggaagaggaatccgagccttctgaatgagttggtttcttcctttttttctcaaaaacttttaagaaacattaataaaaacattagtactaaattcagtgcctacctttcagagtaaaaaatgtgattactgaatatcataaaatatgctttacatacagcaaacaaaaaatgaaatgtaga

SEQ ID NO: 358177 - DNA, 553 bp, Homo sapiens
ctccacccccagccccagctccagcccccagcccgtccccactgctcatatccgagcagatagaccccggccccaccctcccgtgctgagcctcctttctgccgggaagttcgtccgggagtcaaacatcgctgccctccggttgcgccacggagggggagccaggataggaagctgccgtgaaatcaggaagctgagcgcgccgggccccggatccgaacagaaaaggcttccacccgctcccctgagggatcccacgctgagggactgaaccccgcaccccagccgcgctcaccacccccaccctctcgcctgggctgctctgacctggggttcactttctgaagatgattctgaagaagaggaggaattggaagaggaatccgagccttctgaatgagttggtttcttcctttttttctcaaaaacttttaagaaacattaataaaaacattagtactaaattcagtgcctacctttcagagtaaaaaatgtgattactgaatatcataaaatatgctttacatacagcaaacaaaaaatgaaatgtaga

SEQ ID NO: 358178 - DNA, 655 bp, Homo sapiens
ctccacccccagccccagctccagcccccagcccgtccccactgctcatatccgagcagatagaccccggccccaccctcccgtgctgagcctcctttctgccgggaagttcgtccgggagtcaaacatcgctgccctccggttgcgccacggagggggagccaggataggaagctgccgtgaaatcaggaagctgagcgcgccgggccccggatccgaacagaaaaggcttccacccgctcccctgagggatcccacgctgagggactgaaccccgcaccccagccgcgctcaccacccccaccctctcgcctgggctgctctgacctgggggtggtctatatgctcttaatctctgcatttcctctttccagtgaggaggagtttcactgctgtcatcatcatctgactcagaacaggatcttgatcttggagttcactttctgaagatgattctgaagaagaggaggaattggaagaggaatccgagccttctgaatgagttggtttcttcctttttttctcaaaaacttttaagaaacattaataaaaacattagtactaaattcagtgcctacctttcagagtaaaaaatgtgattactgaatatcataaaatatgctttacatacagcaaacaaaaaatgaaatgtaga

SEQ ID NO: 358179 - DNA, 685 bp, Homo sapiens
tttctggtgcccagcgtggggcaatggagacatcacactccctctgaagcctgcagaaaagatcctgagacaaccgacaaaaagccaacagaagatttcaagaggatattatgcttttctggaccataattatatgattattactgctagctgtagagctttaagtcaagcataataaaaacaagaattaaagagcaaggagactttttggtgaaaggaaagtatcttcaggaggcaggtaaaaggtgcaatgaagactgaagaatgggagaatggatactgttatcagcagagaccagaaggctatataccaggcagtggctgttacacagaaatatccttcccaatggtctgagaggcccggtttgagaagaatgaaaactgattgcagacaaccacggaagcaagaagcaccagaatgcactccctttcttagaattcctgcaaactgaagggtcattgggttacccacttcctcttttgggactaaactatttcctaatctcttatcactagggaatagttcttcccaaaccaggtcacccaaatacagtggtgtgtaagaggtggctgcttaaaaacgcctatagcaatggggaagcggtaagagaggtaaaaagagaacagactcattaagtacaaaaaaattcaaataaaagagtaataaaagcaaatttgttccaac

SEQ ID NO: 358180 - DNA, 1621 bp, Homo sapiens
atagtatactctatattttcatagtaatacacattgatctgtatgcaagagtttgaatttgaaagctctttaaatctacaaaatgtgttcagtatatcttgttttattaatggcaccttcgtgagaaaaacaataagcactttcaagggtaccaaattttaccctgagcatcggatacttcctttagaatctgaaacattaacttcatattaaagtatactgtgggaaattgagtttgatatgatatataatctataaatcaacctaatgttgctataaaacgaattgcaattttttttagagataatcacgttatggaaaggattcgtttaacactcacaaagaaaatataaattgttactatgtttaagttcaataatatacaaatgaaacagatataccatatgttcctaattatttcagtaatccagaaaacataaaaacaaaatgaaatgaaagaaaaggaatacaaccttctctttcagtcttgtttgagtaactgctttcctggtgttatctctactgaagcttgtttggcctttttagatttccttcttcacaatcagatttctgcaagatcattcttcagcaagatttggcactatctttaaacaagcattacttttcttacagatttcaagaggatattatgcttttctggaccataattatatgattattactgctagctgtagagctttaagtcaagcataataaaaacaagaattaaagagcaaggagactttttggtgaaaggtgagtgttgcaacaggtgacccatttggtagaacaacaaaagaacccatgacatcttaatttttctccaccagtggaattgctctgactcagttaaaacgtgtttgggaaaaaagtacatacacacgggaaatttcagattcaactactaattcagactgccctcatccaatagaacaataagcaaagaaaatcatcaaaacctcagaaagcaccatcataacagaaattatcctgtttctttccagacttgtgaaataaattctaaacacagcagtcaaattaaatgtgaaatgttttattcttttcttttttttaagagattgggtcatgctttgttgctcaggctggagtacagtggcatgatcgtagctcactgcagccttgaactcctgggctcaagcaatcctcccgcctcagccttctgagttgctgggattacaggtgtgcgcctccatgtccagctattctttacaaggtctcagtatcatttttctctctttgcccatggcaagaccagcaacttaccatcaatataggtatatatgaaacttgataaaacttttcaaaaaactcaacattaagggctctaatcagaaattctcatcaatttgaacctattccagaggttgaggggagagaagtcatactgaactatataccagtgttaagccaatgttacttttaattattttttgttatcctgaaaaatgaataatatgttgccatgtgcaggtcttgccaattctgctaagtctgttcatgtgaaatggatgctgtgatatcctcagaaagtttgtcttaggtatgttaaacatggtccctgccatcttttctactgtgtattcctatcactggcataccc

SEQ ID NO: 358181 - DNA, 1567 bp, Homo sapiens
atagtatactctatattttcatagtaatacacattgatctgtatgcaagagtttgaatttgaaagctctttaaatctacaaaatgtgttcagtatatcttgttttattaatggcaccttcgtgagaaaaacaataagcactttcaagggtaccaaattttaccctgagcatcggatacttcctttagaatctgaaacattaacttcatattaaagtatactgtgggaaattgagtttgatatgatatataatctataaatcaacctaatgttgctataaaacgaattgcaattttttttagagataatcacgttatggaaaggattcgtttaacactcacaaagaaaatataaattgttactatgtttaagttcaataatatacaaatgaaacagatataccatatgttcctaattatttcagtaatccagaaaacataaaaacaaaatgaaatgaaagaaaaggaatacaaccttctctttcagtcttgtttgagtaactgctttcctggtgttatctctactgaagcttgtttggcctttttagatttccttcttcacaatcagatttctgcaagatcattcttcagcaagatttggcactatctttaaacaagcattacttttcttacagatttcaagaggatattatgcttttctggaccataattatatgattattactgctagctgtagagctttaagtcaagcataataaaaacaagaattaaagagcaaggagactttttggtgaaaggtgagtgttgcaacaggtgacccatttggtagaacaacaaaagaacccatgacatcttaatttttctccaccagtggaattgctctgactcagttaaaacgtgtttgggaaaaaagtacatacacacgggaaatttcagattcaactactaattcagactgccctcatccaatagaacaataagcaaagaaaatcatcaaaacctcagaaagcaccatcataacagaaattatcctgtttctttccagacttttcttttttttaagagattgggtcatgctttgttgctcaggctggagtacagtggcatgatcgtagctcactgcagccttgaactcctgggctcaagcaatcctcccgcctcagccttctgagttgctgggattacaggtgtgcgcctccatgtccagctattctttacaaggtctcagtatcatttttctctctttgcccatggcaagaccagcaacttaccatcaatataggtatatatgaaacttgataaaacttttcaaaaaactcaacattaagggctctaatcagaaattctcatcaatttgaacctattccagaggttgaggggagagaagtcatactgaactatataccagtgttaagccaatgttacttttaattattttttgttatcctgaaaaatgaataatatgttgccatgtgcaggtcttgccaattctgctaagtctgttcatgtgaaatggatgctgtgatatcctcagaaagtttgtcttaggtatgttaaacatggtccctgccatcttttctactgtgtattcctatcactggcataccc

SEQ ID NO: 358182 - DNA, 1293 bp, Homo sapiens
tgaatctacatgatagagtggaagccacaaaggaagaagaagaagagattctatctgggtatggagaatgaaaaaaaaaaaaggtgtaaagaggggtctggctctgtcatccaggctggagtgcagtgactcaatcatggctcactgcagccttaacttccggacctcaggtgattctcccacctcagcctgtcaagtagctgggactacagagacggggtctcgctatgttgcctaggctcgtcttgaactcctggcctcaaacaatgctccagcctcgacctctcaaagcgttggtattacagatttcaagaggatattatgcttttctggaccataattatatgattattactgctagctgtagagctttaagtcaagcataataaaaacaagaattaaagagcaaggagactttttggtgaaaggtgagtgttgcaacaggtgacccatttggtagaacaacaaaagaacccatgacatcttaatttttctccaccagtggaattgctctgactcagttaaaacgtgtttgggaaaaaagtacatacacacgggaaatttcagattcaactactaattcagactgccctcatccaatagaacaataagcaaagaaaatcatcaaaacctcagaaagcaccatcataacagaaattatcctgtttctttccagacttgtgaaataaattctaaacacagcagtcaaattaaatgtgaaatgttttattcttttcttttttttaagagattgggtcatgctttgttgctcaggctggagtacagtggcatgatcgtagctcactgcagccttgaactcctgggctcaagcaatcctcccgcctcagccttctgagttgctgggattacaggtgtgcgcctccatgtccagctattctttacaaggtctcagtatcatttttctctctttgcccatggcaagaccagcaacttaccatcaatataggtatatatgaaacttgataaaacttttcaaaaaactcaacattaagggctctaatcagaaattctcatcaatttgaacctattccagaggttgaggggagagaagtcatactgaactatataccagtgttaagccaatgttacttttaattattttttgttatcctgaaaaatgaataatatgttgccatgtgcaggtcttgccaattctgctaagtctgttcatgtgaaatggatgctgtgatatcctcagaaagtttgtcttaggtatgttaaacatggtccctgccatcttttctactgtgtattcctatcactggcataccc

SEQ ID NO: 358183 - DNA, 1568 bp, Homo sapiens
atagtatactctatattttcatagtaatacacattgatctgtatgcaagagtttgaatttgaaagctctttaaatctacaaaatgtgttcagtatatcttgttttattaatggcaccttcgtgagaaaaacaataagcactttcaagggtaccaaattttaccctgagcatcggatacttcctttagaatctgaaacattaacttcatattaaagtatactgtgggaaattgagtttgatatgatatataatctataaatcaacctaatgttgctataaaacgaattgcaattttttttagagataatcacgttatggaaaggattcgtttaacactcacaaagaaaatataaattgttactatgtttaagttcaataatatacaaatgaaacagatataccatatgttcctaattatttcagtaatccagaaaacataaaaacaaaatgaaatgaaagaaaaggaatacaaccttctctttcagtcttgtttgagtaactgctttcctggtgttatctctactgaagcttgtttggcctttttagatttccttcttcacaatcagatttctgcaagatcattcttcagcaagatttggcactatctttaaacaagcattacttttcttacagatttcaagaggatattatgcttttctggaccataattatatgattattactgctagctgtagagctttaagtcaagcataataaaaacaagaattaaagagcaaggagactttttggtgaaaggtgagtgttgcaacaggtgacccatttggtagaacaacaaaagaacccatgacatcttaatttttctccaccagtggaattgctctgactcagttaaaacgtgtttgggaaaaaagtacatacacacgggaaatttcagattcaactactaattcagactgccctcatccaatagaacaataagcaaagaaaatcatcaaaacctcagaaagcaccatcataacagaaattatcctgtttctttccagacttgtgaaataaattctaaacacagcagtcaaattaaatgtgaaatgttttattcttttcttttttttaagagattgggtcatgctttgttgctcaggctggagtacagtggcatgatcgtagctcactgcagccttgaactcctgggctcaagcaatcctcccgcctcagccttctgagttgctgggattacaggtgtgcgcctccatgtccagctattctttacaaggtctcagtatcatttttctctctttgcccatggcaagaccagcaacttaccatcaatataggtatatatgaaacttgataaaacttttcaaaaaactcaacattaagggctctaatcagaaattctcatcaatttgaacctattccagaggttgaggggagagaagtcatactgaactatataccagtgttaagccaatgttacttttaattattttttgttatcctgttcatgtgaaatggatgctgtgatatcctcagaaagtttgtcttaggtatgttaaacatggtccctgccatcttttctactgtgtattcctatcactggcataccc

SEQ ID NO: 358184 - DNA, 1224 bp, Homo sapiens
atagtatactctatattttcatagtaatacacattgatctgtatgcaagagtttgaatttgaaagctctttaaatctacaaaatgtgttcagtatatcttgttttattaatggcaccttcgtgagaaaaacaataagcactttcaagggtaccaaattttaccctgagcatcggatacttcctttagaatctgaaacattaacttcatattaaagtatactgtgggaaattgagtttgatatgatatataatctataaatcaacctaatgttgctataaaacgaattgcaattttttttagagataatcacgttatggaaaggattcgtttaacactcacaaagaaaatataaattgttactatgtttaagttcaataatatacaaatgaaacagatataccatatgttcctaattatttcagtaatccagaaaacataaaaacaaaatgaaatgaaagaaaaggaatacaaccttctctttcagtcttgtttgagtaactgctttcctggtgttatctctactgaagcttgtttggcctttttagatttccttcttcacaatcagatttctgcaagatcattcttcagcaagatttggcactatctttaaacaagcattacttttcttacagatttcaagaggatattatgcttttctggaccataattatatgattattactgctagctgtagagctttaagtcaagcataataaaaacaagaattaaagagcaaggagactttttggtgaaaggaaagtatcttcaggaggcaggtaaaaggtgcaatgaagactgaagaatgggagaatggatactgttatcagcagagaccagaaggctatataccaggcagtggctgttacacagaaatatccttcccaatggtctgagaggcccggtttgagaagaatgaaaactgattgcagacaaccacggaagcaagaagcaccagaatgcactccctttcttagaattcctgcaaactgaagggtcattgggttacccacttcctcttttgggactaaactatttcctaatctcttatcactagggaatagttcttcccaaaccaggtcacccaaatacagtggtgtgtaagaggtggctgcttaaaaacgcctatagcaatggggaagcggtaagagaggtaaaaagagaacagactcattaagtacaaaaaaattcaaataaaagagtaataaaagcaaatttgttccaac

SEQ ID NO: 358185 - DNA, 413 bp, Homo sapiens
cctgctgcaaccattataacaaatgctgtctttttcaagatcaccaacaaacttctggttgtcaaatcacttttatatcctaattttgcttcagctctcagtgtcatgcaacacagttgacttcttccacttttcttttgggctttctgctattctcttacctttctgggtattattcttttgctggctctttctctttgctcaaattctaaattctggcattccctaggactcaggactttagtctcttctttctttagatgattacatccatttccccggctttaagtgtaactcatatactgaaagacttatatttttatctctagctgaaacctattctgtgtgctaggctcataaaattctttttttttttttttgcttttgagacggagtctcgctctgtcacccag

SEQ ID NO: 358186 - DNA, 193 bp, Homo sapiens
gacctcaagtgatctgctcgcttcagcctcccaaagtgttgggattccaggtgtgggccaccgcactcaggccaggcgatttcttgaatacagctttcagaatgtatttattgcaaggactgatactgtaggtggatgacaaggtcaggagatcgagaccatcctggctaacacggtgaaaccccgtctctac

SEQ ID NO: 358187 - DNA, 895 bp, Homo sapiens
ttctttcttttccaagaactttgtcctaaaacagagttctgctgaatttcaccctgaaaatgtaaattaacagcttatctgcacaggtatgggacaaagacaggactagaagtcttccctccgctcacgggagtacaaacgcatctttgactccctcctctactgttcttccataaagatgcaggttcactgagcacaggatgaatgcacagtttactgttcctcttccacctttcccatgtaaaacggggattcagggaaggctcatcaacgcctcaaaagaatgcaaccgctggcctcttttatccaccctcccgtttttttctttccatttttccctactgtctgctctttcctctttgaatacggaagttctcaaaccctctttggaaatcgtgcaggccgcaggtcctactgtgctccttcggacccgcctagcccgcggagcccatccttctcctgaagttgcggatctggtttgccgacactttcccctgggcacgtcctcaacccaggcaaaataaacctctcgatagattgagactcctcagtcattttctttggtgtacaaagcacgggctcgtcttcctgtgtccatcccggggtttcggggcagcagagctccgtctccacaagtgttcaggatctattcagatggttcagcctcagggccaggctgggtcctctgcaccccaagctgtgtcctctgtctatggcaatgacccagatagggccggttctcagatggctctgaagaaatgtttaggggtgtctggggactgtgcaatacctttctccacactcagattacagagttctcccttgaccgtggaccacttcctggacacggctgcacacagctgtcacctccctaagctgagccttaaagaccaag

SEQ ID NO: 358188 - DNA, 508 bp, Homo sapiens
atgttgctttctatatgtgtgatgctcttgcacctttccttgctccttcttcaaatgccctcaggactgaaatgggctgaattctggcccgtcttcttctatgaagcttatttctagacacagggcctctctcagcctccttcctcttctgagttccaatcctgtatggtgcacgagaatcacagagatagaatggcattatgcctgttagaaaaaggagtcactagggaaagagcagcctgcctgggttgcagagccagggggatgagctggatcatactccggcttcctcacgcctgccctttccacgaccccacagtgggactgtcaccccacctgcatgtgcgttccttgagagcaggaagaggctggacacttcacgaacatctaatgctctgtgagattcacaagactacgcacagactcctctttttaaaggctatttctttttcagtgaaccataaataagatatttcagaggctcttaccccagaaaatatatgtaaat

SEQ ID NO: 358189 - DNA, 355 bp, Homo sapiens
tggcatactctaaaatttatatcttatgtgcacagtagaaagtaggttacataaaataagttcattcactactttaaccctaaagtattttgtccaccagtgagggtttattgtaagtcatccctcctctccgtaacagaatataaacatcggtggcaaggactttctctcttcatagctatgttcctagatcctagaagaggtacttaataatttaccttgtttttggttctcactccaaatattctaagtaaactacactgacacggcaatctaaaagtgtcagaggatgggtgcagtggctcacacctgtaatcctggcactttgggaggctgagacaagaggatcacttga

SEQ ID NO: 358190 - DNA, 3469 bp, Homo sapiens
  misc_feature (1)..(2): n is a, c, g, or t
  misc_feature (7)..(7): n is a, c, g, or t
  misc_feature (10)..(10): n is a, c, g, or t
nncacgngtncggaagctgagagggcccgcgggtaggcatggcggcgcaccttaagaagcgggtttatgaggaattcacgaaagtggttcagccacaggaggaaattgctactaagaaactccgactaacaaaaccaagtaaatctgcagcactccacatagatctgtgtaaagctacctccccagcagatgctttgcaatacttgctccagtttgccaggaagcctgtcgaggcggaaagcgtagagggagtagtcaggattctcttggaacattattacaaggagaatgatccatctgtgagactgaaaattgcatcattgttgggtttattatcaaagacagcaggattttcaccagactgcattatggatgatgccatcaacatcctgcagaatgaaacatctgacagatacgtctcatggtgtaagaaataagtgcctgcagttacttggcaatcttggctctttggagaaaagtgtcacaaaagatgcagaaggcctagctgccagagatgtccagaagattataggggattacttcagtgaccaagacccacgtgtcagaacagcagctataaaagccatgttgcagctccatgaaagaggactgaaattacaccaaacaatttataatcaggcctgtaaattactctctgatgactatgaacaagtgcgcagtgctgcagtccagcttatctgggtcgtcagtcagctctatcctgaaagcattgtcccaattccttcttctaatgaagaaatacgcttagttgatgatgcgtttggcaaaatttgtcacatggtcagtgatggctcttgggtggttcgtgttcaggcagcaaaactgttgggctctatggagcaagtcagttctcatttcttggagcagacccttgacaagaagctgatgtcagatctgaggaggaaacgtactgcacatgagcgtgccaaggaactttacagttcgggggagttttccagtggcagaaagtggggagatgatgctcccaaggaagaagtagataccggggctgtgaacttgattgagtcaggagcttgtggagcttttgttcatgggttggaagatgagatgtatgaggttcgtattgctgctgtggaggccctctgcatgttggcccagtcttcaccctcttttgctgagaagtgccttgatttcctagttgacatgttcaacgatgaaattgaggaagtacgtctgcagtctatacataccatgagaaaaatctctaacaacatcaccctccgagaagatcagcttgacactgtcctggctgtgctagaggattcatccagagatattcgagaggctcttcatgaactcttatgctgtactaatgtttcaaccaaagaagggattcatcttgcattggtggagctgctgaaaaatttaaccaagtaccctactgatagggactccatatggaagtgcttgaagtttctgggaagtcggcatccaaccctggtgcttcccttggtgccagagcttctgagcacccacccattttttgacacagctgaaccagacatggatgatccagcttatattgcagttttggtacttattttcaatgctgctaaaacctgtccaacaatgccagcattgttctcagatcacaccttcaggcactatgcctacctccgagacagtctttctcatcttgttcctgccttgaggttaccaggtagaaaactggtgtcatcagctgtttctcccagcatcatacctcaagaggatccttcccagcagttcctgcagcagagccttgaaagagtgtatagtcttcagcacttggaccctcagggagcccaggagctgctggaattcaccatcagagtcgaggtttcaccatggtggccaggctggtctcaaactcctgagctcaagtgatcctcccgcctcggcctcccaaagtgctggaattacaggcgtgagccactgtgcccggcctaggctcattctttcttctgtcttcatcttctgcatcaagcagcctctgcttaacaattcagatctaactgtgccccctgtattccatcctgtggggaaaaggaaacaggaagagaaaggcatctccttcttgatgtcaaagtccccaggaggcatcgttaactatcgtaacgttacctgccgagcatgagatgggaggaagtgtcatagtccagtggacggttttttccaggctactgtgaaacctgatgtgttatgccggccctgaaacagacagcttcccaagtgactcagaccttaagggatctgcaaagacttggagaacttcaatctgaattggcaggagtagctgatttctctgccacctatcttcgctgtcaactacttctcatcaaggccttgcaggaaaagttgtggaatgtagctgcccctttgtatttgaagcagagtgatttggcctcagcagcagcgaaacagattatggaagagacctacaaaatggaattcatgtacagtggtgtggagaataagcaggtggtgattatacatcacatgaggctgcaggccaaagctttgcaacttatagtaacagcacgaactacacgaggacttgaccccttatttgggatgtgtgaaaaatttttacaggaagtagacttttttcagaggtatttcatcgctgatttgccccacttgcaggacagctttgtggacaaactccttgaccttatgccccgactcatgacatccaaacctgcagaagtggtcaaaattctacagaccatgctgcgacagagtgcctttctgcatctcccgcttccagagcagatccacaaagcctcagccaccatcatcgagccagcgggcgagtcagacaaccctttgcggtttacctctgggttggtggttgccctggatgttgatgcaaccctggagcatgtgcaggatcctcagaacactgttaaggtccaggtcttatatccagatggccaggctcagatgattcaccccaagcctgcagacttccggaatcctggcccagggcggcaccggctcatcactcaggtttatctctcccacaccgcttggacagaggcatgccaggtggaagtgaggctgctgctggcctacaactccagtgctcgcattccaaaatgcccctggatggagggtggtgagatgtcaccacaggtggaaaccagcatcgagggcaccattcccttcagcaagcctgtaaaagtttatataatgcccaaacctgcacggcgctaaggcaaaaacagtcttcccaaccgtggcctagagggcccttcttaggtgtcagaatgagccaagcctgaagcacttcacctggaattgatgtgtaggcttaaggagtatgtgacccttacagtctcatctggtatcaaacacaggataaattgtttcttcattaaaaaataaaaaaccttcaagtctacttacccttctcctgtccacaataaagttgagaaaacaccaa

SEQ ID NO: 358191 - DNA, 1694 bp, Homo sapiens
  misc_feature (1)..(2): n is a, c, g, or t
  misc_feature (7)..(7): n is a, c, g, or t
  misc_feature (10)..(10): n is a, c, g, or t
  misc_feature (1694)..(1694): n is a, c, g, or t
nncacgngtncggaagctgagagggcccgcgggtaggcatggcggcgcaccttaagaagcgggtttatgaggaattcacgaaagtggttcagccacaggaggaaattgctactaagaaactccgactaacaaaaccaagtaaatctgcagcactccacatagatctgtgtaaagctacctccccagcagatgctttgcaatacttgctccagtttgccaggaagcctgtcgaggcggaaagcgtagagggagtagtcaggattctcttggaacattattacaagagatggagtctctctgtgttgcccaggctggtcgcgaattcctgagctcaagcaaccctcctgcttggccctcccaaaggattgggattacagacgagaatgatccatctgtgagactgaaaattgcatcattgttgggtttattatcaaagacagcaggattttcaccagactgcattatggatgatgccatcaacatcctgcagaatgaaaagtctcatcaagtcctagctcaactgctggatactttgcttgcaattggcactaagctaccagagaatcaagctatccaaatgcgattagttgatgtggcctgcaaggtaagagtataaaatctattcagatccatcctaaactggtaactgaggactgctaaggaccattaatggttttaggagctgccttatttttttcatctcttggtgttggattaggaataaagttaagtacacttgttataaagtgtatttcgtcatcctttcaaaacaaatgaaaataattacagtacatagttactgtgtatattgtgcctaataatgcactctgcttgttatggtgctttgtattcagtttttcatttggtcctcacaatccttcaagtaagtaccgttatttctcttttacaaaggtgaaaattaagatttatggagtctgatttgtctaagtttgcacagctaggaggttgcagtaccagggtataaactgtattttttctgaccccaaacttgttttgtttttattatgccttgttgcttcaataaacagaccaactatacacaagtaaatgtatgggaaaagttttgtacgttctttttttctgatttttaaatacatgtattaatacattaattgtgccttttgatttaatttggaggttaattagcctctttgtgtatacacagcaacccctagaaccctgtagaattgattttactttggatctttttgataactttgagaatataaaaaagtcaaatgcatttgaattgtgttagagtattatattcttgaaattagaaagctatctcagagatgcaggaaagattacttgatttatcttaaaacaacaggcatacataaaaccaaaaacactttgacaagtacaatactaaaagcttaaatagggccaggtgcggtggctcacacctataatcccagcactttgggaggcagaggtgggcggatcatttgacatcaggagtttgaaaccagcctgaccaacatggtgaaaccccatctctactaaaaatacaaaaaaaattagccgggcacggtgatgcctgcctgtaatcccagctactagggaggctgaggcaggagaatcgcttgaacctgcaagacggaggttatgtgagtggagattgagccactgcactccagtctgggtgatagagtgagactctgtctttn

SEQ ID NO: 358192 - DNA, 940 bp, Homo sapiens
  misc_feature (1)..(2): n is a, c, g, or t
  misc_feature (7)..(7): n is a, c, g, or t
  misc_feature (10)..(10): n is a, c, g, or t
  misc_feature (748)..(748): n is a, c, g, or t
  misc_feature (752)..(752): n is a, c, g, or t
  misc_feature (754)..(754): n is a, c, g, or t
  misc_feature (761)..(761): n is a, c, g, or t
nncacgngtncggaagctgagagggcccgcgggtaggcatggcggcgcaccttaagaagcgggtttatgaggaattcacgaaagtggttcagccacaggaggaaattgctactaagaaactccgactaacaaaaccaagtaaatctgcagcactccacatagatctgtgtaaagctacctccccagcagatgctttgcaatacttgctccagtttgccaggaagcctgtcgaggcggaaagcgtagagggagtagtcaggattctcttggaacattattacaagagatggagtctctctgtgttgcccaggctggtcgcgaattcctgagctcaagcaaccctcctgcttggccctcccaaaggattgggattacagacgtgagctaccacatctgaccaaaatcaggatttctgttctcaagaagttttcgatctctcagtgatctattttccgttagtctttttcttagcaatatctaccattattattatattaaagatctattaccaataatcatctataataatacttcttagagcagttaacattatattgcttgttagagtttgaaagcactttccatatgtaatattttatttaatcctggtgacagcaccattgttatctctaaattccagatatggaactaagcttagagctgtttagtatccaaggtcacccagctagtaaatggaaggtatggatttgaacttgggttttttttttaaaaaaccttttgtttgggncttngnatttctntgtcctccgcgaagttttatccggtccctctggtccattctttggggcgccggttttctcttccccattttttccccttccatttggaagcgcgcttttctggttttcaaaaaaggggggcgtcactggggggggtgcttgtgtcgtcgcctcttgtctcgctttccggggggggggtg

SEQ ID NO: 358193 - DNA, 695 bp, Homo sapiens
taagataatatctcaagacagaaaggaagggtcattccctttcatgcattgctcttttgatttgcaaaaacatccctgagaagctccccagccagcatactctcgtgctccattgtctagaactggcttacttgcccaccagcaaaccagtcactggaaaatgggaatgggattgccatgatgggtttagaccaatagtggttcagctcttgggctggacctgccttttccgagcactttgctgcctgcctgatacctgagtaaaatcagggctctctcaggaagaaagatgggggaaatggctcttggttaaataaccagttcttttatctttataataaccagtttttttagatgaattaaccgagttccagaataactgggtgacttatctgaagtcatagagttagcaaaagtatatggttgagaatttccaattccagttcaggttttctgattccagttcctagtacttttcaaaggactaactttactaatttgttgatgtgcattcttatttgtttgtttcaggtgcttgaagtttctgggaagtcggcatccaaccctggtgcttcccttggtgccagagcttctgagcacccacccattttttgacacagctgaaccagacatggatgatccagcttgtatcctctgtgcttaggatgggccctgatgtgttggcaggacagctt

SEQ ID NO: 358194 - DNA, 3159 bp, Homo sapiens
  misc_feature (1)..(2): n is a, c, g, or t
  misc_feature (7)..(7): n is a, c, g, or t
  misc_feature (10)..(10): n is a, c, g, or t
nncacgngtncggaagctgagagggcccgcgggtaggcatggcggcgcaccttaagaagcgggtttatgaggaattcacgaaagtggttcagccacaggaggaaattgctactaagaaactccgactaacaaaaccaagtaaatctgcagcactccacatagatctgtgtaaagctacctccccagcagatgctttgcaatacttgctccagtttgccaggaagcctgtcgaggcggaaagcgtagagggagtagtcaggattctcttggaacattattacaaggagaatgatccatctgtgagactgaaaattgcatcattgttgggtttattatcaaagacagcaggattttcaccagactgcattatggatgatgccatcaacatcctgcagaatgaaaagtctcatcaagtcctagctcaactgctggatactttgcttgcaattggcactaagctaccagagaatcaagctatccaaatgcgattagttgatgtggcctgcaagcatctgacagatacgtctcatggtgtaagaaataagtgcctgcagttacttggcaatcttggctctttggagaaaagtgtcacaaaagatgcagaaggcctagctgccagagatgtccagaagattataggggattacttcagtgaccaagacccacgtgtcagaacagcagctataaaagccatgttgcagctccatgaaagaggactgaaattacaccaaacaatttataatcaggcctgtaaattactctctgatgactatgaacaagtgcgcagtgctgcagtccagcttatctgggtcgtcagtcagctctatcctgaaagcattgtcccaattccttcttctaatgaagaaatacgcttagttgatgatgcgtttggcaaaatttgtcacatggtcagtgatggctcttgggtggttcgtgttcaggcagcaaaactgttgggctctatggagcaagtcagttctcatttcttggagcagacccttgacaagaagctgatgtcagatctgaggaggaaacgtactgcacatgagcgtgccaaggaactttacagttcgggggagttttccagtggcagaaagtggggagatgatgctcccaaggaagaagtagataccggggctgtgaacttgattgagtcaggagcttgtggagcttttgttcatgggttggaagatgagatgtatgaggttcgtattgctgctgtggaggccctctgcatgttggcccagtcttcaccctcttttgctgagaagtgccttgatttcctagttgacatgttcaacgatgaaattgaggaagtacgtctgcagtctatacataccatgagaaaaatctctaacaacatcaccctccgagaagatcagcttgacactgtcctggctgtgctagaggattcatccagagatattcgagaggctcttcatgaactcttatgctgtactaatgtttcaaccaaagaagggattcatcttgcattggtggagctgctgaaaaatttaaccaagtaccctactgatagggactccatatggaagtgcttgaagtttctgggaagtcggcatccaaccctggtgcttcccttggtgccagagcttctgagcacccacccattttttgacacagctgaaccagacatggatgatccagcttatattgcagttttggtacttattttcaatgctgctaaaacctgtccaacaatgccagcattgttctcagatcacaccttcaggcactatgcctacctccgagacagtctttctcatcttgttcctgccttgaggttaccaggtagaaaactggtgtcatcagctgtttctcccagcatcatacctcaagaggatccttcccagcagttcctgcagcagagccttgaaagagtgtatagtcttcagcacttggaccctcagggagcccaggagctgctggaattcaccatcagggatctgcaaagacttggagaacttcaatctgaattggcaggagtagctgatttctctgccacctatcttcgctgtcaactacttctcatcaaggccttgcaggaaaagttgtggaatgtagctgcccctttgtatttgaagcagagtgatttggcctcagcagcagcgaaacagattatggaagagacctacaaaatggaattcatgtacagtggtgtggagaataagcaggtggtgattatacatcacatgaggctgcaggccaaagctttgcaacttatagtaacagcacgaactacacgaggacttgaccccttatttgggatgtgtgaaaaatttttacaggaagtagacttttttcagaggtatttcatcgctgatttgccccacttgcaggacagctttgtggacaaactccttgaccttatgccccgactcatgacatccaaacctgcagaagtggtcaaaattctacagaccatgctgcgacagagtgcctttctgcatctcccgcttccagagcagatccacaaagcctcagccaccatcatcgagccagcgggcgagtcagacaaccctttgcggtttacctctgggttggtggttgccctggatgttgatgcaaccctggagcatgtgcaggatcctcagaacactgttaaggtccaggtcttatatccagatggccaggctcagatgattcaccccaagcctgcagacttccggaatcctggcccagggcggcaccggctcatcactcaggtttatctctcccacaccgcttggacagaggcatgccaggtggaagtgaggctgctgctggcctacaactccagtgctcgcattccaaaatgcccctggatggagggtggtgagatgtcaccacaggtggaaaccagcatcgagggcaccattcccttcagcaagcctgtaaaagtttatataatgcccaaacctgcacggcgctaaggcaaaaacagtcttcccaaccgtggcctagagggcccttcttaggtgtcagaatgagccaagcctgaagcacttcacctggaattgatgtgtaggcttaaggagtatgtgacccttacagtctcatctggtatcaaacacaggataaattgtttcttcattaaaaaataaaaaaccttcaagtctacttacccttctcctgtccacaataaagttgagaaaacaccaa

SEQ ID NO: 358195 - DNA, 3092 bp, Homo sapiens
  misc_feature (1)..(2): n is a, c, g, or t
  misc_feature (7)..(7): n is a, c, g, or t
  misc_feature (10)..(10): n is a, c, g, or t
nncacgngtncggaagctgagagggcccgcgggtaggcatggcggcgcaccttaagaagcgggtttatgaggaattcacgaaagtggttcagccacaggaggaaattgctactaagaaactccgactaacaaaaccaagtaaatctgcagcactccacatagatctgtgtaaagctacctccccagcagatgctttgcaatacttgctccagtttgccaggaagcctgtcgaggcggaaagcgtagagggagtagtcaggattctcttggaacattattacaaggagaatgatccatctgtgagactgaaaattgcatcattgttgggtttattatcaaagacagcaggattttcaccagactgcattatggatgatgccatcaacatcctgcagaatgaaaagtctcatcaagtcctagctcaactgctggatactttgcttgcaattggcactaagctaccagagaatcaagctatccaaatgcgattagttgatgtggcctgcaagcatctgacagatacgtctcatggtgtaagaaataagtgcctgcagttacttggcaatcttggctctttggagaaaagtgtcacaaaagatgcagaaggcctagctgccagagatgtccagaagattataggggattacttcagtgaccaagacccacgtgtcagaacagcagctataaaagccatgttgcagctccatgaaagaggactgaaattacaccaaacaatttataatcaggcctgtaaattactctctgatgactatgaacaagtgcgcagtgctgcagtccagcttatctgggtcgtcagtcagctctatcctgaaagcattgtcccaattccttcttctaatgaagaaatacgcttagttgatgatgcgtttggcaaaatttgtcacatggtcagtgatggctcttgggtggttcgtgttcaggcagcaaaactgttgggctctatggagcaagtcagttctcatttcttggagcagacccttgacaagaagctgatgtcagatctgaggaggaaacgtactgcacatgagcgtgccaaggaactttacagttcgggggagttttccagtggcagaaagtggggagatgatgctcccaaggaagaagtagataccggggctgtgaacttgattgagtcaggagcttgtggagcttttgttcatgggttggaagatgagatgtatgaggttcgtattgctgctgtggaggccctctgcatgttggcccagtcttcaccctcttttgctgagaagtgccttgatttcctagttgacatgttcaacgatgaaattgaggaagtacgtctgcagtctatacataccatgagaaaaatctctaacaacatcaccctccgagaagatcagcttgacactgtcctggctgtgctagaggattcatccagagatattcgagaggctcttcatgaactcttatgctgtactaatgtttcaaccaaagaagggattcatcttgcattggtggagctgctgaaaaatttaaccaagtaccctactgatagggactccatatggaagtgcttgaagtttctgggaagtcggcatccaaccctggtgcttcccttggtgccagagcttctgagcacccacccattttttgacacagctgaaccagacatggatgatccagcttatattgcagttttggtacttattttcaatgctgctaaaacctgtccaacaatgccagcattgttctcagatcacaccttcaggcactatgcctacctccgagacagtctttctcatcttgttcctgccttgaggttaccaggtagaaaactggtgtcatcagctgtttctcccagcatcatacctcaagaggatccttcccagcagttcctgcagcagagccttgaaagagtgtatagtcttcagcacttggaccctcagggagcccaggagctgctggaattcaccatcagggatctgcaaagacttggagaacttcaatctgaattggcaggagtagctgatttctctgccacctatcttcgctgtcaactacttctcatcaaggccttgcaggaaaagttgtggaatgtagctgcccctttgtatttgaagcagagtgatttggcctcagcagcagcgaaacagattatggaagagacctacaaaatggaattcatgtacagtggtgtggagaataagcaggtggtgattatacatcacatgaggctgcaggccaaagctttgcaacttatagtaacagcacgaactacacgaggacttgaccccttatttgggatgtgtgaaaaatttttacaggaagtagacttttttcagaggtatttcatcgctgatttgccccacttgcaggacagctttgtggacaaactccttgaccttatgccccgactcatgacatccaaacctgcagaagtggtcaaaattctacagaccatgctgcgacagagtgcctttctgcatctcccgcttccagagcagatccacaaagcctcagccaccatcatcgagccagcgggcgagtcagacaaccctttgcggtttacctctgggttggtggttgccctggatgttgatgcaaccctggagcatgtgcaggatcctcagaacactgttaaggtccaggtcttatatccagatggccaggctcagatgattcaccccaagcctgcagacttccggaatcctggcccagggcggcaccggctcatcactcaggtttatctctcccacaccgcttggacagaggcatgccaggtggaagtgaggctgctgctggcctacaactccagtgctcgcattccaaaatgcccctggatggagggtggtgagatgtcaccacaggtggaaaccagcatcgagggcaccattcccttcagcaagcctgtaaaagtttatataatgcccaaacctgcacggcgctaaggcaaaaacagtcttcccaaccgtggcctagagggcccttcttaggtgtcagaatgagccaagcctgaagcacttcacctggaattgatgtgtaggcttaaggagtatgtgacccttacagtctcatctggtatcaaacacaggataaattgtttcttcatt

SEQ ID NO: 358196 - DNA, 3203 bp, Homo sapiens
  misc_feature (1)..(2): n is a, c, g, or t
  misc_feature (7)..(7): n is a, c, g, or t
  misc_feature (10)..(10): n is a, c, g, or t
nncacgngtncggaagctgagagggcccgcgggtaggcatggcggcgcaccttaagaagcgggtttatgaggaattcacgaaagtggttcagccacaggaggaaattgctactaagaaactccgactaacaaaaccaagtaaatctgcagcactccacatagatctgtgtaaagctacctccccagcagatgctttgcaatacttgctccagtttgccaggaagcctgtcgaggcggaaagcgtagagggagtagtcaggattctcttggaacattattacaaggagaatgatccatctgtgagactgaaaattgcatcattgttgggtttattatcaaagacagcaggattttcaccagactgcattatggatgatgccatcaacatcctgcagaatgaaaagtctcatcaagtcctagctcaactgctggatactttgcttgcaattggcactaagctaccagagaatcaagctatccaaatgcgattagttgatgtggcctgcaagcatctgacagatacgtctcatggtgtaagaaataagtgcctgcagttacttggcaatcttggctctttggagaaaagtgtcacaaaagatgcagaaggcctagctgccagagatgtccagaagattataggggattacttcagtgaccaagacccacgtgtcagaacagcagctataaaagccatgttgcagctccatgaaagaggactgaaattacaccaaacaatttataatcaggcctgtaaattactctctgatgactatgaacaagtgcgcagtgctgcagtccagcttatctgggtcgtcagtcagctctatcctgaaagcattgtcccaattccttcttctaatgaagaaatacgcttagttgatgatgcgtttggcaaaatttgtcacatggtcagtgatggctcttgggtggttcgtgttcaggcagcaaaactgttgggctctatggagcaagtcagttctcatttcttggagcagacccttgacaagaagctgatgtcagatctgaggaggaaacgtactgcacatgagcgtgccaaggaactttacagttcgggggagttttccagtggcagaaagtggggagatgatgctcccaaggaagaagtagataccggggctgtgaacttgattgagtcaggagcttgtggagcttttgttcatgggttggaagatgagatgtatgaggttcgtattgctgctgtggaggccctctgcatgttggcccagtcttcaccctcttttgctgagaagtgccttgatttcctagttgacatgttcaacgatgaaattgaggaagtacgtctgcagtctatacataccatgagaaaaatctctaacaacatcaccctccgagaagatcagcttgacactgtcctggctgtgctagaggattcatccagagatattcgagaggctcttcatgaactcttatgctgtactaatgtttcaaccaaagaagggattcatcttgcattggtggagctgctgaaaaatttaaccaagtaccctactgatagggactccatatggaagtaatgacttttttgcccatttactcactgagtcccataatgtggtgcttgaagtttctgggaagtcggcatccaaccctggtgcttcccttggtgccagagcttctgagcacccacccattttttgacacagctgaaccagacatggatgatccagcttatattgcagttttggtacttattttcaatgctgctaaaacctgtccaacaatgccagcattgttctcagatcacaccttcaggcactatgcctacctccgagacagtctttctcatcttgttcctgccttgaggttaccaggtagaaaactggtgtcatcagctgtttctcccagcatcatacctcaagaggatccttcccagcagttcctgcagcagagccttgaaagagtgtatagtcttcagcacttggaccctcagggagcccaggagctgctggaattcaccatcagggatctgcaaagacttggagaacttcaatctgaattggcaggagtagctgatttctctgccacctatcttcgctgtcaactacttctcatcaaggccttgcaggaaaagttgtggaatgtagctgcccctttgtatttgaagcagagtgatttggcctcagcagcagcgaaacagattatggaagagacctacaaaatggaattcatgtacagtggtgtggagaataagcaggtggtgattatacatcacatgaggctgcaggccaaagctttgcaacttatagtaacagcacgaactacacgaggacttgaccccttatttgggatgtgtgaaaaatttttacaggaagtagacttttttcagaggtatttcatcgctgatttgccccacttgcaggacagctttgtggacaaactccttgaccttatgccccgactcatgacatccaaacctgcagaagtggtcaaaattctacagaccatgctgcgacagagtgcctttctgcatctcccgcttccagagcagatccacaaagcctcagccaccatcatcgagccagcgggcgagtcagacaaccctttgcggtttacctctgggttggtggttgccctggatgttgatgcaaccctggagcatgtgcaggatcctcagaacactgttaaggtccaggtcttatatccagatggccaggctcagatgattcaccccaagcctgcagacttccggaatcctggcccagggcggcaccggctcatcactcaggtttatctctcccacaccgcttggacagaggcatgccaggtggaagtgaggctgctgctggcctacaactccagtgctcgcattccaaaatgcccctggatggagggtggtgagatgtcaccacaggtggaaaccagcatcgagggcaccattcccttcagcaagcctgtaaaagtttatataatgcccaaacctgcacggcgctaaggcaaaaacagtcttcccaaccgtggcctagagggcccttcttaggtgtcagaatgagccaagcctgaagcacttcacctggaattgatgtgtaggcttaaggagtatgtgacccttacagtctcatctggtatcaaacacaggataaattgtttcttcattaaaaaataaaaaaccttcaagtctacttacccttctcctgtccacaataaagttgagaaaacaccaa

SEQ ID NO: 358197 - DNA, 3254 bp, Homo sapiens
  misc_feature (1)..(2): n is a, c, g, or t
  misc_feature (7)..(7): n is a, c, g, or t
  misc_feature (10)..(10): n is a, c, g, or t
nncacgngtncggaagctgagagggcccgcgggtaggcatggcggcgcaccttaagaagcgggtttatgaggaattcacgaaagtggttcagccacaggaggaaattgctactaagaaactccgactaacaaaaccaagtaaatctgcagcactccacatagatctgtgtaaagctacctccccagcagatgctttgcaatacttgctccagtttgccaggaagcctgtcgaggcggaaagcgtagagggagtagtcaggattctcttggaacattattacaagagatggagtctctctgtgttgcccaggctggtcgcgaattcctgagctcaagcaaccctcctgcttggccctcccaaaggattgggattacagacgagaatgatccatctgtgagactgaaaattgcatcattgttgggtttattatcaaagacagcaggattttcaccagactgcattatggatgatgccatcaacatcctgcagaatgaaaagtctcatcaagtcctagctcaactgctggatactttgcttgcaattggcactaagctaccagagaatcaagctatccaaatgcgattagttgatgtggcctgcaagcatctgacagatacgtctcatggtgtaagaaataagtgcctgcagttacttggcaatcttggctctttggagaaaagtgtcacaaaagatgcagaaggcctagctgccagagatgtccagaagattataggggattacttcagtgaccaagacccacgtgtcagaacagcagctataaaagccatgttgcagctccatgaaagaggactgaaattacaccaaacaatttataatcaggcctgtaaattactctctgatgactatgaacaagtgcgcagtgctgcagtccagcttatctgggtcgtcagtcagctctatcctgaaagcattgtcccaattccttcttctaatgaagaaatacgcttagttgatgatgcgtttggcaaaatttgtcacatggtcagtgatggctcttgggtggttcgtgttcaggcagcaaaactgttgggctctatggagcaagtcagttctcatttcttggagcagacccttgacaagaagctgatgtcagatctgaggaggaaacgtactgcacatgagcgtgccaaggaactttacagttcgggggagttttccagtggcagaaagtggggagatgatgctcccaaggaagaagtagataccggggctgtgaacttgattgagtcaggagcttgtggagcttttgttcatgggttggaagatgagatgtatgaggttcgtattgctgctgtggaggccctctgcatgttggcccagtcttcaccctcttttgctgagaagtgccttgatttcctagttgacatgttcaacgatgaaattgaggaagtacgtctgcagtctatacataccatgagaaaaatctctaacaacatcaccctccgagaagatcagcttgacactgtcctggctgtgctagaggattcatccagagatattcgagaggctcttcatgaactcttatgctgtactaatgtttcaaccaaagaagggattcatcttgcattggtggagctgctgaaaaatttaaccaagtaccctactgatagggactccatatggaagtgcttgaagtttctgggaagtcggcatccaaccctggtgcttcccttggtgccagagcttctgagcacccacccattttttgacacagctgaaccagacatggatgatccagcttatattgcagttttggtacttattttcaatgctgctaaaacctgtccaacaatgccagcattgttctcagatcacaccttcaggcactatgcctacctccgagacagtctttctcatcttgttcctgccttgaggttaccaggtagaaaactggtgtcatcagctgtttctcccagcatcatacctcaagaggatccttcccagcagttcctgcagcagagccttgaaagagtgtatagtcttcagcacttggaccctcagggagcccaggagctgctggaattcaccatcagggatctgcaaagacttggagaacttcaatctgaattggcaggagtagctgatttctctgccacctatcttcgctgtcaactacttctcatcaaggccttgcaggaaaagttgtggaatgtagctgcccctttgtatttgaagcagagtgatttggcctcagcagcagcgaaacagattatggaagagacctacaaaatggaattcatgtacagtggtgtggagaataagcaggtggtgattatacatcacatgaggctgcaggccaaagctttgcaacttatagtaacagcacgaactacacgaggacttgaccccttatttgggatgtgtgaaaaatttttacaggaagtagacttttttcagaggtatttcatcgctgatttgccccacttgcaggacagctttgtggacaaactccttgaccttatgccccgactcatgacatccaaacctgcagaagtggtcaaaattctacagaccatgctgcgacagagtgcctttctgcatctcccgcttccagagcagatccacaaagcctcagccaccatcatcgagccagcgggcgagtcagacaaccctttgcggtttacctctgggttggtggttgccctggatgttgatgcaaccctggagcatgtgcaggatcctcagaacactgttaaggtccaggtcttatatccagatggccaggctcagatgattcaccccaagcctgcagacttccggaatcctggcccagggcggcaccggctcatcactcaggtttatctctcccacaccgcttggacagaggcatgccaggtggaagtgaggctgctgctggcctacaactccagtgctcgcattccaaaatgcccctggatggagggtggtgagatgtcaccacaggtggaaaccagcatcgagggcaccattcccttcagcaagcctgtaaaagtttatataatgcccaaacctgcacggcgctaaggcaaaaacagtcttcccaaccgtggcctagagggcccttcttaggtgtcagaatgagccaagcctgaagcacttcacctggaattgatgtgtaggcttaaggagtatgtgacccttacagtctcatctggtatcaaacacaggataaattgtttcttcattaaaaaataaaaaaccttcaagtctacttacccttctcctgtccacaataaagttgagaaaacaccaa

SEQ ID NO: 358198 - DNA, 2037 bp, Homo sapiens
ggatccagtccacagagtaatacgggctgtgactgatgatcggagcttgtgagtatgtcatgggtgaagatgagatgtatgaggttcgtattgctgctgtggaggccctctgcatgttggcccagtcttcaccctcttttgctgagaagtgccttgatttcctagttgacatgttcaacgatgaaattgaggaagtacgtctgcagtctatacataccatgagaaaaatctctaacaacatcaccctccgagaagatcagcttgacactgtcctggctgtgctagaggattcatccagagatattcgagaggctcttcatgaactcttatgctgtactaatgtttcaaccaaagaagggattcatcttgcattggtggagctgctgaaaaatttaaccaagtaccctactgatagggactccatatggaagtgcttgaagtttctgggaagtcggcatccaaccctggtgcttcccttggtgccagagcttctgagcacccacccattttttgacacagctgaaccagacatggatgatccagcttatattgcagttttggtacttattttcaatgctgctaaaacctgtccaacaatgccagcattgttctcagatcacaccttcaggcactatgcctacctccgagacagtctttctcatcttgttcctgccttgaggttaccaggtagaaaactggtgtcatcagctgtttctcccagcatcatacctcaagaggatccttcccagcagttcctgcagcagagccttgaaagagtgtatagtcttcagcacttggaccctcagggagcccaggagctgctggaattcaccatcagggatctgcaaagacttggagaacttcaatctgaattggcaggagtagctgatttctctgccacctatcttcgctgtcaactacttctcatcaaggccttgcaggaaaagttgtggaatgtagctgcccctttgtatttgaagcagagtgatttggcctcagcagcagcgaaacagattatggaagagacctacaaaatggaattcatgtacagtggtgtggagaataagcaggtggtgattatacatcacatgaggctgcaggccaaagctttgcaacttatagtaacagcacgaactacacgaggacttgaccccttatttgggatgtgtgaaaaatttttacaggaagtagacttttttcagaggtatttcatcgctgatttgccccacttgcaggacagctttgtggacaaactccttgaccttatgccccgactcatgacatccaaacctgcagaagtggtcaaaattctacagaccatgctgcgacagagtgcctttctgcatctcccgcttccagagcagatccacaaagcctcagccaccatcatcgagccagcgggcgagtcagacaaccctttgcggtttacctctgggttggtggttgccctggatgttgatgcaaccctggagcatgtgcaggatcctcagaacactgttaaggtccaggtcttatatccagatggccaggctcagatgattcaccccaagcctgcagacttccggaatcctggcccagggcggcaccggctcatcactcaggtttatctctcccacaccgcttggacagaggcatgccaggtggaagtgaggctgctgctggcctacaactccagtgctcgcattccaaaatgcccctggatggagggtggtgagatgtcaccacaggtggaaaccagcatcgagggcaccattcccttcagcaagcctgtaaaagtttatataatgcccaaacctgcacggcgctaaggcaaaaacagtcttcccaaccgtggcctagagggcccttcttaggtgtcagaatgagccaagcctgaagcacttcacctggaattgatgtgtaggcttaaggagtatgtgacccttacagtctcatctggtatcaaacacaggataaattgtttcttcattaaaaaataaaaaaccttcaagtctacttacccttctcctgtccacaataaagttgagaaaacaccaa

SEQ ID NO: 358199 - DNA, 3283 bp, Homo sapiens
  misc_feature (1)..(2): n is a, c, g, or t
  misc_feature (7)..(7): n is a, c, g, or t
  misc_feature (10)..(10): n is a, c, g, or t
  misc_feature (3199)..(3199): n is a, c, g, or t
  misc_feature (3207)..(3207): n is a, c, g, or t
  misc_feature (3216)..(3216): n is a, c, g, or t
nncacgngtncggaagctgagagggcccgcgggtaggcatggcggcgcaccttaagaagcgggtttatgaggaattcacgaaagtggttcagccacaggaggaaattgctactaagaaactccgactaacaaaaccaagtaaatctgcagcactccacatagatctgtgtaaagctacctccccagcagatgctttgcaatacttgctccagtttgccaggaagcctgtcgaggcggaaagcgtagagggagtagtcaggattctcttggaacattattacaaggagaatgatccatctgtgagactgaaaattgcatcattgttgggtttattatcaaagacagcaggattttcaccagactgcattatggatgatgccatcaacatcctgcagaatgaaaagtctcatcaagtcctagctcaactgctggatactttgcttgcaattggcactaagctaccagagaatcaagctatccaaatgcgattagttgatgtggcctgcaagcatctgacagatacgtctcatggtgtaagaaataagtgcctgcagttacttggcaatcttggctctttggagaaaagtgtcacaaaagatgcagaaggcctagctgccagagatgtccagaagattataggggattacttcagtgaccaagacccacgtgtcagaacagcagctataaaagccatgttgcagctccatgaaagaggactgaaattacaccaaacaatttataatcaggcctgtaaattactctctgatgactatgaacaagtgcgcagtgctgcagtccagcttatctgggtcgtcagtcagctctatcctgaaagcattgtcccaattccttcttctaatgaagaaatacgcttagttgatgatgcgtttggcaaaatttgtcacatggtcagtgatggctcttgggtggttcgtgttcaggcagcaaaactgttgggctctatggagcaagtcagttctcatttcttggagcagacccttgacaagaagctgatgtcagatctgaggaggaaacgtactgcacatgagcgtgccaaggaactttacagttcgggggagttttccagtggcagaaagtggggagatgatgctcccaaggaagaagtagataccggggctgtgaacttgattgagtcaggagcttgtggagcttttgttcatgggttggaagatgagatgtatgaggttcgtattgctgctgtggaggccctctgcatgttggcccagtcttcaccctcttttgctgagaagtgccttgatttcctagttgacatgttcaacgatgaaattgaggaagtacgtctgcagtctatacataccatgagaaaaatctctaacaacatcaccctccgagaagatcagcttgacactgtcctggctgtgctagaggattcatccagagatattcgagaggctcttcatgaactcttatgctgtactaatgtttcaaccaaagaagggattcatcttgcattggtggagctgctgaaaaatttaaccaagtaccctactgatagggactccatatggaagtgcttgaagtttctgggaagtcggcatccaaccctggtgcttcccttggtgccagagcttctgagcacccacccattttttgacacagctgaaccagacatggatgatccagcttatattgcagttttggtacttattttcaatgctgctaaaacctgtccaacaatgccagcattgttctcagatcacaccttcaggcactatgcctacctccgagacagtctttctcatcttgttcctgccttgaggttaccaggtagaaaactggtgtcatcagctgtttctcccagcatcatacctcaagaggatccttcccagcagttcctgcagcagagccttgaaagagtgtatagtcttcagcacttggaccctcagggagcccaggagctgctggaattcaccatcagggatctgcaaagacttggagaacttcaatctgaattggcaggagtagctgatttctctgccacctatcttcgctgtcaactacttctcatcaaggccttgcaggaaaagttgtggaatgtagctgcccctttgtatttgaagcagagtgatttggcctcagcagcagcgaaacagattatggaagagacctacaaaatggaattcatgtacagtggtgtggagaataagcaggtggtgattatacatcacatgaggctgcaggccaaagctttgcaacttatagtaacagcacgaactacacgaggacttgaccccttatttgggatgtgtgaaaaatttttacaggaagtagacttttttcagaggtatttcatcgctgatttgccccacttgcaggacagctttgtggacaaactccttgaccttatgccccgactcatgacatccaaacctgcagaagtggtcaaaattctacagaccatgctgcgacagagtgcctttctgcatctcccgcttccagagcagatccacaaagcctcagccaccatcatcgagccagcgggcgagtcagacaaccctttgcggtttacctctgggttggtggttgccctggatgttgatgcaaccctggagcatgtgcaggatcctcagaacactgttaaggtccaggtcttatatccagatggccaggctcagatgattcaccccaagcctgcagacttccggaatcctggcccagggcggcaccggctcatcactcaggtttatctctcccacaccgcttggacagaggcatgccaggtggaagtgaggctgctgctggcctacaactccagtgctcgcattccaaaatgcccctggatggagggtggtgagatgtcaccacaggtggaaaccagcatcgagggcaccattcccttcagcaagcctgtaaaagtttatataatgcccaaacctgcacggcgctaaggcaaaaacagtcttcccaaccgtggcctagagggcccttcttaggtgtcagaatgagccaagcctgaagcacttcacctggaattgatgtgtaggcttaaggagtatgtgacccttacagtctcatctggtatcaaacacaggataaattgtttcttcattaaaaaataaaaaaccttcaagtctacttacccttctcctgtccacaataaagttgagaaaacaccaaaaagacaaaacataaaaaacttcgagaatagtcctctcanccctcatngtccccttntattcgcagggggttcccctaaggctaacggaggcgaaaattcagggggtattttacacttcgcgcg

SEQ ID NO: 358200 - DNA, 2138 bp, Homo sapiens
taagataatatctcaagacagaaaggaagggtcattccctttcatgcattgctcttttgatttgcaaaaacatccctgagaagctccccagccagcatactctcgtgctccattgtctagaactggcttacttgcccaccagcaaaccagtcactggaaaatgggaatgggattgccatgatgggtttagaccaatagtggttcagctcttgggctggacctgccttttccgagcactttgctgcctgcctgatacctgagtaaaatcagggctctctcaggaagaaagatgggggaaatggctcttggttaaataaccagttcttttatctttataataaccagtttttttagatgaattaaccgagttccagaataactgggtgacttatctgaagtcatagagttagcaaaagtatatggttgagaatttccaattccagttcaggttttctgattccagttcctagtacttttcaaaggactaactttactaatttgttgatgtgcattcttatttgtttgtttcaggtgcttgaagtttctgggaagtcggcatccaaccctggtgcttcccttggtgccagagcttctgagcacccacccattttttgacacagctgaaccagacatggatgatccagcttatattgcagttttggtacttattttcaatgctgctaaaacctgtccaacaatgccagcattgttctcagatcacaccttcaggcactatgcctacctccgagacagtctttctcatcttgttcctgccttgaggttaccaggtagaaaactggtgtcatcagctgtttctcccagcatcatacctcaagaggatccttcccagcagttcctgcagcagagccttgaaagagtgtatagtcttcagcacttggaccctcagggagcccaggagctgctggaattcaccatcagggatctgcaaagacttggagaacttcaatctgaattggcaggagtagctgatttctctgccacctatcttcgctgtcaactacttctcatcaaggccttgcaggaaaagttgtggaatgtagctgcccctttgtatttgaagcagagtgatttggcctcagcagcagcgaaacagattatggaagagacctacaaaatggaattcatgtacagtggtgtggagaataagcaggtggtgattatacatcacatgaggctgcaggccaaagctttgcaacttatagtaacagcacgaactacacgaggacttgaccccttatttgggatgtgtgaaaaatttttacaggaagtagacttttttcagaggtatttcatcgctgatttgccccacttgcaggacagctttgtggacaaactccttgaccttatgccccgactcatgacatccaaacctgcagaagtggtcaaaattctacagaccatgctgcgacagagtgcctttctgcatctcccgcttccagagcagatccacaaagcctcagccaccatcatcgagccagcgggcgagtcagacaaccctttgcggtttacctctgggttggtggttgccctggatgttgatgcaaccctggagcatgtgcaggatcctcagaacactgttaaggtccaggtcttatatccagatggccaggctcagatgattcaccccaagcctgcagacttccggaatcctggcccagggcggcaccggctcatcactcaggtttatctctcccacaccgcttggacagaggcatgccaggtggaagtgaggctgctgctggcctacaactccagtgctcgcattccaaaatgcccctggatggagggtggtgagatgtcaccacaggtggaaaccagcatcgagggcaccattcccttcagcaagcctgtaaaagtttatataatgcccaaacctgcacggcgctaaggcaaaaacagtcttcccaaccgtggcctagagggcccttcttaggtgtcagaatgagccaagcctgaagcacttcacctggaattgatgtgtaggcttaaggagtatgtgacccttacagtctcatctggtatcaaacacaggataaattgtttcttcattaaaaaataaaaaaccttcaagtctacttacccttctcctgtccacaataaagttgagaaaacaccaa

SEQ ID NO: 358201 - DNA, 810 bp, Homo sapiens
ctgttcccggggaggcaaggcgggaggatcccttgagctcaggagtttgagaccagcctgagcaaaatctctaaaaaaaaattctacagaccatgctgcgacagagtgcctttctgcatctcccgcttccagagcagatccacaaagcctcagccaccatcatcgagccagcgggcgagtcagacaaccctttgcggtttacctctgggttggtggttgccctggatgttgatgcaaccctggagcatgtgcaggatcctcagaacactgttaaggtccaggtcttatatccagatggccaggctcagatgattcaccccaagcctgcagacttccggaatcctggcccagggcggcaccggctcatcactcaggtttatctctcccacaccgcttggacagaggcatgccaggtggaagtgaggctgctgctggcctacaactccagtgctcgcattccaaaatgcccctggatggagggtggtgagatgtcaccacaggtggaaaccagcatcgagggcaccattcccttcagcaagcctgtaaaagtttatataatgcccaaacctgcacggcgctaaggcaaaaacagtcttcccaaccgtggcctagagggcccttcttaggtgtcagaatgagccaagcctgaagcacttcacctggaattgatgtgtaggcttaaggagtatgtgacccttacagtctcatctggtatcaaacacaggataaattgtttcttcattaaaaaataaaaaaccttcaagtctacttacccttctcctgtccacaataaagttgagaaaacaccaa

SEQ ID NO: 358202 - DNA, 972 bp, Homo sapiens
  misc_feature (1)..(2): n is a, c, g, or t
  misc_feature (7)..(7): n is a, c, g, or t
  misc_feature (10)..(10): n is a, c, g, or t
nncacgngtncggaagctgagagggcccgcgggtaggcatggcggcgcaccttaagaagcgggtttatgaggaattcacgaaagtggttcagccacaggaggaaattgctactaagaaactccgactaacaaaaccaagtaaatctgcagcactccacatagatctgtgtaaagctacctccccagcagatgctttgcaatacttgctccagtttgccaggaagcctgtcgaggcggaaagcgtagagggagtagtcaggattctcttggaacattattacaagagatggagtctctctgtgttgcccaggctggtcgcgaattcctgagctcaagcaaccctcctgcttggccctcccaaaggattgggattacagacgtgagctaccacatctgaccaaaatcaggatttctgttctcaagaagttttcgatctctcagtgatctattttccgttagtctttttcttagcaatatctaccattattattatattaaagatctattaccaataatcatctataataatacttcttagagcagttaacattatattgcttgttagagtttgaaagcactttccatatgtaatattttatttaatcctggtgacagcaccattgttatctctaaattccagatatggaactaagcttagagctgtttagtatccaaggtcacccagctagtaaatggaaggtatggatttgaacttgggttttttttttaaaaaaccttttgttatggaacatttcagatatatactatgtaagtaaagagaatagtttaattaattcccatgtacccattacctggcttcaaaaattatcattttgtggccaaacttgtttcattttccctcttccccaatccacttctacttctttaccctcaccttctccaccagattcttatgaaaataaattcctggcatcatattattttaatcataaattttgatttatatcttta

SEQ ID NO: 358203 - DNA, 258 bp, Homo sapiens
ttctcttgtatgaactactgataatttttacaaacgtaactctcaaagagcagttttattttctgccttcccatgttctcagggttcatcttagtgttccttcatgaacctcctacaattggtaattgttgttgtcctctgcagaggaaacgtactgcacatgagcgtgccaaggaactttacagttcgggggagttttccagtggcagaaagtggggagatgatgctcccaaggaagaagtagataccggggctgtg

SEQ ID NO: 358204 - DNA, 1860 bp, Homo sapiens
  misc_feature (1)..(2): n is a, c, g, or t
  misc_feature (7)..(7): n is a, c, g, or t
  misc_feature (10)..(10): n is a, c, g, or t
nncacgngtncggaagctgagagggcccgcgggtaggcatggcggcgcaccttaagaagcgggtttatgaggaattcacgaaagtggttcagccacaggaggaaattgctactaagaaactccgactaacaaaaccaagtaaatctgcagcactccacatagatctgtgtaaagctacctccccagcagatgctttgcaatacttgctccagtttgccaggaagcctgtcgaggcggaaagcgtagagggagtagtcaggattctcttggaacattattacaaggagaatgatccatctgtgagactgaaaattgcatcattgttgggtttattatcaaagacagcaggattttcaccagactgcattatggatgatgccatcaacatcctgcagaatgaaaagtctcatcaagtcctagctcaactgctggatactttgcttgcaattggcactaagctaccagagaatcaagctatccaaatgcgattagttgatgtggcctgcaagcatctgacagatacgtctcatggtgtaagaaataagtgcctgcagttacttggcaatcttggctctttggagaaaagtgtcacaaaagatgcagaaggcctagctgccagagatgtccagaagattataggggattacttcagtgaccaagacccacgtgtcagaacagcagctataaaagccatgttgcagctccatgaaagaggactgaaattacaccaaacaatttataatcaggcctgtaaattactctctgatgactatgaacaagtgcgcagtgctgcagtccagcttatctgggtcgtcagtcagctctatcctgaaagcattgtcccaattccttcttctaatgaagaaatacgcttagttgatgatgcgtttggcaaaatttgtcacatggtcagtgatggctcttgggtggttcgtgttcaggcagcaaaactgttgggctctatggagcaagtcagttctcatttcttggagcagacccttgacaagaagctgatgtcagatctgaggaggaaacgtactgcacatgagcgtgccaaggaactttacagttcgggggagttttccagtggcagaaagtggggagatgatgctcccaaggaagaagtagataccggggctgtgaacttgattgagtcaggagcttgtggagcttttgttcatgggttggaagatgagatgtatgaggttcgtattgctgctgtggaggccctctgcatgttggcccagtcttcaccctcttttgctgagaagtgccttgatttcctagttgacatgttcaacgatgaaattgaggaagtacgtctgcagtctatacataccatgagaaaaatctctaacaacatcaccctccgagaagatcagcttgacactgtcctggctgtgctagaggattcatccagagatattcgagaggctcttcatgaactcttatgctgtactaatgtttcaaccaaagaagggattcatcttgcattggtggagctgctgaaaaatttaaccaagtaccctactgatagggactccatatggaagtaatgacttttttgcccatttactcactgagtcccataatgtggtaaatgtataatgctgacatttgttccgtccttatagattgaggatagtacggccctgaattttgcctttactttagaaacctgattcaacttaaccgaactctcaggaatctgattcctaagctgagtatcacattttagattacttactaatttgtgcatctatccacctagcaaatattatgtgcctgctgtgtgctgactatgcaccaacccttgtggtagctgttacaagtatagaaataaattaattagatttcctc

SEQ ID NO: 358205 - DNA, 3163 bp, Homo sapiens
  misc_feature (1)..(2): n is a, c, g, or t
  misc_feature (7)..(7): n is a, c, g, or t
  misc_feature (10)..(10): n is a, c, g, or t
nncacgngtncggaagctgagagggcccgcgggtaggcatggcggcgcaccttaagaagcgggtttatgaggaattcacgaaagtggttcagccacaggaggaaattgctactaagaaactccgactaacaaaaccaagtaaatctgcagcactccacatagatctgtgtaaagctacctccccagcagatgctttgcaatacttgctccagtttgccaggaagcctgtcgaggcggaaagcgtagagggagtagtcaggattctcttggaacattattacaaggagaatgatccatctgtgagactgaaaattgcatcattgttgggtttattatcaaagacagcaggattttcaccagactgcattatggatgatgccatcaacatcctgcagaatgaaaagtctcatcaagtcctagctcaactgctggatactttgcttgcaattggcactaagctaccagagaatcaagctatccaaatgcgattagttgatgtggcctgcaagcatctgacagatacgtctcatggtgtaagaaataagtgcctgcagttacttggcaatcttggctctttggagaaaagtgtcacaaaagatgcagaaggcctagctgccagagatgtccagaagattataggggattacttcagtgaccaagacccacgtgtcagaacagcagctataaaagccatgttgcagctccatgaaagaggactgaaattacaccaaacaatttataatcaggcctgtaaattactctctgatgactatgaacaagtgcgcagtgctgcagtccagcttatctgggtcgtcagtcagctctatcctgaaagcattgtcccaattccttcttctaatgaagaaatacgcttagttgatgatgcgtttggcaaaatttgtcacatggtcagtgatggctcttgggtggttcgtgttcaggcagcaaaactgttgggctctatggagcaagtcagttctcatttcttggagcagacccttgacaagaagctgatgtcagatctgaggaggaaacgtactgcacatgagcgtgccaaggaactttacagttcgggggagttttccagtggcagaaagtggggagatgatgctcccaaggaagaagtagataccggggctgtgaacttgattgagtcaggagcttgtggagcttttgttcatgggttggaagatgagatgtatgaggttcgtattgctgctgtggaggccctctgcatgttggcccagtcttcaccctcttttgctgagaagtgccttgatttcctagttgacatgttcaacgatgaaattgaggaagtacgtctgcagtctatacataccatgagaaaaatctctaacaacatcaccctccgagaagatcagcttgacactgtcctggctgtgctagaggattcatccagagatattcgagaggctcttcatgaactcttatgctgtactaatgtttcaaccaaagaagggattcatcttgcattggtggagctgctgaaaaatttaaccaagtaccctactgatagggactccatatggaagtgcttgaagtttctgggaagtcggcatccaaccctggtgcttcccttggtgccagagcttctgagcacccacccattttttgacacagctgaaccagacatggatgatccagcttatattgcagttttggtacttattttcaatgctgctaaaacctgtccaacaatgccagcattgttctcagatcacaccttcaggcactatgcctacctccgagacagtctttctcatcttgttcctgccttgaggttaccaggtagaaaactggtgtcatcagctgtttctcccagcatcatacctcaagaggatccttcccagcagttcctgcagcagagccttgaaagagtgtatagtcttcagcacttggaccctcagggagcccaggagctgctggaattcaccatcagggatctgcaaagacttggagaacttcaatctgaattggcaggagtagctgatttctctgccacctatcttcgctgtcaactacttctcatcaaggccttgcaggaaaagttgtggaatgtagctgcccctttgtatttgaagcagagtgatttggcctcagcagcagcgaaacagattatggaagagacctacaaaatggaattcatgtacagtggtgtggagaataagcaggtggtgattatacatcacatgaggctgcaggccaaagctttgcaacttatagtaacagcacgaactacacgaggaaacatggtttcactgcgttgtccaggccagtcttgaactcctgaactcaaagtgtccttccacctcggcctcccaaagtgctaggattacagacgacagctttgtggacaaactccttgaccttatgccccgactcatgacatccaaacctgcagaagtggtcaaaattctacagaccatgctgcgacagagtgcctttctgcatctcccgcttccagagcagatccacaaagcctcagccaccatcatcgagccagcgggcgagtcagacaaccctttgcggtttacctctgggttggtggttgccctggatgttgatgcaaccctggagcatgtgcaggatcctcagaacactgttaaggtccaggtcttatatccagatggccaggctcagatgattcaccccaagcctgcagacttccggaatcctggcccagggcggcaccggctcatcactcaggtttatctctcccacaccgcttggacagaggcatgccaggtggaagtgaggctgctgctggcctacaactccagtgctcgcattccaaaatgcccctggatggagggtggtgagatgtcaccacaggtggaaaccagcatcgagggcaccattcccttcagcaagcctgtaaaagtttatataatgcccaaacctgcacggcgctaaggcaaaaacagtcttcccaaccgtggcctagagggcccttcttaggtgtcagaatgagccaagcctgaagcacttcacctggaattgatgtgtaggcttaaggagtatgtgacccttacagtctcatctggtatcaaacacaggataaattgtttcttcattaaaaaataaaaaaccttcaagtctacttacccttctcctgtccacaataaagttgagaaaacaccaa

SEQ ID NO: 358206 - DNA, 3469 bp, Homo sapiens
  misc_feature (1)..(2): n is a, c, g, or t
  misc_feature (7)..(7): n is a, c, g, or t
  misc_feature (10)..(10): n is a, c, g, or t
  misc_feature (3406)..(3406): n is a, c, g, or t
nncacgngtncggaagctgagagggcccgcgggtaggcatggcggcgcaccttaagaagcgggtttatgaggaattcacgaaagtggttcagccacaggaggaaattgctactaagaaactccgactaacaaaaccaagtaaatctgcagcactccacatagatctgtgtaaagctacctccccagcagatgctttgcaatacttgctccagtttgccaggaagcctgtcgaggcggaaagcgtagagggagtagtcaggattctcttggaacattattacaaggagaatgatccatctgtgagactgaaaattgcatcattgttgggtttattatcaaagacagcaggattttcaccagactgcattatggatgatgccatcaacatcctgcagaatgaaaagtctcatcaagtcctagctcaactgctggatactttgcttgcaattggcactaagctaccagagaatcaagctatccaaatgcgattagttgatgtggcctgcaagcatctgacagatacgtctcatggtgtaagaaataagtgcctgcagttacttggcaatcttggctctttggagaaaagtgtcacaaaagatgcagaaggcctagctgccagagatgtccagaagattataggggattacttcagtgaccaagacccacgtgtcagaacagcagctataaaagccatgttgcagctccatgaaagaggactgaaattacaccaaacaatttataatcaggcctgtaaattactctctgatgactatgaacaagtgcgcagtgctgcagtccagcttatctgggtcgtcagtcagctctatcctgaaagcattgtcccaattccttcttctaatgaagaaatacgcttagttgatgatgcgtttggcaaaatttgtcacatggtcagtgatggctcttgggtggttcgtgttcaggcagcaaaactgttgggctctatggagcaagtcagttctcatttcttggagcagacccttgacaagaagctgatgtcagatctgaggaggaaacgtactgcacatgagcgtgccaaggaactttacagttcgggggagttttccagtggcagaaagtggggagatgatgctcccaaggaagaagtagataccggggctgtgaacttgattgagtcaggagcttgtggagcttttgttcatgggttggaagatgagatgtatgaggttcgtattgctgctgtggaggccctctgcatgttggcccagtcttcaccctcttttgctgagaagtgccttgatttcctagttgacatgttcaacgatgaaattgaggaagtacgtctgcagtctatacataccatgagaaaaatctctaacaacatcaccctccgagaagatcagcttgacactgtcctggctgtgctagaggattcatccagagatattcgagaggctcttcatgaactcttatgctgtactaatgtttcaaccaaagaagggattcatcttgcattggtggagctgctgaaaaatttaaccaagtaccctactgatagggactccatatggaagtgcttgaagtttctgggaagtcggcatccaaccctggtgcttcccttggtgccagagcttctgagcacccacccattttttgacacagctgaaccagacatggatgatccagcttatattgcagttttggtacttattttcaatgctgctaaaacctgtccaacaatgccagcattgttctcagatcacaccttcaggcactatgcctacctccgagacagtctttctcatcttgttcctgccttgaggttaccaggtagaaaactggtgtcatcagctgtttctcccagcatcatacctcaagaggatccttcccagcagttcctgcagcagagccttgaaagagtgtatagtcttcagcacttggaccctcagggagcccaggagctgctggaattcaccatcagggatctgcaaagacttggagaacttcaatctgaattggcaggagtagctgatttctctgccacctatcttcgctgtcaactacttctcatcaaggccttgcaggaaaagttgtggaatgtagctgcccctttgtatttgaagcagagtgatttggcctcagcagcagcgaaacagattatggaagagacctacaaaatggaattcatgtacagtggtgtggagaataagcaggtggtgattatacatcacatgaggctgcaggccaaagctttgcaacttatagtaacagcacgaactacacgaggacttgaccccttatttgggatgtgtgaaaaatttttacaggaagtagacttttttcagaggtatttcatcgctgatttgccccacttgcaggacagctttgtggacaaactccttgaccttatgccccgactcatgacatccaaacctgcagaagtggtcaaaattctacagaccatgctgcgacagagtgcctttctgcatctcccgcttccagagcagatccacaaagcctcagccaccatcatcgagccagcgggcgagtcagacaaccctttgcggtttacctctgggttggtggttgccctggatgttgatgcaaccctggagcatgtgcaggatcctcagaacactgttaaggtccaggtcttatatccagatggccaggctcagatgattcaccccaagcctgcagacttccggaatcctggcccagggcggcaccggctcatcactcaggtttatctctcccacaccgcttggacagaggcatgccaggtggaagtgaggctgctgctggcctacaactccagtgctcgcattccaaaatgcccctggatggagggtggtgagatgtcaccacaggtggaaaccagcatcgagggcaccattcccttcagcaagcctgtaaaagtttatataatgcccaaacctgcacggcgctaaggcaaaaacagtcttcccaaccgtggcctagagggcccttcttaggtgtcagaatgagccaagcctgaagcacttcacctggaattgatgtgtaggcttaaggagtatgtgacccttacagtctcatctggtatcaaacacaggataaattgtttcttcattaaaaaataaaaaaccttcaagtctacttacccttctcctgtccacaataaagttgagaaaacaccaaaaaaaaaaaaaaaaccccgagacatagtcctctctccccctatttgtcccctttttaatcgcaagggcatccctaatgttgaccgaagaaaaatcttaggcctaattagcacttacgcaagggcccccaagttttgtaggcccctacggcgattattaaaaccctttgtaggagcgcataaaaatcttaccaaggacccctaaaaccggcatatttaccaataccttaaataacgcccgaatttagntctcaccaagctcttatattacccctcccaaatacaccctgttaaccaccaagccatttttac

SEQ ID NO: 358207 - DNA, 2342 bp, Homo sapiens
  misc_feature (1)..(2): n is a, c, g, or t
  misc_feature (7)..(7): n is a, c, g, or t
  misc_feature (10)..(10): n is a, c, g, or t
nncacgngtncggaagctgagagggcccgcgggtaggcatggcggcgcaccttaagaagcgggtttatgaggaattcacgaaagtggttcagccacaggaggaaattgctactaagaaactccgactaacaaaaccaagtaaatctgcagcactccacatagatctgtgtaaagctacctccccagcagatgctttgcaatacttgctccagtttgccaggaagcctgtcgaggcggaaagcgtagagggagtagtcaggattctcttggaacattattacaaggagaatgatccatctgtgagactgaaaattgcatcattgttgggtttattatcaaagacagcaggattttcaccagactgcattatggatgatgccatcaacatcctgcagaatgaaaagtctcatcaagtcctagctcaactgctggatactttgcttgcaattggcactaagctaccagagaatcaagctatccaaatgcgattagttgatgtggcctgcaagcatctgacagatacgtctcatggtgtaagaaataagtgcctgcagttacttggcaatcttggctctttggagaaaagtgtcacaaaagatgcagaaggcctagctgccagagatgtccagaagattataggggattacttcagtgaccaagacccacgtgtcagaacagcagctataaaagccatgttgcagctccatgaaagaggactgaaattacaccaaacaatttataatcaggcctgtaaattactctctgatgactatgaacaagtgcgcagtgctgcagtccagcttatctgggtcgtcagtcagctctatcctgaaagcattgtcccaattccttcttctaatgaagaaatacgcttagttgatgatgcgtttggcaaaatttgtcacatggtcagtgatggctcttgggtggttcgtgttcaggcagcaaaactgttgggctctatggagcaagtcagttctcatttcttggagcagacccttgacaagaagctgatgtcagatctgaggaggaaacgtactgcacatgagcgtgccaaggaactttacagttcgggggagttttccagtggcagaaagtggggagatgatgctcccaaggaagaagtagataccggggctgtgaacttgattgagtcaggagcttgtggagcttttgttcatgggttggaagatgagatgtatgaggttcgtattgctgctgtggaggccctctgcatgttggcccagtcttcaccctcttttgctgagaagtgccttgatttcctagttgacatgttcaacgatgaaattgaggaagtacgtctgcagtctatacataccatgagaaaaatctctaacaacatcaccctccgagaagatcagcttgacactgtcctggctgtgctagaggattcatccagagatattcgagaggctcttcatgaactcttatgctgtactaatgtttcaaccaaagaagggattcatcttgcattggtggagctgctgaaaaatttaaccaagtaccctactgatagggactccatatggaagtgcttgaagtttctgggaagtcggcatccaaccctggtgcttcccttggtgccagagcttctgagcacccacccattttttgacacagctgaaccagacatggatgatccagcttatattgcagttttggtacttattttcaatgctgctaaaacctgtccaacaatgccagcattgttctcagatcacaccttcaggcactatgcctacctccgagacagtctttctcatcttgttcctgccttgaggttaccaggtagaaaactggtgtcatcagctgtttctcccagcatcatacctcaagaggatccttcccagcagttcctgcagcagagccttgaaagagtgtatagtcttcagcacttggaccctcagggagcccaggagctgctggaattcaccatcagggatctgcaaagacttggagaacttcaatctgaattggcaggagtagctgatttctctgccacctatcttcgctgtcaactacttctcatcaaggccttgcaggaaaagttgtggaatgtagctgcccctttgtatttgaagcagagtgatttggcctcagcagcagcgaaacagattatggaagagacctacaaaatggaattcatgtacagtggtgtggagaataagcaggtggtgattatacatcacatgaggctgcaggccaaagctttgcaacttatagtaacagcacgaactacacgagggtaagatgtggggttggccaaaatatgtggcatgttcctttcaaagatacttcaaatgcattcagacatcacacga

SEQ ID NO: 358208 - DNA, 1525 bp, Homo sapiens
  misc_feature (1)..(2): n is a, c, g, or t
  misc_feature (7)..(7): n is a, c, g, or t
  misc_feature (10)..(10): n is a, c, g, or t
nncacgngtncggaagctgagagggcccgcgggtaggcatggcggcgcaccttaagaagcgggtttatgaggaattcacgaaagtggttcagccacaggaggaaattgctactaagaaactccgactaacaaaaccaagtaaatctgcagcactccacatagatctgtgtaaagctacctccccagcagatgctttgcaatacttgctccagtttgccaggaagcctgtcgaggcggaaagcgtagagggagtagtcaggattctcttggaacattattacaaggagaatgatccatctgtgagactgaaaattgcatcattgttgggtttattatcaaagacagcaggattttcaccagactgcattatggatgatgccatcaacatcctgcagaatgaaaagtctcatcaagtcctagctcaactgctggatactttgcttgcaattggcactaagctaccagagaatcaagctatccaaatgcgattagttgatgtggcctgcaagcatctgacagatacgtctcatggtgtaagaaataagtgcctgcagttacttggcaatcttggctctttggagaaaagtgtcacaaaagatgcagaaggcctagctgccagagatgtccagaagattataggggattacttcagtgaccaagacccacgtgtcagaacagcagctataaaagccatgttgcagctccatgaaagaggactgaaattacaccaaacaatttataatcaggcctgtaaattactctctgatgactatgaacaagtgcgcagtgctgcagtccagcttatctgggtcgtcagtcagctctatcctgaaagcattgtcccaattccttcttctaatgaagaaatacgcttagttgatgatgcgtttggcaaaatttgtcacatggtcagtgatggctcttgggtggttcgtgttcaggcagcaaaactgttgggctctatggagcaagtcagttctcatttcttggagcagacccttgacaagaagctgatgtcagatctgaggaggaaacgtactgcacatgagcgtgccaaggaactttacagttcgggggagttttccagtggcagaaagtggggagatgatgctcccaaggaagaagtagataccggggctgtgaacttgattgagtcaggagcttgtggagcttttgttcatgggttggaagatgagatgtatgatgtcaccacaggtggaaaccagcatcgagggcaccattcccttcagcaagcctgtaaaagtttatataatgcccaaacctgcacggcgctaaggcaaaaacagtcttcccaaccgtggcctagagggcccttcttaggtgtcagaatgagccaagcctgaagcacttcacctggaattgatgtgtaggcttaaggagtatgtgacccttacagtctcatctggtatcaaacacaggataaattgtttcttcattaaaaaataaaaaaccttcaagtctacttacccttctcctgtccacaataaagttgagaaaacaccaa

SEQ ID NO: 358209 - DNA, 4338 bp, Homo sapiens
  misc_feature (991)..(991): n is a, c, g, or t
  misc_feature (4338)..(4338): n is a, c, g, or t
agtagagtaacaatattggctgagatttacacaaatttggtacatcataaatatttcaattttttttttttaattaggcagaattaagcaactcatagaacttgactacttgaacccaggcagtatacgcctctttattcttgatgaagcagataagcttttagaagaaggcagcttccaggagcaaataaattggatttattcttccttgcctgccagtaaacagatgctggcagtatcagctacttatcccgaatttttggctaatgctttgacaaagtacatgagagatcccacttttgtaagactgaattccagtgatccaagtctcataggtgtgtacagcttttaggtacttatattattggtttatttgtgatatgctggagctttcccttgcctagttttgtcttgctgtttcatggttaccattagcatatatatttgttttaactgatagctcttctttgtaggtttgaagcagtattacaaagttgtcaattcataccctttggcacataaggtttttgaggaaaagactcagcatttacaggaactgttcagcagaattccatttaatcaagctttagtcttttctaatttgcacagcaggtaatgtaacttaaaaggtcatctggggaacttgtgaaataaaaggatagtcatggggcaatatttgtaaatttgtaaccatttatgttatatttcatagagcacaacatttggctgatatcctttcttctaaaggctttcctgctgagtgcatttcaggtaagttcatctcttactttaatctttatttagtatactgacttgaagcctccaaagtcaggaggaaaaaataccactttatgagttgtcttgagagtgtgaaattatcttgtatcttttagagtaaaggaattttcaggcttatttttcattggaatttgatatgtcaatattctatttttaaggagtaacttggtatatagtaaaaagttagaaaacnagtgttcagaaagacaattttattagaatctctcttatagccacatataacttaattctataaaaccaagtttgtctgtattgtgttaagataaaaatattttttctttagaattttttttttaataattgttaaaatgctggagattgctaactgaattgactgttttatggttttgtggaaggcaaaagtgattgagttcttgctgcaaagttaaatgattactgctggcataataagaatgaaagagtcgaaggattttttgatcagtgagatcctttttagagttttgtttggtgtcagcttaatttttaacctgttggcatgagcttgtttagttatggtatatcacgagatactggggagactattttctaatgaaccaatacttaaactatagatcacactttaacaccaaattataaacagctgattaaagcatttttattttcctaagaattgctagttatacttcatatgtaactttgcaaatagaatgttatatattcaggcatggcctgatcactatttaggattgatttttgaatttcaagttgattgcctaaaccatagtttaaaagattttaactttggatcttaacctagatttgcacagaaggacagaattaactgtggttggtgtattaaaagtgttaagactgggtgttatgctttttactttttgtggattggataaatatgtattagcttagttgtttttatgtgactttcttttggggtccttttaggcaatatgaatcagaatcagcgtcttgatgctatggctaaactgaagcactttcattgcagagtcctcatttccacagatttggtaaatttcctattcagtttgggtgactaatccatcttgacatatgttctattatcagatgtacagatttcatatattattttatgtaggcgtatctaacaagaataccagaagataattatctttccagtgctgaggaaaatactttcttaaaaatgtctttaatatgtttatctttgtccttgaaattagtcattaggaatgaatttccttttcctctgctcctcagtattcagttcttaatttgtctcttgactgtactggaagaatataatatgcattggtatccatgctgtatagttaatgcaaacaaataattgctatcttcttcaattcaagacttctcgtgggattgatgctgagaaggtgaatctggttgtaaatctggatgtaccattggattgggagacatacatgcatcggattgggagagctggccgttttggtaaaaaaaaaaaaaaaagtttgagtgctttctttaaggggagggatctataatgtgacaggtgggctttgaatattatttttgtgaaaatgatttactacctaacattctctctgcttttaggtacattggggctgacagtgacctactgttgccggggagaggaagaaaatatgatgatgagaattgcccagaaatgtaatatcaaccttctccctttaccagatcccattccttctggtctgatggaagaatgtgtggattgggatgtggaagttaaagctgctgtgcatacatatggtatagcaagtgtacctaaccaacccttaaaaaagcaaattcagaaaatagagagaacccttcaaattcagaaagctcatggtgaccacatggcttcctctagaaataattctgtatctggactatcagtcaaatcaaaaaataataccaaacaaaagcttcctgtgaaaagccactcagaatgtggaatcatagaaaaagcaacgtcaccaaaagaactgggctgtgacaggcaatccgaagagcaaatgaagaattctgttcagactcccgttgaaaactccaccaacagtcagcaccaggtcaaagaagctttacctgtgtcactcccccagattccttgtctgtcttcctttaaaatccatcagccatacacgttgacttttgctgaattggtagaggattatgaacattatattaaagaggggttagagaaacctgtggaaatcatcaggcactacacaggccctggggatcagactgtgaatcctcaaaatggttttgtgagaaataaagttattgaacagagagtccctgtgttggcaagtagtagccaatctggagactctgagagtgacagtgattcttacagctcaagaacctcttcccagagcaaaggaaataagtcatacttggaaggctcttctgataatcagctgaaagactctgaatctacgcctgtggatgatcgtatttctttggaacaaccaccaaatggaagtgacacccccaatccagagaaatatcaagaatcacctggaatccagatgaagacaagacttaaagagggggctagccagagagctaagcagagccggagaaacctacccaggcggtcttccttcagattgcagactgaagcccaggaagatgattggtatgactgtcatagggaaatacgtctgagtttttctgatacctatcaggattatgaggagtactggagagcttactacagggcatggcaagaatattatgctgccgcttctcattcatattattggaatgctcagagacatccaagttggatggcagcttatcacatgaataccatttatctacaagaaatgatgcatagtaaccagtgattataggatatacctgagaccatcaggaactgtcaacaaatgatacctttggatatccatcctcctcgacttatagtacagtggtgtatagtggcatttctgataaacttgaaaagacttgagtctttccactgggacacatccatttttcagattgttttgatttaggccaggtatattatcttcatttttaagagtttctttaagaaacttcatcagattgttgaaagataatttttgggacatagagctgaaagtttcagggtgccattttctataagatcttcccaaaagaaacatttaaaaagatgacatataccaccacttacttaaaaacaataaaagcaatagatttgattagtaatattattgctgtggagttctttacaaagggcttaggctgcatttccttctatagaggtgcattcttgtagaaatttgtagcatggtagatcagaaaatcctcttaggttttaggcaggaaggaatatttaaacattgctttagattttcctaaaggtatttgatttgatctgttagcttccagtaaaaatatttgtttttagtaaaaacaaatttaaatatatttacatgtttgttgtttatcttttgaatgtcttttgaggctgtgaaagctgtccacatttttgctgtgtattaaatagctgtgggtcatcaaaan

SEQ ID NO: 358210 - DNA, 569 bp, Homo sapiens
caactagtatgttgcctagcacagagtaggttcttacttaatatttgttgaatgaatgaatgaatgaatggaatacagtcagccctccctgtcttcaggttttgtatcagctgattcagccaactgtggatcaaaatactcagggcaggatggaggaacaataaaaaataatacaacaatcaaaagatataaacaaaaatacggtgtaaccatttacatagcatttaaattgtattaggtattataaataatctagagatggtttaaaatatgtgggaggatgtacacaggtaatatacagatatatgcaattttatataacagacttgagcatctgccagttttggtatttgggggcttcctggaaccaatcccctgtggataccaagggataactgtaccttaccttatcaataaaaactcatttgaaatgatcatttaaatgaaatatagtgtgtcatgtaatgaatataccagtcccctatgtatttattcctctgactcaaaggtgtaatttatggtttttttttagattttgatcttggctcctacaagagaaattgctgtac

SEQ ID NO: 358211 - DNA, 3204 bp, Homo sapiens
atcacaaagaacggcgagagggcggtggcgccgggggcacggctgggcggctccgcccagaagagggccgagaggcggggcggtgcccccaccgcaggcccgcggcgccctctgcaggccacaggcagcgactcaccagttgcctcatctttcctctcctccctcttggggctttcctcaggccacattttctgtgtgtctgggcagtctctcagcctccgactcccgtccctttcttccacttccaggccgggcgtgttagtgtcttcgcgggaaaactgccaataaagtttttcttcttctcgctcccaagatccccgcctccccttaagcaccgcgagatctgacggcgcggctaccatggcggcggcatttgaagcctcgggagccttagcagcagtggcgactgctatgccggctgagcatgtggccgtgcaggtcccggccccagagccaacacccgggcctgtgaggatcctgcggaccgctcaggatctcagcagcccgcggacccgcacgggggatgtgctgttggcggagccggccgacttcgagtcactgctgctttcgcggccggtgctggaggggctgcgggcggccggcttcgagaggccctcgccggtgcagctcaaggccatcccgctggggcgctgcgggctcgatttaattgttcaagctaaatctggcaccgggaaaacctgtgtgttctccaccatagctttggactctcttgttcttgaaaacttaagtacccagattttgatcttggctcctacaagagaaattgctgtacagatacattctgttattacagccattggaataaaaatggaaggcttagagtgtcatgtctttattggagggaccccattatcacaagacaaaaccagacttaaaaagtgtcatattgctgttggatctcctggcagaattaagcaactcatagaacttgactacttgaacccaggcagtatacgcctctttattcttgatgaagcagataagcttttagaagaaggcagcttccaggagcaaataaattggatttattcttccttgcctgccagtaaacagatgctggcagtatcagctacttatcccgaatttttggctaatgctttgacaaagtacatgagagatcccacttttgtaagactgaattccagtgatccaagtctcataggtttgaagcagtattacaaagttgtcaattcataccctttggcacataaggtttttgaggaaaagactcagcatttacaggaactgttcagcagaattccatttaatcaagctttagtcttttctaatttgcacagcagagcacaacatttggctgatatcctttcttctaaaggctttcctgctgagtgcatttcaggcaatatgaatcagaatcagcgtcttgatgctatggctaaactgaagcactttcattgcagagtcctcatttccacagatttgacttctcgtgggattgatgctgagaaggtgaatctggttgtaaatctggatgtaccattggattgggagacatacatgcatcggattgggagagctggccgttttggtacattggggctgacagtgacctactgttgccggggagaggaagaaaatatgatgatgagaattgcccagaaatgtaatatcaaccttctccctttaccagatcccattccttctggtctgatggaagaatgtgtggattgggatgtggaagttaaagctgctgtgcatacatatggtatagcaagtgtacctaaccaacccttaaaaaagcaaattcagaaaatagagagaacccttcaaattcagaaagctcatggtgaccacatggcttcctctagaaataattctgtatctggactatcagtcaaatcaaaaaataataccaaacaaaagcttcctgtgaaaagccactcagaatgtggaatcatagaaaaagcaacgtcaccaaaagaactgggctgtgacaggcaatccgaagagcaaatgaagaattctgttcagactcccgttgaaaactccaccaacagtcagcaccaggtcaaagaagctttacctgtgtcactcccccagattccttgtctgtcttcctttaaaatccatcagccatacacgttgacttttgctgaattggtagaggattatgaacattatattaaagaggggttagagaaacctgtggaaatcatcaggcactacacaggccctggggatcagactgtgaatcctcaaaatggttttgtgagaaataaagttattgaacagagagtccctgtgttggcaagtagtagccaatctggagactctgagagtgacagtgattcttacagctcaagaacctcttcccagagcaaaggaaataagtcatacttggaaggctcttctgataatcagctgaaagactctgaatctacgcctgtggatgatcgtatttctttggaacaaccaccaaatggaagtgacacccccaatccagagaaatatcaagaatcacctggaatccagatgaagacaagacttaaagagggggctagccagagagctaagcagagccggagaaacctacccaggcggtcttccttcagattgcagactgaagcccaggaagatgattggtatgactgtcatagggaaatacgtctgagtttttctgatacctatcaggattatgaggagtactggagagcttactacagggcatggcaagaatattatgctgccgcttctcattcatattattggaatgctcagagacatccaagttggatggcagcttatcacatgaataccatttatctacaagaaatgatgcatagtaaccagtgattataggatatacctgagaccatcaggaactgtcaacaaatgatacctttggatatccatcctcctcgacttatagtacagtggtgtatagtggcatttctgataaacttgaaaagacttgagtctttccactgggacacatccatttttcagattgttttgatttaggccaggtatattatcttcatttttaagagtttctttaagaaacttcatcagattgttgaaagataatttttgggacatagagctgaaagtttcagggtgccattttctataagatcttcccaaaagaaacatttaaaaagatgacatataccaccacttacttaaaaacaataaaagcaatagatttgattagtaatatta

SEQ ID NO: 358212 - DNA, 3517 bp, Homo sapiens
  misc_feature (3517)..(3517): n is a, c, g, or t
atcacaaagaacggcgagagggcggtggcgccgggggcacggctgggcggctccgcccagaagagggccgagaggcggggcggtgcccccaccgcaggcccgcggcgccctctgcaggccacaggcagcgactcaccagttgcctcatctttcctctcctccctcttggggctttcctcaggccacattttctgtgtgtctgggcagtctctcagcctccgactcccgtccctttcttccacttccaggccgggcgtgttagtgtcttcgcgggaaaactgccaataaagtttttcttcttctcgctcccaagatccccgcctccccttaagcaccgcgagatctgacggcgcggctaccatggcggcggcatttgaagcctcgggagccttagcagcagtggcgactgctatgccggctgagcatgtggccgtgcaggtcccggccccagagccaacacccgggcctgtgaggatcctgcggaccgctcaggatctcagcagcccgcggacccgcacgggggatgtgctgttggcggagccggccgacttcgagtcactgctgctttcgcggccggtgctggaggggctgcgggcggccggcttcgagaggccctcgccggtgcagctcaaggccatcccgctggggcgctgcgggctcgatttaattgttcaagctaaatctggcaccgggaaaacctgtgtgttctccaccatagctttggactctcttgttcttgaaaacttaagtacccagattttgatcttggctcctacaagagaaattgctgtacagatacattctgttattacagccattggaataaaaatggaaggcttagagtgtcatgtctttattggagggaccccattatcacaagacaaaaccagacttaaaaagtgtcatattgctgttggatctcctggcagaattaagcaactcatagaacttgactacttgaacccaggcagtatacgcctctttattcttgatgaagcagataagcttttagaagaaggcagcttccaggagcaaataaattggatttattcttccttgcctgccagtaaacagatgctggcagtatcagctacttatcccgaatttttggctaatgctttgacaaagtacatgagagatcccacttttgtaagactgaattccagtgatccaagtctcataggtttgaagcagtattacaaagttgtcaattcataccctttggcacataaggtttttgaggaaaagactcagcatttacaggaactgttcagcagaattccatttaatcaagctttagtcttttctaatttgcacagcagagcacaacatttggctgatatcctttcttctaaaggctttcctgctgagtgcatttcaggcaatatgaatcagaatcagcgtcttgatgctatggctaaactgaagcactttcattgcagagtcctcatttccacagatttgacttctcgtgggattgatgctgagaaggtgaatctggttgtaaatctggatgtaccattggattgggagacatacatgcatcggattgggagagctggccgttttggtacattggggctgacagtgacctactgttgccggggagaggaagaaaatatgatgatgagaattgcccagaaatgtaatatcaaccttctccctttaccagatcccattccttctggtctgatggaagaatgtgtggattgggatgtggaagttaaagctgctgtgcatacatatggtatagcaagtgtacctaaccaacccttaaaaaagcaaattcagaaaatagagagaacccttcaaattcagaaagctcatggtgaccacatggcttcctctagaaataattctgtatctggactatcagtcaaatcaaaaaataataccaaacaaaagcttcctgtgaaaagccactcagaatgtggaatcatagaaaaagcaacgtcaccaaaagaactgggctgtgacaggcaatccgaagagcaaatgaagaattctgttcagactcccgttgaaaactccaccaacagtcagcaccaggtcaaagaagctttacctgtgtcactcccccagattccttgtctgtcttcctttaaaatccatcagccatacacgttgacttttgctgaattggtagaggattatgaacattatattaaagaggggttagagaaacctgtggaaatcatcaggcactacacaggccctggggatcagactgtgaatcctcaaaatggttttgtgagaaataaagttattgaacagagagtccctgtgttggcaagtagtagccaatctggagactctgagagtgacagtgattcttacagctcaagaacctcttcccagagcaaaggaaataagtcatacttggaaggctcttctgataatcagctgaaagactctgaatctacgcctgtggatgatcgtatttctttggaacaaccaccaaatggaagtgacacccccaatccagagaaatatcaagaatcacctggaatccagatgaagacaagacttaaagagggggctagccagagagctaagcagagccggagaaacctacccaggcggtcttccttcagattgcagactgaagcccaggaagatgattggtatgactgtcatagggaaatacgtctgagtttttctgatacctatcaggattatgaggagtactggagagcttactacagggcatggcaagaatattatgctgccgcttctcattcatattattggaatgctcagagacatccaagttggatggcagcttatcacatgaataccatttatctacaagaaatgatgcatagtaaccagtgattataggatatacctgagaccatcaggaactgtcaacaaatgatacctttggatatccatcctcctcgacttatagtacagtggtgtatagtggcatttctgataaacttgaaaagacttgagtctttccactgggacacatccatttttcagattgttttgatttaggccaggtatattatcttcatttttaagagtttctttaagaaacttcatcagattgttgaaagataatttttgggacatagagctgaaagtttcagggtgccattttctataagatcttcccaaaagaaacatttaaaaagatgacatataccaccacttacttaaaaacaataaaagcaatagatttgattagtaatattattgctgtggagttctttacaaagggcttaggctgcatttccttctatagaggtgcattcttgtagaaatttgtagcatggtagatcagaaaatcctcttaggttttaggcaggaaggaatatttaaacattgctttagattttcctaaaggtatttgatttgatctgttagcttccagtaaaaatatttgtttttagtaaaaacaaatttaaatatatttacatgtttgttgtttatcttttgaatgtcttttgaggctgtgaaagctgtccacatttttgctgtgtattaaatagctgtgggtcatcaaaan

SEQ ID NO: 358213 - DNA, 860 bp, Homo sapiens
tgtgcccgccctatgtttgagttttaaaaaattaatttaattgtggtaaaatatatgtaacataatatttaccatcttaaccatccgcctactgttttttagaggcacggtctcaccctgtcatgcagggtgtagtgcagtggtgcaatcatagctcactgcagcctcgaactcctgggctccagcaatactcctgcctcagcctccctagtagctgggagttccctctctggaggcctgttcccatttctccagagacaatgctgcatcacaatgttccagatctttcacaggtcattgacaggcatcctataggacttccccccaatacccccaccccgagaactctttcagtgggttctccagtgacttagaaacaaattttttccttggtggggttggctactcataccctctccttggcccttttctttgcttaattgaaaatagagatgggcacggtggctcaagcctgtaatcccagcactttgggaggctgagtctattatttttgaaatgttgaattctagcattttacgtatctgagattttaatcagcacctgttactaaggacctgtggccagtatgaatctctctgaaagccagagaagctctctagtcctcactgtagattttagtttctacttgtagggtgccttgtaaatttgcagtggcttcatgggtgttctttcttcttcttagatttgattgtagctgccacgagaacacaaattacatctaaaatttctatatccctctatttatgcagcacagagtaggagtcttaaacttgattttatctatagcactcataattttgagagagggggaagggaatactgccataagtactaaagtg

SEQ ID NO: 358214 - DNA, 4167 bp, Homo sapiens
cacagaggtgcagagaggtgacataacttccccaacatcacctgcttagtaagcatcatgggaggggcagagccacgtgacccaagcttatgaggaggctgtgggcccaccccagccacaagtcccagattctactggggaccgtcatcctttgtggggattgggagggtttggccaggagcacccctgggaagggcagattttagggggttcttctcaggctgaacctggcctggtctggtccacaggatctgtaatggtgaagtcccccatgaatcgggagctggttgccacctatgaggtcactctctcagtgattgacaatgccagcgacctaccagagcgctctgtcagtgtgccaaatgccaagctgactgtcaacgtcctggacgtcaatgacaatacgccccagttcaagccctttgggatcacctactacatggagcggatcctggagggggccacccctgggaccacactcattgctgtggcagccgtggaccctgacaagggccttaatgggctggtcacctacaccctgctggacctggtgcccccagggtatgtccagctggaggactcctcggcagggaaggtcattgccaaccggacagtggactacgaggaggtgcactggctcaactttaccgtgagggcctcagacaacgggtccccgccccgggcagctgagatccctgtctacctggaaatcgtggacatcaatgacaacaaccccatctttgaccagccctcctaccaggaggctgtctttgaggatgtgcctgtgggcacaatcatcctgacagtcactgccactgatgctgactcaggcaactttgcactcattgagtacagccttggagatggagagagcaagtttgccatcaaccccaccacgggtgacatctatgtgctgtcttctctggaccgggagaagaaggaccactatatcctgactgccttggccaaagacaaccctggggatgtagccagcaaccgtcgcgaaaattcagtgcaggtggtgatccaagtgctggatgtcaatgactgccggccacagttctccaagccccagttcagcacaagcgtgtatgagaatgagccggcgggcacctcggtcatcaccatgatggccactgaccaggatgaaggtcccaatggagagttgacctactcacttgagggccctggcgtggaggccttccatgtggacatggactcgggcttggtgaccacacagcggccactgcagtcctacgagaagttcagtctgaccgtggtggccacagatggtggagagcccccactctggggcaccaccatgctcctggtggaggtcatcgacgtcaatgacaaccgccctgtctttgtgcgcccacccaacggcaccatcctccacatcagagaggagatcccgctgcgctccaacgtgtacgaggtctacgccacggacaaggatgagggcctcaacggggcggtgcgctacagcttcctgaagactgcgggcaaccgggactgggagttcttcatcatcgacccaatcagcggcctcatccagactgctcagcgcctggaccgcgagtcgcaggcggtgtacagcctcatcttggtggccagcgacctgggccagccagtgccatacgagactatgcagccgctgcaggtggccctggaggacatcgatgacaacgaaccccttttcgtgaggcctccaaaaggcagcccccagtaccagctgctgacagtgcctgagcactcaccacgcggcaccctcgtgggcaacgtgacaggcgcagtggatgcagatgagggccccaacgcgatcgtgtactacttcatcgcagccggcaacgaagagaagaacttccatctgcagcccgatgggtgtctgctggtgctgcgggacctggaccgggagcgagaagccatcttctccttcatcgtcaaggcctccagcaatcgcagctggacacctccccgtggaccctccccaaccctcgacctggttgctgacctcacactgcaggaggtgcgcgttgtgctagaggacatcaacgaccagccaccacgcttcaccaaggctgagtacactgcaggggtggccaccgacgccaaggtgggctcagagttgatccaggtgctggccctggatgcagacattggcaacaacagccttgtcttctacagcattctggccatccactacttccgggcccttgccaacgactctgaagatgtgggccaggtcttcaccatggggagcatggacggcattctgcgcaccttcgacctcttcatggcctacagccccggctacttcgtggtggacattgtggcccgagacctggcaggccacaacgacacggccatcatcggcatctacatcctgagggacgaccagcgcgtcaagatcgtcattaacgagatccccgaccgtgtgcgcggcttcgaggaggagttcatccacctgctctccaacatcactggggccattgtcaatactgacaatgtgcagttccatgtggacaagaagggccgggtgaactttgcgcagacagaactgcttatccacgtggtgaaccgcgataccaaccgcatcctggacgtggaccgggtgatccagatgatcgatgagaacaaggagcagctacggaatcttttccggaactacaacgtcctggacgtgcagcctgccatctctgtccggctgccggatgacatgtctgccctgcagatggcgatcatcgtcctggctatcctcctgttcctggccgccatgctctttgtcctcatgaactggtactacaggactgtacacaagaggaagctcaaggccattgtggctggctcagctgggaatcgtggcttcatcgacatcatggacatgcctaacaccaacaagtactcctttgatggagccaaccctgtgtggctggatcccttctgtcggaacctggagctggccgcccaggcggagcatgaggatgacctaccggagaacctgagtgagatcgccgacctgtggaacagccccacgcgcacccatggaacttttgggcgtgagccagcagctgtcaagcctgatgatgaccgatacctgcgggctgccatccaggagtatgacaacattgccaagctgggccagatcattcgtgaggggccaatcaaggctgatacagactgagctggacgaggagccaggagaccacagcccagggcagggtagcctgcgcttccgccacaagccaccagtggagctcaaggggcccgatgggatccatgtggtgcacggcagcacgggcacgctgctggccaccgacctcaacagcctgcccgaggaagaccagaagggcctgggccgctcgctggagacgctgaccgctgccgaggccactgccttcgagcgcaacgcccgcacagaatccgccaaatccacacccctgcacaaacttcgcgacgtgatcatggagacccccctggagatcacagagctgtgactagacagggaagccttgtgggtgtgagcagcacccatccaccgtcccctcccagggagcaagggcagggacagggccggtcgggggggaccctccaaggccaggccttggggacaaccttggcttggccctggcagcccgcatcagctgctcagatcccacttttgccagacgctcattcagcatctgacctctaccttcataagatctgttatttttataagaaaaccaaacaaaaatgttaagcatctaaggacaaggtaaggagggtcactggggcccaagagtctggggaccagcttggctcaggctgagctgaaagaggccaaacaggccctcctccctcccggctccaccccgcaagcaccatcccctccggctaagcaggcgcaagggaggcccagcgcggacatcccctgctggccggacacccgactccagtccaagtctcgctacatttccgccacatccctctctgctggacgtccaggtggaggtggcatccccacgtggacaagaaagtcaatgtcaatgaacaagcattctctccatttcactggcttcccaaatgtgtgcccagcttataaacagaagtgactgatgttccctccggttttgaatgtggagtgtttgtgtgtgttccttttttaaattaagttattccctcaat

SEQ ID NO: 358215 - DNA, 2009 bp, Homo sapiens
gagcggcggcggcggctcgggagagagggacgcgggctgcaggcgcgatgcttggctagaggacgcgtccgacggcggccggacgctgaggtggtcggggctagtcagcccggcctgggcatggagcgcggggtggcagagcctctggacgtttggggcgcgcccagtccgagcccccggcgcgcctgaagttgcgagcggcgagcggcgagcggcgagcggcccgcggagacccaggagctgccggcacgccgcggatgagccttcgcgccggcgggaagacgcggcggtggccagggccagagcaggcggcccgcgggggccgatccggcggagagcagagcccgaggcgaggcgaggcgaggcgcggcgccgctgcacacacgcacacggagccatggggcgccatgttgccaccagctgccacgtggcctggcttttggtgctgatctctggatgctggggccaggtgaaccggctgcccttcttcaccaaccacttctttgatacatacctgctgatcagcgaggacacgcctgtgggttcttctgtgacccagttgctggcccaagacatggacaatgaccccctggtgtttggcgtgtctggggaggaggcctctcgcttctttgcagtggagcctgacactggcgtggtgtggctccggcagccactggacagagagaccaagtcagagttcaccgtggagttctctgtcagcgaccaccagggggtgatcacacggaaggtgaacatccaggttggggatgtgaatgacaacgcgcccacatttcacaatcagccctacagcgtccgcatccctgagaatacaccagtggggacgcccatcttcatcgtgaatgccacagaccccgacttgggggcagggggcagcgtcctctactccttccagcccccctcccaattcttcgccattgacagcgcccgcggtatcgtcacagtgatccgggagctggactacgagaccacacaggcctaccagctcacggtcaacgccacagatcaagacaagaccaggcctctgtccaccctggccaacttggccatcatcatcacagatgtccaggacatggaccccatcttcatcaacctgccttacagcaccaacatctacgagcattctcctccgggcacgacggtgcgcatcatcaccgccatagaccaggataaaggacgtccccggggcattggctacaccatcgtttcagggaataccaacagcatctttgccctggactacatcagcggagtgctgaccttgaatggcctgctggaccgggagaaccccctgtacagccatggcttcatcctgactgtgaagggcacggagctgaacgatgaccgcaccccatctgacgctacagtcaccacgaccttcaatatcctggttattgacatcaatgacaatgccccggagttcaacagctccgagtacagcgtggccatcactgagctggcacaggtcggctttgcccttccactcttcatccaggtggtggacaaggatgagaatttgggcctgaacagcatgtttgaggtgtacttggtggggaacaactcccaccacttcatcatctccccgacctccgtccaggggaaggcggacattcgtattcgggtggccatcccactggactacgagaccgtggaccgctacgactttgatctctttgccaatgagagtgtgcctgaccatgtgggctatgccaaggtgaagatcactctcatcaatgaaaatgacaaccggcccatcttcagccagccactgtacaacatcagcctgtacgagaacgtcaccgtggggacctctgtgctgacagtcctggtgagtccccgcttcactgcagggccactgagctctccagggccgactgtggtgaggcacccagagggattttgtccaagggacctcagcaatcagggaaggaggcacccccaaatccctgagctgtgtttgttggtgtattaaataaagtttttggactctt

SEQ ID NO: 358216 - DNA, 9304 bp, Homo sapiens
gttcctgatgtatccccagagtaggcttcgctcagagccacctttggggaagtcagctacttcttcagtgatgaccctgacaggttctcgctggacaaggacacgggactcatcatgctgattgccaggctggactatgagctcatccagcgcttcaccctgacgatcattgcccgggacgggggcggcgaggagaccacaggccgggtcaggatcaatgtgttggatgtcaacgacaacgtgcccaccttccagaaggatgcctacgtgggtgctctgcgggagaacgagccttctgtcacacagctggtgcggctccgggcaacagatgaagactcccctcccaacaaccagatcacctacagcattgtcagtgcatctgcctttggcagctacttcgacatcagcctgtacgagggctatggagtgatcagcgtcagtcgccccctggattatgaacagatatccaatgggctgatttatctgacggtcatggccatggatgctggcaacccccctctcaacagcaccgtccctgtcaccatcgaggtgtttgatgagaatgacaaccctcccaccttcagcaagcccgcctacttcgtctccgtggtggagaacatcatggcaggagccacggtgctgttcctgaatgccacagacctggaccgctcccgggagtacggccaggagtccatcatctactccttggaaggctccacccagtttcggatcaatgcccgctcaggggaaatcaccaccacgtctctgcttgaccgagagaccaagtctgaatacatcctcatcgttcgcgcagtggacgggggtgtgggccacaaccagaaaactggcatcgccaccgtaaacatcaccctcctggacatcaacgacaaccaccccacgtggaaggacgcaccctactacatcaacctggtggagatgacccctccagactctgacgtgaccacggtggtggctgttgacccagacctgggggagaatggcaccctggtgtacagcatccagccacccaacaagttctacagcctcaacagcaccacgggcaagatccgcaccacccacgccatgctggaccgggagaaccccgacccccatgaggccgagctgatgcgcaaaatcgtcgtctctgttactgactgtggcaggccccctctgaaagccaccagcagtgccacagtgtttgtgaacctcttggatctcaatgacaatgaccccacctttcagaacctgccttttgtggccgaggtgcttgaaggcatcccggcgggggtctccatctaccaagtggtggccatcgacctcgatgagggcctgaacggcctggtgtcctaccgcatgccggtgggcatgccccgcatggacttcctcatcaacagcagcagcggcgtggtggtcaccaccaccgagctggaccgcgagcgcatcgcggagtaccagctgcgggtggtggccagtgatgcaggcacgcccaccaagagctccaccagcacgctcaccatccatgtgctggatgtgaacgacgagacgcccaccttcttcccggccgtgtacaatgtgtctgtgtccgaggacgtgccacgcgagttccgggtggtctggctgaactgcacggacaacgacgtgggcctcaatgcagagctcagctacttcatcacaggtggcaacgtggatgggaagttcagcgtgggttaccgcgatgccgttgtgagaaccgtggtgggcctggaccgggagaccacagccgcctacatgctcatcctggaggccatcgacaacggccctgtagggaagcgacacacgggcacagccaccgtgttcgtcactgtcctggatgtgaatgacaaccggcccatctttctgcagagcagctatgaggccagcgtccctgaggacatccctgaaggccacagcatcttgcagctgaaagccacggacgcagatgagggcgagtttgggcgtgtgtggtaccgcatcctccatggtaaccatggcaacaacttccggatccatgtcagcaatgggctcctgatgcgagggccccggcccctggaccgggagcggaactcatcccacgtgctgatagtggaggcctacaaccacgacctgggccccatgcggagctccgtcagggtgattgtgtacgtggaggacatcaacgatgaggcccccgtgttcacacagcagcagtacagccgtctggggcttcgagagaccgcaggcattggaacgtcagtcatcgtggtccaagccacagaccgagactctggggatggtggcctggtgaactaccgcatcctgtcgggcgcagaggggaagtttgagattgacgagagcacagggcttatcatcaccgtgaattacctggactacgagaccaagaccagctacatgatgaatgtgtcggccactgaccaggccccgcccttcaaccagggcttctgcagcgtctacatcactctgctcaacgagctggacgaggccgtgcagttctccaatgcctcatacgaggctgccatcctggagaatctggcactgggtactgagattgtgcgggtccaggcctactccatcgacaacctcaaccaaatcacgtaccgcttcgacgcctacaccagcacccaggccaaagccctcttcaagatagacgccatcacgggtgtgatcacagtccagggcctggtggaccgtgagaagggcgacttctataccttgacagtggtggcagatgacggcggccccaaggtggactccaccgtgaaggtctacatcactgtgctggacgagaatgacaacagcccccggtttgacttcacctccgactcggcggtcagcatacccgaggactgccctgtgggccagcgagtggctactgtcaaggcctgggaccctgatgctggcagcaatgggcaggtggtcttctccctggcctctggcaacatcgcgggggcctttgagatcgtcaccaccaatgactccattggcgaagtgtttgtggccaggcccctggacagagaagagctggatcactacatcctccaggttgtggcttctgaccgaggcacccctccacggaagaaggaccacatcctgcaggtgaccatcctggacatcaatgacaaccctccagtcatcgagagcccctttggatacaatgtcagtgtgaatgagaacgtgggtggaggtactgctgtggtccaggtgagagccactgaccgtgacatcgggatcaacagtgttctgtcctactacatcaccgagggcaacaaggacatgaccttccgcatggaccgcatcagcggtgagatcgccacacggcctgccccgcctgaccgcgagcgccagagcttctaccacctggtggccactgtggaggacgagggcaccccaaccctgtcggccaccacgcacgtgtacgtgaccattgtggatgagaatgataacgcgcccatgttccagcagccccactatgaggtgctgctggatgagggcccagacacgctcaacaccagcctcatcaccatccaggcactggacctggatgagggtcccaacggcacagtcacctatgccatcgtcgcaggcaacatcgtcaacaccttccgcatcgacagacacatgggtgtcatcactgctgccaaagagctggactacgagatcagccacggccgctacaccctgatcgtcactgccacagaccagtgccccatcttatcccaccgcctcacctctaccaccacggtgcttgtgaatgtgaatgacatcaacgacaatgtgcctaccttcccccgggactatgagggaccatttgaagtcactgagggccagccggggcccagagtgtggaccttcctggcccatgaccgagactcaggacccaacgggcaggtggagtacagcatcatggatggagaccctctgggggagtttgtgatctctcctgtggagggggtgctaagggtccggaaggacgtggagctggaccgggagaccatcgccttctacaacctgaccatctgtgcccgtgaccgggggatgcccccactcagctccacaatgctggtggggatccgggtgctggacatcaacgacaacgaccctgtgctgctgaacctgcccatgaacatcaccatcagcgagaacagccctgtctccagctttgtcgcccatgtcctggccagtgacgctgacagtggctgcaatgcacgcctcaccttcaacatcactgcgggcaaccgcgagcgggccttcttcatcaatgccacgacagggatcgtcactgtgaaccggcccctggaccgcgagcggatcccagagtacaagctgaccatttctgtgaaggacaacccggagaatccacgcatagccaggagggattatgacttgcttctgatcttcctttctgatgagaatgacaaccaccccctcttcactaaaagcacctaccaggcagaggtgatggaaaactctcccgctggcacccctctcacggtgctcaatgggcccatcctggccctggatgcagaccaagacatctacgccgtggtgacctaccagctgctgggtgcccagagtggcctctttgacatcaacagcagcaccggtgtggtgaccgtgaggtcaggtgtcatcattgaccgggaggcattctcgccacccatcctggagctgctgctgctggctgaggacatcgggctgctcaacagcacggcccacctgctcatcaccatcctggatgacaatgacaaccggcccacctttagccctgccaccctcactgtccatctgctagagaactgcccgcctggattctcagtccttcaagtcacagccacagatgaggacagtggcctcaatggggagctggtctaccgaatagaagctggggctcaggaccgcttcctcattcatctggtcaccggggtcatccgtgttggtaatgccaccatcgacagagaggagcaggagtcctacaggctaacggtggtggccaccgaccggggcaccgttcctctctcgggcacagccattgtcaccattctgatcgatgacatcaatgactcccgccccgagttcctcaaccccatccagacagtgagcgtgctggagtcggctgagccaggcactgtcattgccaatatcacggccattgaccacgacctcaacccaaagctagagtaccacattgtcggcattgtggccaaggacgacactgatcgcctggtgcccaaccaggaggacgcctttgctgtgaatatcaacacaggatctgtaatggtgaagtcccccatgaatcgggagctggttgccacctatgaggtcactctctcagtgattgacaatgccagcgacctaccagagcgctctgtcagtgtgccaaatgccaagctgactgtcaacgtcctggacgtcaatgacaatacgccccagttcaagccctttgggatcacctactacatggagcggatcctggagggggccacccctgggaccacactcattgctgtggcagccgtggaccctgacaagggccttaatgggctggtcacctacaccctgctggacctggtgcccccagggtatgtccagctggaggactcctcggcagggaaggtcattgccaaccggacagtggactacgaggaggtgcactggctcaactttaccgtgagggcctcagacaacgggtccccgccccgggcagctgagatccctgtctacctggaaatcgtggacatcaatgacaacaaccccatctttgaccagccctcctaccaggaggctgtctttgaggatgtgcctgtgggcacaatcatcctgacagtcactgccactgatgctgactcaggcaactttgcactcattgagtacagccttggagatggagagagcaagtttgccatcaaccccaccacgggtgacatctatgtgctgtcttctctggaccgggagaagaaggaccactatatcctgactgccttggccaaagacaaccctggggatgtagccagcaaccgtcgcgaaaattcagtgcaggtggtgatccaagtgctggatgtcaatgactgccggccacagttctccaagccccagttcagcacaagcgtgtatgagaatgagccggcgggcacctcggtcatcaccatgatggccactgaccaggatgaaggtcccaatggagagttgacctactcacttgagggccctggcgtggaggccttccatgtggacatggactcgggcttggtgaccacacagcggccactgcagtcctacgagaagttcagtctgaccgtggtggccacagatggtggagagcccccactctggggcaccaccatgctcctggtggaggtcatcgacgtcaatgacaaccgccctgtctttgtgcgcccacccaacggcaccatcctccacatcagagaggagatcccgctgcgctccaacgtgtacgaggtctacgccacggacaaggatgagggcctcaacggggcggtgcgctacagcttcctgaagactgcgggcaaccgggactgggagttcttcatcatcgacccaatcagcggcctcatccagactgctcagcgcctggaccgcgagtcgcaggcggtgtacagcctcatcttggtggccagcgacctgggccagccagtgccatacgagactatgcagccgctgcaggtggccctggaggacatcgatgacaacgaaccccttttcgtgaggcctccaaaaggcagcccccagtaccagctgctgacagtgcctgagcactcaccacgcggcaccctcgtgggcaacgtgacaggcgcagtggatgcagatgagggccccaacgcgatcgtgtactacttcatcgcagccggcaacgaagagaagaacttccatctgcagcccgatgggtgtctgctggtgctgcgggacctggaccgggagcgagaagccatcttctccttcatcgtcaaggcctccagcaatcgcagctggacacctccccgtggaccctccccaaccctcgacctggttgctgacctcacactgcaggaggtgcgcgttgtgctagaggacatcaacgaccagccaccacgcttcaccaaggctgagtacactgcaggggtggccaccgacgccaaggtgggctcagagttgatccaggtgctggccctggatgcagacattggcaacaacagccttgtcttctacagcattctggccatccactacttccgggcccttgccaacgactctgaagatgtgggccaggtcttcaccatggggagcatggacggcattctgcgcaccttcgacctcttcatggcctacagccccggctacttcgtggtggacattgtggcccgagacctggcaggccacaacgacacggccatcatcggcatctacatcctgagggacgaccagcgcgtcaagatcgtcattaacgagatccccgaccgtgtgcgcggcttcgaggaggagttcatccacctgctctccaacatcactggggccattgtcaatactgacaatgtgcagttccatgtggacaagaagggccgggtgaactttgcgcagacagaactgcttatccacgtggtgaaccgcgataccaaccgcatcctggacgtggaccgggtgatccagatgatcgatgagaacaaggagcagctacggaatcttttccggaactacaacgtcctggacgtgcagcctgccatctctgtccggctgccggatgacatgtctgccctgcagatggcgatcatcgtcctggctatcctcctgttcctggccgccatgctctttgtcctcatgaactggtactacaggactgtacacaagaggaagctcaaggccattgtggctggctcagctgggaatcgtggcttcatcgacatcatggacatgcctaacaccaacaagtactcctttgatggagccaaccctgtgtggctggatcccttctgtcggaacctggagctggccgcccaggcggagcatgaggatgacctaccggagaacctgagtgagatcgccgacctgtggaacagccccacgcgcacccatggaacttttgggcgtgagccagcagctgtcaagcctgatgatgaccgatacctgcgggctgccatccaggagtatgacaacattgccaagctgggccagatcattcgtgaggggccaatcaagggctcgctgctgaaggtggtcctggaggattacctgcggctcaaaaagctctttgcacagcggatggtgcaaaaagcctcctcctgccactcctccatctctgagctgatacagactgagctggacgaggagccaggagaccacagcccagggcagggtagcctgcgcttccgccacaagccaccagtggagctcaaggggcccgatgggatccatgtggtgcacggcagcacgggcacgctgctggccaccgacctcaacagcctgcccgaggaagaccagaagggcctgggccgctcgctggagacgctgaccgctgccgaggccactgccttcgagcgcaacgcccgcacagaatccgccaaatccacacccctgcacaaacttcgcgacgtgatcatggagacccccctggagatcacagagctgtgactagacagggaagccttgtgggtgtgagcagcacccatccaccgtcccctcccagggagcaagggcagggacagggccggtcgggggggaccctccaaggccaggccttggggacaaccttggcttggccctggcagcccgcatcagctgctcagatcccacttttgccagacgctcattcagcatctgacctctaccttcataagatctgttatttttataagaaaaccaaacaaaaatgttaagcatctaaggacaaggtaaggagggtcactggggcccaagagtctggggaccagcttggctcaggctgagctgaaagaggccaaacaggccctcctccctcccggctccaccccgcaagcaccatcccctccggctaagcaggcgcaagggaggcccagcgcggacatcccctgctggccggacacccgactccagtccaagtctcgctacatttccgccacatccctctctgctggacgtccaggtggaggtggcatccccacgtggacaagaaagtcaatgtcaatgaacaagcattctctccatttcactggcttcccaaatgtgtgcccagcttataaacagaagtgactgatgttccctccggttttgaatgtggagtgtttgtgtgtgttccttttttaaattaagttattccctcaat

SEQ ID NO: 358217 - DNA, 7596 bp, Homo sapiens
gagcggcggcggcggctcgggagagagggacgcgggctgcaggcgcgatgcttggctagaggacgcgtccgacggcggccggacgctgaggtggtcggggctagtcagcccggcctgggcatggagcgcggggtggcagagcctctggacgtttggggcgcgcccagtccgagcccccggcgcgcctgaagttgcgagcggcgagcggcgagcggcgagcggcccgcggagacccaggagctgccggcacgccgcggatgagccttcgcgccggcgggaagacgcggcggtggccagggccagagcaggcggcccgcgggggccgatccggcggagagcagagcccgaggcgaggcgaggcgaggcgcggcgccgctgcacacacgcacacggagccatggggcgccatgttgccaccagctgccacgtggcctggcttttggtgctgatctctggatgctggggccaggtgaaccggctgcccttcttcaccaaccacttctttgatacatacctgctgatcagcgaggacacgcctgtgggttcttctgtgacccagttgctggcccaagacatggacaatgaccccctggtgtttggcgtgtctggggaggaggcctctcgcttctttgcagtggagcctgacactggcgtggtgtggctccggcagccactggacagagagaccaagtcagagttcaccgtggagttctctgtcagcgaccaccagggggtgatcacacggaaggtgaacatccaggttggggatgtgaatgacaacgcgcccacatttcacaatcagccctacagcgtccgcatccctgagaatacaccagtggggacgcccatcttcatcgtgaatgccacagaccccgacttgggggcagggggcagcgtcctctactccttccagcccccctcccaattcttcgccattgacagcgcccgcggtatcgtcacagtgatccgggagctggactacgagaccacacaggcctaccagctcacggtcaacgccacagatcaagacaagaccaggcctctgtccaccctggccaacttggccatcatcatcacagatgtccaggacatggaccccatcttcatcaacctgccttacagcaccaacatctacgagcattctcctccgggcacgacggtgcgcatcatcaccgccatagaccaggataaaggacgtccccggggcattggctacaccatcgtttcagggaataccaacagcatctttgccctggactacatcagcggagtgctgaccttgaatggcctgctggaccgggagaaccccctgtacagccatggcttcatcctgactgtgaagggcacggagctgaacgatgaccgcaccccatctgacgctacagtcaccacgaccttcaatatcctggttattgacatcaatgacaatgccccggagttcaacagctccgagtacagcgtggccatcactgagctggcacaggtcggctttgcccttccactcttcatccaggtggtggacaaggatgagaatttgggcctgaacagcatgtttgaggtgtacttggtggggaacaactcccaccacttcatcatctccccgacctccgtccaggggaaggcggacattcgtattcgggtggccatcccactggactacgagaccgtggaccgctacgactttgatctctttgccaatgagagtgtgcctgaccatgtgggctatgccaaggtgaagatcactctcatcaatgaaaatgacaaccggcccatcttcagccagccactgtacaacatcagcctgtacgagaacgtcaccgtggggacctctgtgctgacagtcctggcaactgacaatgatgcaggcacctttggggaagtcagctacttcttcagtgatgaccctgacaggttctcgctggacaaggacacgggactcatcatgctgattgccaggctggactatgagctcatccagcgcttcaccctgacgatcattgcccgggacgggggcggcgaggagaccacaggccgggtcaggatcaatgtgttggatgtcaacgacaacgtgcccaccttccagaaggatgcctacgtgggtgctctgcgggagaacgagccttctgtcacacagctggtgcggctccgggcaacagatgaagactcccctcccaacaaccagatcacctacagcattgtcagtgcatctgcctttggcagctacttcgacatcagcctgtacgagggctatggagtgatcagcgtcagtcgccccctggattatgaacagatatccaatgggctgatttatctgacggtcatggccatggatgctggcaacccccctctcaacagcaccgtccctgtcaccatcgaggtgtttgatgagaatgacaaccctcccaccttcagcaagcccgcctacttcgtctccgtggtggagaacatcatggcaggagccacggtgctgttcctgaatgccacagacctggaccgctcccgggagtacggccaggagtccatcatctactccttggaaggctccacccagtttcggatcaatgcccgctcaggggaaatcaccaccacgtctctgcttgaccgagagaccaagtctgaatacatcctcatcgttcgcgcagtggacgggggtgtgggccacaaccagaaaactggcatcgccaccgtaaacatcaccctcctggacatcaacgacaaccaccccacgtggaaggacgcaccctactacatcaacctggtggagatgacccctccagactctgacgtgaccacggtggtggctgttgacccagacctgggggagaatggcaccctggtgtacagcatccagccacccaacaagttctacagcctcaacagcaccacgggcaagatccgcaccacccacgccatgctggaccgggagaaccccgacccccatgaggccgagctgatgcgcaaaatcgtcgtctctgttactgactgtggcaggccccctctgaaagccaccagcagtgccacagtgtttgtgaacctcttggatctcaatgacaatgaccccacctttcagaacctgccttttgtggccgaggtgcttgaaggcatcccggcgggggtctccatctaccaagtggtggccatcgacctcgatgagggcctgaacggcctggtgtcctaccgcatgccggtgggcatgccccgcatggacttcctcatcaacagcagcagcggcgtggtggtcaccaccaccgagctggaccgcgagcgcatcgcggagtaccagctgcgggtggtggccagtgatgcaggcacgcccaccaagagctccaccagcacgctcaccatccatgtgctggatgtgaacgacgagacgcccaccttcttcccggccgtgtacaatgtgtctgtgtccgaggacgtgccacgcgagttccgggtggtctggctgaactgcacggacaacgacgtgggcctcaatgcagagctcagctacttcatcacaggtggcaacgtggatgggaagttcagcgtgggttaccgcgatgccgttgtgagaaccgtggtgggcctggaccgggagaccacagccgcctacatgctcatcctggaggccatcgacaacggccctgtagggaagcgacacacgggcacagccaccgtgttcgtcactgtcctggatgtgaatgacaaccggcccatctttctgcagagcagctatgaggccagcgtccctgaggacatccctgaaggccacagcatcttgcaggaggaagacttggcctccccctgcatatctcccgccccacccagaagggcctttcagagtagcggggagaaagagacgtcacaatttcccggaaaggagttgagaagagagccagggcccagcaaggcccagaacagagctgctttcacagagcccttggccgaggctcccctcttgggaagtaaacaggcacaagaagaaagggctcctttgcccagggagcaggcgcaacagctccaaggctcagagggagagaagggaggaccctgaaaacaatttgggtgtgcacccacacctctgcccagaggcctcagttgctgggtggggagggaggcccggagtgaatgagtctctttaccaactatggggtttccgactcggaggctgagccaaacagggaatctgggcctgcccactggggcaggctcccgggcttgggagggacagaagcgtgggaggctggcaatgctcccctccctgcatcgggaccaggaggcgggcaggaaagggctggggagcagggagctgactcccagaaacacagagagcccagaaagccctgaggatttgcgagagtgtggtggctagctccagaaggaggaagtagagggttctctcgatcagggcctcagcttgtgaggacttggagcatacccccctggcctggtgcctgaaacccaattgagagccctccccctcctggacttttccttcttcaggcctcagggcagcctcaacccccaccccaacctccaggaagacagtgcctagtggccagcagggcctgctggtgaggtggatggctacaggctgaatccagcctaggatttgcagggaggccccaggggaagcaaaccaggaagaggttactgagcaggaagggaggaaggaacaaaacccttagggaggaggcctgccccactttctaaacccaaagacttggtttctatttacacaatactactcttactgaaatcctagagccagcgagttaatatagggcagccctgagttctcccatttctcagggagaaatgcagcgtctcaggatgacttctccaaggtcctcttggtaagtttcttgtgaagccggactcactttttgagatcagattgacttggaaggaagggacagtgggcttctccaatagagcctgcttggagagaaatctttctagagtcatctgagggaagatgaggctctgtgttatgccagcttccaccaagactcctgcctcagagggtggggacacacccaggctgggccacgcttcactctgtacacagaagcctcatacttctgtgcacagaactggggagtcaaagtgaggggctggacaatgtctggctctctgcaagctcccaagctggtaggaaagagaagacatagacaaaaaggacccatgctgccaagagaatgttccttttcctccccaagagaggtaggagacagtaggggcggctccaggcaggagggcttcacagagtgggtgtgtgtgaagcataagccacagttagtgggtgacaggtctttcagttttcctggagttttggatcaagatgaggctagaaagattaattggagccagctcccagagggcactgcacactgcgctgaggagctttggctatatccatttggcattagggagccagtgaaggttttggagctggggagtggcaagccagagctcactccttggggagacgtggctggctgcactgtgggtcacagcaggatgggggtggggcagctttgtggtgggatcctggccagctgactgggacaggagctgggcagcccaggtcctccctctgcccacccttcaaatttgggacctgaccaaagtgtttaaccctcgcgttgtgaggagaggtcaagggtttgggattctgagaagcccatcctggggtgggactgctttgacgggtcatcagcaaagcactcaccaaaaccacagatagcatccctagtgtgggcaggacttgggaccccacagctgtcctggagaggtccagaccatcccaccctcggggaggctgccgctttccctgggtgaggtgtggagctgctgtgagctgtcctcctccgagtccaggtggcatcacctccagctgctggaaatgccctgcctcttgccactctgtcacagcacccgccctggcctctgaagggagcctcctcgatcatcttcaatcccttcctgattgatcccaacgtgggtgccctgaagaggggccaccaagacggctgccaagaccatgcttggagagccctgtttgctcctcctcccagctggcacccaggcatctgttccaccaggagggaggcagctgctcccacagggcaccaggcagatgctggcagcacccgggaaacccaaggaagagagccccgaggttttgccccagcactgggccagcacagatgccaggacagtgtcttggccccggtgtaggctgagcatttcacttgactaaagggaacctttgccatttggcaacttctccatgctgggctttggcacctggagggcaaggcttctgtggcgagcgagggtgctgcttctaggaggtggttacgagccccaggttgtaccctgtggagcctcaggccaaaggcccagatgaccacgagtgcacatctcttgaccagaagtctttcatcaagcagcagcgagggggtctgcagagaggaaggtgctcttctgaggatcatctttgggaaagggcgctggcctgggcatgcaaggagcttcggggggtgagtgtgtgtcccagactgcttgggccactgtcttcctgcagcctgcagcaccggtctctgaagcaggaggatctacaggtagacctagggggatgtgggggcatgtttgtggacaccccattacatcttggtagattccatgtagtcacagtggctgcggttgtcctcggggcccggcaggggctgtcgagggacggtgggccggccatggcggaagctgtgcagggagaggcgcaaggagcccaggcgcttccagagccggagctggggctcactggggctcccagggtggtggggcatgcactcgtgagccctgcggcggctcgggtccagcgcggccggcttgcagagcgtcatgaacagcagacaggtggccagcaggaggaagatgcaggccagggcgatgagcatggggagggggtcagttgcctctgcaagggtcccgggagtgacgggagctgagagaaaggcgagggggctgatggctggggagctggcgaggctggggccctctgtgctcatggctcctgcaacagcaacaagacagaagctcaaaggcagatcagctggacccagggcagcgggtatagggaagacttacctagggaatgtggatgggggcaaggcactgttaaactggacagcatcatggccacatcacaggttaagacagcaaggtccagagacatcacaagtctaagtgtacacacagctgagcagtgatggagctgggcccaagctcaggccctcttcctgttccaccctgtgcccatctgccatgcagacaagagggcggtggcctgtccgcattttcaaatcaatcctcatgaatcatcacagggtcttaggcctggaaacttaagaccaactctgtcaataacttgctctgtggccaggaacgagttatggatggtaagaggccgcagctgccagggtccctagcagtaatctaataccaaagctgcaaactgggggcccacgggtgtgtttagttgggtccttgccatgtttttatcaatgtaattatgaatattttcaaaataataacagatttcacaaaaat

SEQ ID NO: 358218 - DNA, 2574 bp, Homo sapiens
gagcggcggcggcggctcgggagagagggacgcgggctgcaggcgcgatgcttggctagaggacgcgtccgacggcggccggacgctgaggtggtcggggctagtcagcccggcctgggcatggagcgcggggtggcagagcctctggacgtttggggcgcgcccagtccgagcccccggcgcgcctgaagttgcgagcggcgagcggcgagcggcgagcggcccgcggagacccaggagctgccggcacgccgcggatgagccttcgcgccggcgggaagacgcggcggtggccagggccagagcaggcggcccgcgggggccgatccggcggagagcagagcccgaggcgaggcgaggcgaggcgcggcgccgctgcacacacgcacacggagccatggggcgccatgttgccaccagctgccacgtggcctggcttttggtgctgatctctggatgctggggccaggtgaaccggctgcccttcttcaccaaccacttctttgatacatacctgctgatcagcgaggacacgcctgtgggttcttctgtgacccagttgctggcccaagacatggacaatgaccccctggtgtttggcgtgtctggggaggaggcctctcgcttctttgcagtggagcctgacactggcgtggtgtggctccggcagccactggacagagagaccaagtcagagttcaccgtggagttctctgtcagcgaccaccagggggtgatcacacggaaggtgaacatccaggttggggatgtgaatgacaacgcgcccacatttcacaatcagccctacagcgtccgcatccctgagaatacaccagtggggacgcccatcttcatcgtgaatgccacagaccccgacttgggggcagggggcagcgtcctctactccttccagcccccctcccaattcttcgccattgacagcgcccgcggtatcgtcacagtgatccgggagctggactacgagaccacacaggcctaccagctcacggtcaacgccacagatcaagacaagaccaggcctctgtccaccctggccaacttggccatcatcatcacagatgtccaggacatggaccccatcttcatcaacctgccttacagcaccaacatctacgagcattctcctccgggcacgacggtgcgcatcatcaccgccatagaccaggataaaggacgtccccggggcattggctacaccatcgtttcagggaataccaacagcatctttgccctggactacatcagcggagtgctgaccttgaatggcctgctggaccgggagaaccccctgtacagccatggcttcatcctgactgtgaagggcacggagctgaacgatgaccgcaccccatctgacgctacagtcaccacgaccttcaatatcctggttattgacatcaatgacaatgccccggagttcaacagctccgagtacagcgtggccatcactgagctggcacaggtcggctttgcccttccactcttcatccaggtggtggacaaggatgagaatttgggcctgaacagcatgtttgaggtgtacttggtggggaacaactcccaccacttcatcatctccccgacctccgtccaggggaaggcggacattcgtattcgggtggccatcccactggactacgagaccgtggaccgctacgactttgatctctttgccaatgagagtgtgcctgaccatgtgggctatgccaaggtgaagatcactctcatcaatgaaaatgacaaccggcccatcttcagccagccactgtacaacatcagcctgtacgagaacgtcaccgtggggacctctgtgctgacagtcctggtgagtccccgcttcactgcagggccactgagctctccagggccgactgtggtgaggcacccagagggattttgtccaagggacctcagcaatcagggaaggaggcacccccaaatccctgagctgtgtttgttggtgtattaaataaagtttttggactcttcaggaaggggctcccttgacctaggttgcaatatggaaaaggagccaacctgaggggtgacgagactgagctgaggacactggttttctgcctttccccgagagagactcagtgagggtgggctgggagccctggaagccccctcaaatgggtgggaaggtgccagccatccttgagaagggcaaccctctccatgtgagcacaggcaccagagaggggcaggcgcctggagggtaccggggcacccccagctgcccatggctggacttgccctttgacaaggggccctcccagtgtcatttgtatctgtcagtactcttggttgcaagggacagaaacccttaagtagttcaagcaaaaaaggattggctcatgtaactcaaaagtataagtgatttcaggccgggctcggtggctcacgcctgtcatccaacaccttgagaaagccgaggtgggcggatcacttgaggtcgggagtttgagaccagcctggccaacatggcaaaaccccgtctctactagaaatacaaaaattagctgggcgtggtggcacgactgtaatccc

SEQ ID NO: 358219 - DNA, 295 bp, Homo sapiens
cagagtggcctctttgacatcaacagcagcaccggtgaggcctctgtgccacccagcactcccagcctgattctggggtggggatggccacactgctggattgagggcctcccttctcagtgctggacccaggctgtccgtggagaccccatttttcacagcccagagtccccatcttgcagctgggttatatcacccagtggcctggcagggggacgtgggaagaggcttggagacgatacacaggacctctgttggtgcacgaactctcagcctgggccgggagccccccagc

SEQ ID NO: 358220 - DNA, 11132 bp, Homo sapiens
gagcggcggcggcggctcgggagagagggacgcgggctgcaggcgcgatgcttggctagaggacgcgtccgacggcggccggacgctgaggtggtcggggctagtcagcccggcctgggcatggagcgcggggtggcagagcctctggacgtttggggcgcgcccagtccgagcccccggcgcgcctgaagttgcgagcggcgagcggcgagcggcgagcggcccgcggagacccaggagctgccggcacgccgcggatgagccttcgcgccggcgggaagacgcggcggtggccagggccagagcaggcggcccgcgggggccgatccggcggagagcagagcccgaggcgaggcgaggcgaggcgcggcgccgctgcacacacgcacacggagccatggggcgccatgttgccaccagctgccacgtggcctggcttttggtgctgatctctggatgctggggccaggtgaaccggctgcccttcttcaccaaccacttctttgatacatacctgctgatcagcgaggacacgcctgtgggttcttctgtgacccagttgctggcccaagacatggacaatgaccccctggtgtttggcgtgtctggggaggaggcctctcgcttctttgcagtggagcctgacactggcgtggtgtggctccggcagccactggacagagagaccaagtcagagttcaccgtggagttctctgtcagcgaccaccagggggtgatcacacggaaggtgaacatccaggttggggatgtgaatgacaacgcgcccacatttcacaatcagccctacagcgtccgcatccctgagaatacaccagtggggacgcccatcttcatcgtgaatgccacagaccccgacttgggggcagggggcagcgtcctctactccttccagcccccctcccaattcttcgccattgacagcgcccgcggtatcgtcacagtgatccgggagctggactacgagaccacacaggcctaccagctcacggtcaacgccacagatcaagacaagaccaggcctctgtccaccctggccaacttggccatcatcatcacagatgtccaggacatggaccccatcttcatcaacctgccttacagcaccaacatctacgagcattctcctccgggcacgacggtgcgcatcatcaccgccatagaccaggataaaggacgtccccggggcattggctacaccatcgtttcagggaataccaacagcatctttgccctggactacatcagcggagtgctgaccttgaatggcctgctggaccgggagaaccccctgtacagccatggcttcatcctgactgtgaagggcacggagctgaacgatgaccgcaccccatctgacgctacagtcaccacgaccttcaatatcctggttattgacatcaatgacaatgccccggagttcaacagctccgagtacagcgtggccatcactgagctggcacaggtcggctttgcccttccactcttcatccaggtggtggacaaggatgagaatttgggcctgaacagcatgtttgaggtgtacttggtggggaacaactcccaccacttcatcatctccccgacctccgtccaggggaaggcggacattcgtattcgggtggccatcccactggactacgagaccgtggaccgctacgactttgatctctttgccaatgagagtgtgcctgaccatgtgggctatgccaaggtgaagatcactctcatcaatgaaaatgacaaccggcccatcttcagccagccactgtacaacatcagcctgtacgagaacgtcaccgtggggacctctgtgctgacagtcctggcaactgacaatgatgcaggcacctttggggaagtcagctacttcttcagtgatgaccctgacaggttctcgctggacaaggacacgggactcatcatgctgattgccaggctggactatgagctcatccagcgcttcaccctgacgatcattgcccgggacgggggcggcgaggagaccacaggccgggtcaggatcaatgtgttggatgtcaacgacaacgtgcccaccttccagaaggatgcctacgtgggtgctctgcgggagaacgagccttctgtcacacagctggtgcggctccgggcaacagatgaagactcccctcccaacaaccagatcacctacagcattgtcagtgcatctgcctttggcagctacttcgacatcagcctgtacgagggctatggagtgatcagcgtcagtcgccccctggattatgaacagatatccaatgggctgatttatctgacggtcatggccatggatgctggcaacccccctctcaacagcaccgtccctgtcaccatcgaggtgtttgatgagaatgacaaccctcccaccttcagcaagcccgcctacttcgtctccgtggtggagaacatcatggcaggagccacggtgctgttcctgaatgccacagacctggaccgctcccgggagtacggccaggagtccatcatctactccttggaaggctccacccagtttcggatcaatgcccgctcaggggaaatcaccaccacgtctctgcttgaccgagagaccaagtctgaatacatcctcatcgttcgcgcagtggacgggggtgtgggccacaaccagaaaactggcatcgccaccgtaaacatcaccctcctggacatcaacgacaaccaccccacgtggaaggacgcaccctactacatcaacctggtggagatgacccctccagactctgacgtgaccacggtggtggctgttgacccagacctgggggagaatggcaccctggtgtacagcatccagccacccaacaagttctacagcctcaacagcaccacgggcaagatccgcaccacccacgccatgctggaccgggagaaccccgacccccatgaggccgagctgatgcgcaaaatcgtcgtctctgttactgactgtggcaggccccctctgaaagccaccagcagtgccacagtgtttgtgaacctcttggatctcaatgacaatgaccccacctttcagaacctgccttttgtggccgaggtgcttgaaggcatcccggcgggggtctccatctaccaagtggtggccatcgacctcgatgagggcctgaacggcctggtgtcctaccgcatgccggtgggcatgccccgcatggacttcctcatcaacagcagcagcggcgtggtggtcaccaccaccgagctggaccgcgagcgcatcgcggagtaccagctgcgggtggtggccagtgatgcaggcacgcccaccaagagctccaccagcacgctcaccatccatgtgctggatgtgaacgacgagacgcccaccttcttcccggccgtgtacaatgtgtctgtgtccgaggacgtgccacgcgagttccgggtggtctggctgaactgcacggacaacgacgtgggcctcaatgcagagctcagctacttcatcacaggtggcaacgtggatgggaagttcagcgtgggttaccgcgatgccgttgtgagaaccgtggtgggcctggaccgggagaccacagccgcctacatgctcatcctggaggccatcgacaacggccctgtagggaagcgacacacgggcacagccaccgtgttcgtcactgtcctggatgtgaatgacaaccggcccatctttctgcagagcagctatgaggccagcgtccctgaggacatccctgaaggccacagcatcttgcagctgaaagccacggacgcagatgagggcgagtttgggcgtgtgtggtaccgcatcctccatggtaaccatggcaacaacttccggatccatgtcagcaatgggctcctgatgcgagggccccggcccctggaccgggagcggaactcatcccacgtgctgatagtggaggcctacaaccacgacctgggccccatgcggagctccgtcagggtgattgtgtacgtggaggacatcaacgatgaggcccccgtgttcacacagcagcagtacagccgtctggggcttcgagagaccgcaggcattggaacgtcagtcatcgtggtccaagccacagaccgagactctggggatggtggcctggtgaactaccgcatcctgtcgggcgcagaggggaagtttgagattgacgagagcacagggcttatcatcaccgtgaattacctggactacgagaccaagaccagctacatgatgaatgtgtcggccactgaccaggccccgcccttcaaccagggcttctgcagcgtctacatcactctgctcaacgagctggacgaggccgtgcagttctccaatgcctcatacgaggctgccatcctggagaatctggcactgggtactgagattgtgcgggtccaggcctactccatcgacaacctcaaccaaatcacgtaccgcttcgacgcctacaccagcacccaggccaaagccctcttcaagatagacgccatcacgggtgtgatcacagtccagggcctggtggaccgtgagaagggcgacttctataccttgacagtggtggcagatgacggcggccccaaggtggactccaccgtgaaggtctacatcactgtgctggacgagaatgacaacagcccccggtttgacttcacctccgactcggcggtcagcatacccgaggactgccctgtgggccagcgagtggctactgtcaaggcctgggaccctgatgctggcagcaatgggcaggtggtcttctccctggcctctggcaacatcgcgggggcctttgagatcgtcaccaccaatgactccattggcgaagtgtttgtggccaggcccctggacagagaagagctggatcactacatcctccaggttgtggcttctgaccgaggcacccctccacggaagaaggaccacatcctgcaggtgaccatcctggacatcaatgacaaccctccagtcatcgagagcccctttggatacaatgtcagtgtgaatgagaacgtgggtggaggtactgctgtggtccaggtgagagccactgaccgtgacatcgggatcaacagtgttctgtcctactacatcaccgagggcaacaaggacatgaccttccgcatggaccgcatcagcggtgagatcgccacacggcctgccccgcctgaccgcgagcgccagagcttctaccacctggtggccactgtggaggacgagggcaccccaaccctgtcggccaccacgcacgtgtacgtgaccattgtggatgagaatgataacgcgcccatgttccagcagccccactatgaggtgctgctggatgagggcccagacacgctcaacaccagcctcatcaccatccaggcactggacctggatgagggtcccaacggcacagtcacctatgccatcgtcgcaggcaacatcgtcaacaccttccgcatcgacagacacatgggtgtcatcactgctgccaaagagctggactacgagatcagccacggccgctacaccctgatcgtcactgccacagaccagtgccccatcttatcccaccgcctcacctctaccaccacggtgcttgtgaatgtgaatgacatcaacgacaatgtgcctaccttcccccgggactatgagggaccatttgaagtcactgagggccagccggggcccagagtgtggaccttcctggcccatgaccgagactcaggacccaacgggcaggtggagtacagcatcatggatggagaccctctgggggagtttgtgatctctcctgtggagggggtgctaagggtccggaaggacgtggagctggaccgggagaccatcgccttctacaacctgaccatctgtgcccgtgaccgggggatgcccccactcagctccacaatgctggtggggatccgggtgctggacatcaacgacaacgaccctgtgctgctgaacctgcccatgaacatcaccatcagcgagaacagccctgtctccagctttgtcgcccatgtcctggccagtgacgctgacagtggctgcaatgcacgcctcaccttcaacatcactgcgggcaaccgcgagcgggccttcttcatcaatgccacgacagggatcgtcactgtgaaccggcccctggaccgcgagcggatcccagagtacaagctgaccatttctgtgaaggacaacccggagaatccacgcatagccaggagggattatgacttgcttctgatcttcctttctgatgagaatgacaaccaccccctcttcactaaaagcacctaccaggcagaggtgatggaaaactctcccgctggcacccctctcacggtgctcaatgggcccatcctggccctggatgcagaccaagacatctacgccgtggtgacctaccagctgctgggtgcccagagtggcctctttgacatcaacagcagcaccggtgtggtgaccgtgaggtcaggtgtcatcattgaccgggaggcattctcgccacccatcctggagctgctgctgctggctgaggacatcgggctgctcaacagcacggcccacctgctcatcaccatcctggatgacaatgacaaccggcccacctttagccctgccaccctcactgtccatctgctagagaactgcccgcctggattctcagtccttcaagtcacagccacagatgaggacagtggcctcaatggggagctggtctaccgaatagaagctggggctcaggaccgcttcctcattcatctggtcaccggggtcatccgtgttggtaatgccaccatcgacagagaggagcaggagtcctacaggctaacggtggtggccaccgaccggggcaccgttcctctctcgggcacagccattgtcaccattctgatcgatgacatcaatgactcccgccccgagttcctcaaccccatccagacagtgagcgtgctggagtcggctgagccaggcactgtcattgccaatatcacggccattgaccacgacctcaacccaaagctagagtaccacattgtcggcattgtggccaaggacgacactgatcgcctggtgcccaaccaggaggacgcctttgctgtgaatatcaacacaggatctgtaatggtgaagtcccccatgaatcgggagctggttgccacctatgaggtcactctctcagtgattgacaatgccagcgacctaccagagcgctctgtcagtgtgccaaatgccaagctgactgtcaacgtcctggacgtcaatgacaatacgccccagttcaagccctttgggatcacctactacatggagcggatcctggagggggccacccctgggaccacactcattgctgtggcagccgtggaccctgacaagggccttaatgggctggtcacctacaccctgctggacctggtgcccccagggtatgtccagctggaggactcctcggcagggaaggtcattgccaaccggacagtggactacgaggaggtgcactggctcaactttaccgtgagggcctcagacaacgggtccccgccccgggcagctgagatccctgtctacctggaaatcgtggacatcaatgacaacaaccccatctttgaccagccctcctaccaggaggctgtctttgaggatgtgcctgtgggcacaatcatcctgacagtcactgccactgatgctgactcaggcaactttgcactcattgagtacagccttggagatggagagagcaagtttgccatcaaccccaccacgggtgacatctatgtgctgtcttctctggaccgggagaagaaggaccactatatcctgactgccttggccaaagacaaccctggggatgtagccagcaaccgtcgcgaaaattcagtgcaggtggtgatccaagtgctggatgtcaatgactgccggccacagttctccaagccccagttcagcacaagcgtgtatgagaatgagccggcgggcacctcggtcatcaccatgatggccactgaccaggatgaaggtcccaatggagagttgacctactcacttgagggccctggcgtggaggccttccatgtggacatggactcgggcttggtgaccacacagcggccactgcagtcctacgagaagttcagtctgaccgtggtggccacagatggtggagagcccccactctggggcaccaccatgctcctggtggaggtcatcgacgtcaatgacaaccgccctgtctttgtgcgcccacccaacggcaccatcctccacatcagagaggagatcccgctgcgctccaacgtgtacgaggtctacgccacggacaaggatgagggcctcaacggggcggtgcgctacagcttcctgaagactgcgggcaaccgggactgggagttcttcatcatcgacccaatcagcggcctcatccagactgctcagcgcctggaccgcgagtcgcaggcggtgtacagcctcatcttggtggccagcgacctgggccagccagtgccatacgagactatgcagccgctgcaggtggccctggaggacatcgatgacaacgaaccccttttcgtgaggcctccaaaaggcagcccccagtaccagctgctgacagtgcctgagcactcaccacgcggcaccctcgtgggcaacgtgacaggcgcagtggatgcagatgagggccccaacgcgatcgtgtactacttcatcgcagccggcaacgaagagaagaacttccatctgcagcccgatgggtgtctgctggtgctgcgggacctggaccgggagcgagaagccatcttctccttcatcgtcaaggcctccagcaatcgcagctggacacctccccgtggaccctccccaaccctcgacctggttgctgacctcacactgcaggaggtgcgcgttgtgctagaggacatcaacgaccagccaccacgcttcaccaaggctgagtacactgcaggggtggccaccgacgccaaggtgggctcagagttgatccaggtgctggccctggatgcagacattggcaacaacagccttgtcttctacagcattctggccatccactacttccgggcccttgccaacgactctgaagatgtgggccaggtcttcaccatggggagcatggacggcattctgcgcaccttcgacctcttcatggcctacagccccggctacttcgtggtggacattgtggcccgagacctggcaggccacaacgacacggccatcatcggcatctacatcctgagggacgaccagcgcgtcaagatcgtcattaacgagatccccgaccgtgtgcgcggcttcgaggaggagttcatccacctgctctccaacatcactggggccattgtcaatactgacaatgtgcagttccatgtggacaagaagggccgggtgaactttgcgcagacagaactgcttatccacgtggtgaaccgcgataccaaccgcatcctggacgtggaccgggtgatccagatgatcgatgagaacaaggagcagctacggaatcttttccggaactacaacgtcctggacgtgcagcctgccatctctgtccggctgccggatgacatgtctgccctgcagatggcgatcatcgtcctggctatcctcctgttcctggccgccatgctctttgtcctcatgaactggtactacaggactgtacacaagaggaagctcaaggccattgtggctggctcagctgggaatcgtggcttcatcgacatcatggacatgcctaacaccaacaagtactcctttgatggagccaaccctgtgtggctggatcccttctgtcggaacctggagctggccgcccaggcggagcatgaggatgacctaccggagaacctgagtgagatcgccgacctgtggaacagccccacgcgcacccatggaacttttgggcgtgagccagcagctgtcaagcctgatgatgaccgatacctgcgggctgccatccaggagtatgacaacattgccaagctgggccagatcattcgtgaggggccaatcaagggctcgctgctgaaggtggtcctggaggattacctgcggctcaaaaagctctttgcacagcggatggtgcaaaaagcctcctcctgccactcctccatctctgagctgatacagactgagctggacgaggagccaggagaccacagcccagggcagggtagcctgcgcttccgccacaagccaccagtggagctcaaggggcccgatgggatccatgtggtgcacggcagcacgggcacgctgctggccaccgacctcaacagcctgcccgaggaagaccagaagggcctgggccgctcgctggagacgctgaccgctgccgaggccactgccttcgagcgcaacgcccgcacagaatccgccaaatccacacccctgcacaaacttcgcgacgtgatcatggagacccccctggagatcacagagctgtgactagacagggaagccttgtgggtgtgagcagcacccatccaccgtcccctcccagggagcaagggcagggacagggccggtcgggggggaccctccaaggccaggccttggggacaaccttggcttggccctggcagcccgcatcagctgctcagatcccacttttgccagacgctcattcagcatctgacctctaccttcataagatctgttatttttataagaaaaccaaacaaaaatgttaagcatctaaggacaaggtaaggagggtcactggggcccaagagtctggggaccagcttggctcaggctgagctgaaagaggccaaacaggccctcctccctcccggctccaccccgcaagcaccatcccctccggctaagcaggcgcaagggaggcccagcgcggacatcccctgctggccggacacccgactccagtccaagtctcgctacatttccgccacatccctctctgctggacgtccaggtggaggtggcatccccacgtggacaagaaagtcaatgtcaatgaacaagcattctctccatttcactggcttcccaaatgtgtgcccagcttataaacagaagtgactgatgttccctccggttttgaatgtggagtgtttgtgtgtgttccttttttaaattaagttattccctcaat

SEQ ID NO: 358221 - DNA, 3969 bp, Homo sapiens
  misc_feature (3965)..(3969): n is a, c, g, or t
gagcggcggcggcggctcgggagagagggacgcgggctgcaggcgcgatgcttggctagaggacgcgtccgacggcggccggacgctgaggtggtcggggctagtcagcccggcctgggcatggagcgcggggtggcagagcctctggacgtttggggcgcgcccagtccgagcccccggcgcgcctgaagttgcgagcggcgagcggcgagcggcgagcggcccgcggagacccaggagctgccggcacgccgcggatgagccttcgcgccggcgggaagacgcggcggtggccagggccagagcaggcggcccgcgggggccgatccggcggagagcagagcccgaggcgaggcgaggcgaggcgcggcgccgctgcacacacgcacacggagccatggggcgccatgttgccaccagctgccacgtggcctggcttttggtgctgatctctggatgctggggccaggtgaaccggctgcccttcttcaccaaccacttctttgatacatacctgctgatcagcgaggacacgcctgtgggttcttctgtgacccagttgctggcccaagacatggacaatgaccccctggtgtttggcgtgtctggggaggaggcctctcgcttctttgcagtggagcctgacactggcgtggtgtggctccggcagccactggacagagagaccaagtcagagttcaccgtggagttctctgtcagcgaccaccagggggtgatcacacggaaggtgaacatccaggttggggatgtgaatgacaacgcgcccacatttcacaatcagccctacagcgtccgcatccctgagaatacaccagtggggacgcccatcttcatcgtgaatgccacagaccccgacttgggggcagggggcagcgtcctctactccttccagcccccctcccaattcttcgccattgacagcgcccgcggtatcgtcacagtgatccgggagctggactacgagaccacacaggcctaccagctcacggtcaacgccacagatcaagacaagaccaggcctctgtccaccctggccaacttggccatcatcatcacagatgtccaggacatggaccccatcttcatcaacctgccttacagcaccaacatctacgagcattctcctccgggcacgacggtgcgcatcatcaccgccatagaccaggataaaggacgtccccggggcattggctacaccatcgtttcagggaataccaacagcatctttgccctggactacatcagcggagtgctgaccttgaatggcctgctggaccgggagaaccccctgtacagccatggcttcatcctgactgtgaagggcacggagctgaacgatgaccgcaccccatctgacgctacagtcaccacgaccttcaatatcctggttattgacatcaatgacaatgccccggagttcaacagctccgagtacagcgtggccatcactgagctggcacaggtcggctttgcccttccactcttcatccaggtggtggacaaggatgagaatttgggcctgaacagcatgtttgaggtgtacttggtggggaacaactcccaccacttcatcatctccccgacctccgtccaggggaaggcggacattcgtattcgggtggccatcccactggactacgagaccgtggaccgctacgactttgatctctttgccaatgagagtgtgcctgaccatgtgggctatgccaaggtgaagatcactctcatcaatgaaaatgacaaccggcccatcttcagccagccactgtacaacatcagcctgtacgagaacgtcaccgtggggacctctgtgctgacagtcctggcaactgacaatgatgcaggcacctttggggaagtcagctacttcttcagtgatgaccctgacaggttctcgctggacaaggacacgggactcatcatgctgattgccaggctggactatgagctcatccagcgcttcaccctgacgatcattgcccgggacgggggcggcgaggagaccacaggccgggtcaggatcaatgtgttggatgtcaacgacaacgtgcccaccttccagaaggatgcctacgtgggtgctctgcgggagaacgagccttctgtcacacagctggtgcggctccgggcaacagatgaagactcccctcccaacaaccagatcacctacagcattgtcagtgcatctgcctttggcagctacttcgacatcagcctgtacgagggctatggagtgatcagcgtcagtcgccccctggattatgaacagatatccaatgggctgatttatctgacggtcatggccatggatgctggcaacccccctctcaacagcaccgtccctgtcaccatcgaggtgtttgatgagaatgacaaccctcccaccttcagcaagcccgcctacttcgtctccgtggtggagaacatcatggcaggagccacggtgctgttcctgaatgccacagacctggaccgctcccgggagtacggccaggagtccatcatctactccttggaaggctccacccagtttcggatcaatgcccgctcaggggaaatcaccaccacgtctctgcttgaccgagagaccaagtctgaatacatcctcatcgttcgcgcagtggacgggggtgtgggccacaaccagaaaactggcatcgccaccgtaaacatcaccctcctggacatcaacgacaaccaccccacgtggaaggacgcaccctactacatcaacctggtggagatgacccctccagactctgacgtgaccacggtggtggctgttgacccagacctgggggagaatggcaccctggtgtacagcatccagccacccaacaagttctacagcctcaacagcaccacgggcaagatccgcaccacccacgccatgctggaccgggagaaccccgacccccatgaggccgagctgatgcgcaaaatcgtcgtctctgttactgactgtggcaggccccctctgaaagccaccagcagtgccacagtgtttgtgaacctcttggatctcaatgacaatgaccccacctttcagaacctgccttttgtggccgaggtgcttgaaggcatcccggcgggggtctccatctaccaagtggtggccatcgacctcgatgagggcctgaacggcctggtgtcctaccgcatgccggtgggcatgccccgcatggacttcctcatcaacagcagcagcggcgtggtggtcaccaccaccgagctggaccgcgagcgcatcgcggagtaccagctgcgggtggtggccagtgatgcaggcacgcccaccaagagctccaccagcacgctcaccatccatgtgctggatgtgaacgacgagacgcccaccttcttcccggccgtgtacaatgtgtctgtgtccgaggacgtgccacgcgagttccgggtggtctggctgaactgcacggacaacgacgtgggcctcaatgcagagctcagctacttcatcacaggtgctgccccggcctccgcccacctgtgcaggcctcctggggccctgcctccacccctcccagatggacagccagactaggtgggggcaggtgagggtggaaaagaggtcagggctctactgttgggctttagcctctggtggtgcctcccgaggatttgctcctggctcttcccaagggctttgcagctggatcactctggactggctccctggggacctcctgaacctgttggttgcagggacggggagcatctaccaaggttcattctagagggaggtaaggccccatgattcctagggaggagccctgagccccactccccgccccaagtctgggtgacagagcagtgacttggaggaatgtggcctcatccttccttggggacctgttgagaattcccacctgtttagaggcagatggttttgatctccctaaatgaaatggttttagctcaaaaannnnn

SEQ ID NO: 358222 - DNA, 11086 bp, Homo sapiens
gagcggcggcggcggctcgggagagagggacgcgggctgcaggcgcgatgcttggctagaggacgcgtccgacggcggccggacgctgaggtggtcggggctagtcagcccggcctgggcatggagcgcggggtggcagagcctctggacgtttggggcgcgcccagtccgagcccccggcgcgcctgaagttgcgagcggcgagcggcgagcggcgagcggcccgcggagacccaggagctgccggcacgccgcggatgagccttcgcgccggcgggaagacgcggcggtggccagggccagagcaggcggcccgcgggggccgatccggcggagagcagagcccgaggcgaggcgaggcgaggcgcggcgccgctgcacacacgcacacggagccatggggcgccatgttgccaccagctgccacgtggcctggcttttggtgctgatctctggatgctggggccaggtgaaccggctgcccttcttcaccaaccacttctttgatacatacctgctgatcagcgaggacacgcctgtgggttcttctgtgacccagttgctggcccaagacatggacaatgaccccctggtgtttggcgtgtctggggaggaggcctctcgcttctttgcagtggagcctgacactggcgtggtgtggctccggcagccactggacagagagaccaagtcagagttcaccgtggagttctctgtcagcgaccaccagggggtgatcacacggaaggtgaacatccaggttggggatgtgaatgacaacgcgcccacatttcacaatcagccctacagcgtccgcatccctgagaatacaccagtggggacgcccatcttcatcgtgaatgccacagaccccgacttgggggcagggggcagcgtcctctactccttccagcccccctcccaattcttcgccattgacagcgcccgcggtatcgtcacagtgatccgggagctggactacgagaccacacaggcctaccagctcacggtcaacgccacagatcaagacaagaccaggcctctgtccaccctggccaacttggccatcatcatcacagatgtccaggacatggaccccatcttcatcaacctgccttacagcaccaacatctacgagcattctcctccgggcacgacggtgcgcatcatcaccgccatagaccaggataaaggacgtccccggggcattggctacaccatcgtttcagggaataccaacagcatctttgccctggactacatcagcggagtgctgaccttgaatggcctgctggaccgggagaaccccctgtacagccatggcttcatcctgactgtgaagggcacggagctgaacgatgaccgcaccccatctgacgctacagtcaccacgaccttcaatatcctggttattgacatcaatgacaatgccccggagttcaacagctccgagtacagcgtggccatcactgagctggcacaggtcggctttgcccttccactcttcatccaggtggtggacaaggatgagaatttgggcctgaacagcatgtttgaggtgtacttggtggggaacaactcccaccacttcatcatctccccgacctccgtccaggggaaggcggacattcgtattcgggtggccatcccactggactacgagaccgtggaccgctacgactttgatctctttgccaatgagagtgtgcctgaccatgtgggctatgccaaggtgaagatcactctcatcaatgaaaatgacaaccggcccatcttcagccagccactgtacaacatcagcctgtacgagaacgtcaccgtggggacctctgtgctgacagtcctggcaactgacaatgatgcaggcacctttggggaagtcagctacttcttcagtgatgaccctgacaggttctcgctggacaaggacacgggactcatcatgctgattgccaggctggactatgagctcatccagcgcttcaccctgacgatcattgcccgggacgggggcggcgaggagaccacaggccgggtcaggatcaatgtgttggatgtcaacgacaacgtgcccaccttccagaaggatgcctacgtgggtgctctgcgggagaacgagccttctgtcacacagctggtgcggctccgggcaacagatgaagactcccctcccaacaaccagatcacctacagcattgtcagtgcatctgcctttggcagctacttcgacatcagcctgtacgagggctatggagtgatcagcgtcagtcgccccctggattatgaacagatatccaatgggctgatttatctgacggtcatggccatggatgctggcaacccccctctcaacagcaccgtccctgtcaccatcgaggtgtttgatgagaatgacaaccctcccaccttcagcaagcccgcctacttcgtctccgtggtggagaacatcatggcaggagccacggtgctgttcctgaatgccacagacctggaccgctcccgggagtacggccaggagtccatcatctactccttggaaggctccacccagtttcggatcaatgcccgctcaggggaaatcaccaccacgtctctgcttgaccgagagaccaagtctgaatacatcctcatcgttcgcgcagtggacgggggtgtgggccacaaccagaaaactggcatcgccaccgtaaacatcaccctcctggacatcaacgacaaccaccccacgtggaaggacgcaccctactacatcaacctggtggagatgacccctccagactctgacgtgaccacggtggtggctgttgacccagacctgggggagaatggcaccctggtgtacagcatccagccacccaacaagttctacagcctcaacagcaccacgggcaagatccgcaccacccacgccatgctggaccgggagaaccccgacccccatgaggccgagctgatgcgcaaaatcgtcgtctctgttactgactgtggcaggccccctctgaaagccaccagcagtgccacagtgtttgtgaacctcttggatctcaatgacaatgaccccacctttcagaacctgccttttgtggccgaggtgcttgaaggcatcccggcgggggtctccatctaccaagtggtggccatcgacctcgatgagggcctgaacggcctggtgtcctaccgcatgccggtgggcatgccccgcatggacttcctcatcaacagcagcagcggcgtggtggtcaccaccaccgagctggaccgcgagcgcatcgcggagtaccagctgcgggtggtggccagtgatgcaggcacgcccaccaagagctccaccagcacgctcaccatccatgtgctggatgtgaacgacgagacgcccaccttcttcccggccgtgtacaatgtgtctgtgtccgaggacgtgccacgcgagttccgggtggtctggctgaactgcacggacaacgacgtgggcctcaatgcagagctcagctacttcatcacaggtggcaacgtggatgggaagttcagcgtgggttaccgcgatgccgttgtgagaaccgtggtgggcctggaccgggagaccacagccgcctacatgctcatcctggaggccatcgacaacggccctgtagggaagcgacacacgggcacagccaccgtgttcgtcactgtcctggatgtgaatgacaaccggcccatctttctgcagagcagctatgaggccagcgtccctgaggacatccctgaaggccacagcatcttgcagctgaaagccacggacgcagatgagggcgagtttgggcgtgtgtggtaccgcatcctccatggtaaccatggcaacaacttccggatccatgtcagcaatgggctcctgatgcgagggccccggcccctggaccgggagcggaactcatcccacgtgctgatagtggaggcctacaaccacgacctgggccccatgcggagctccgtcagggtgattgtgtacgtggaggacatcaacgatgaggcccccgtgttcacacagcagcagtacagccgtctggggcttcgagagaccgcaggcattggaacgtcagtcatcgtggtccaagccacagaccgagactctggggatggtggcctggtgaactaccgcatcctgtcgggcgcagaggggaagtttgagattgacgagagcacagggcttatcatcaccgtgaattacctggactacgagaccaagaccagctacatgatgaatgtgtcggccactgaccaggccccgcccttcaaccagggcttctgcagcgtctacatcactctgctcaacgagctggacgaggccgtgcagttctccaatgcctcatacgaggctgccatcctggagaatctggcactgggtactgagattgtgcgggtccaggcctactccatcgacaacctcaaccaaatcacgtaccgcttcgacgcctacaccagcacccaggccaaagccctcttcaagatagacgccatcacgggtgtgatcacagtccagggcctggtggaccgtgagaagggcgacttctataccttgacagtggtggcagatgacggcggccccaaggtggactccaccgtgaaggtctacatcactgtgctggacgagaatgacaacagcccccggtttgacttcacctccgactcggcggtcagcatacccgaggactgccctgtgggccagcgagtggctactgtcaaggcctgggaccctgatgctggcagcaatgggcaggtggtcttctccctggcctctggcaacatcgcgggggcctttgagatcgtcaccaccaatgactccattggcgaagtgtttgtggccaggcccctggacagagaagagctggatcactacatcctccaggttgtggcttctgaccgaggcacccctccacggaagaaggaccacatcctgcaggtgaccatcctggacatcaatgacaaccctccagtcatcgagagcccctttggatacaatgtcagtgtgaatgagaacgtgggtggaggtactgctgtggtccaggtgagagccactgaccgtgacatcgggatcaacagtgttctgtcctactacatcaccgagggcaacaaggacatgaccttccgcatggaccgcatcagcggtgagatcgccacacggcctgccccgcctgaccgcgagcgccagagcttctaccacctggtggccactgtggaggacgagggcaccccaaccctgtcggccaccacgcacgtgtacgtgaccattgtggatgagaatgataacgcgcccatgttccagcagccccactatgaggtgctgctggatgagggcccagacacgctcaacaccagcctcatcaccatccaggcactggacctggatgagggtcccaacggcacagtcacctatgccatcgtcgcaggcaacatcgtcaacaccttccgcatcgacagacacatgggtgtcatcactgctgccaaagagctggactacgagatcagccacggccgctacaccctgatcgtcactgccacagaccagtgccccatcttatcccaccgcctcacctctaccaccacggtgcttgtgaatgtgaatgacatcaacgacaatgtgcctaccttcccccgggactatgagggaccatttgaagtcactgagggccagccggggcccagagtgtggaccttcctggcccatgaccgagactcaggacccaacgggcaggtggagtacagcatcatggatggagaccctctgggggagtttgtgatctctcctgtggagggggtgctaagggtccggaaggacgtggagctggaccgggagaccatcgccttctacaacctgaccatctgtgcccgtgaccgggggatgcccccactcagctccacaatgctggtggggatccgggtgctggacatcaacgacaacgaccctgtgctgctgaacctgcccatgaacatcaccatcagcgagaacagccctgtctccagctttgtcgcccatgtcctggccagtgacgctgacagtggctgcaatgcacgcctcaccttcaacatcactgcgggcaaccgcgagcgggccttcttcatcaatgccacgacagggatcgtcactgtgaaccggcccctggaccgcgagcggatcccagagtacaagctgaccatttctgtgaaggacaacccggagaatccacgcatagccaggagggattatgacttgcttctgatcttcctttctgatgagaatgacaaccaccccctcttcactaaaagcacctaccaggcagaggtgatggaaaactctcccgctggcacccctctcacggtgctcaatgggcccatcctggccctggatgcagaccaagacatctacgccgtggtgacctaccagctgctgggtgcccagagtggcctctttgacatcaacagcagcaccggtgtggtgaccgtgaggtcaggtgtcatcattgaccgggaggcattctcgccacccatcctggagctgctgctgctggctgaggacatcgggctgctcaacagcacggcccacctgctcatcaccatcctggatgacaatgacaaccggcccacctttagccctgccaccctcactgtccatctgctagagaactgcccgcctggattctcagtccttcaagtcacagccacagatgaggacagtggcctcaatggggagctggtctaccgaatagaagctggggctcaggaccgcttcctcattcatctggtcaccggggtcatccgtgttggtaatgccaccatcgacagagaggagcaggagtcctacaggctaacggtggtggccaccgaccggggcaccgttcctctctcgggcacagccattgtcaccattctgatcgatgacatcaatgactcccgccccgagttcctcaaccccatccagacagtgagcgtgctggagtcggctgagccaggcactgtcattgccaatatcacggccattgaccacgacctcaacccaaagctagagtaccacattgtcggcattgtggccaaggacgacactgatcgcctggtgcccaaccaggaggacgcctttgctgtgaatatcaacacaggatctgtaatggtgaagtcccccatgaatcgggagctggttgccacctatgaggtcactctctcagtgattgacaatgccagcgacctaccagagcgctctgtcagtgtgccaaatgccaagctgactgtcaacgtcctggacgtcaatgacaatacgccccagttcaagccctttgggatcacctactacatggagcggatcctggagggggccacccctgggaccacactcattgctgtggcagccgtggaccctgacaagggccttaatgggctggtcacctacaccctgctggacctggtgcccccagggtatgtccagctggaggactcctcggcagggaaggtcattgccaaccggacagtggactacgaggaggtgcactggctcaactttaccgtgagggcctcagacaacgggtccccgccccgggcagctgagatccctgtctacctggaaatcgtggacatcaatgacaacaaccccatctttgaccagccctcctaccaggaggctgtctttgaggatgtgcctgtgggcacaatcatcctgacagtcactgccactgatgctgactcaggcaactttgcactcattgagtacagccttggagatggagagagcaagtttgccatcaaccccaccacgggtgacatctatgtgctgtcttctctggaccgggagaagaaggaccactatatcctgactgccttggccaaagacaaccctggggatgtagccagcaaccgtcgcgaaaattcagtgcaggtggtgatccaagtgctggatgtcaatgactgccggccacagttctccaagccccagttcagcacaagcgtgtatgagaatgagccggcgggcacctcggtcatcaccatgatggccactgaccaggatgaaggtcccaatggagagttgacctactcacttgagggccctggcgtggaggccttccatgtggacatggactcgggcttggtgaccacacagcggccactgcagtcctacgagaagttcagtctgaccgtggtggccacagatggtggagagcccccactctggggcaccaccatgctcctggtggaggtcatcgacgtcaatgacaaccgccctgtctttgtgcgcccacccaacggcaccatcctccacatcagagaggagatcccgctgcgctccaacgtgtacgaggtctacgccacggacaaggatgagggcctcaacggggcggtgcgctacagcttcctgaagactgcgggcaaccgggactgggagttcttcatcatcgacccaatcagcggcctcatccagactgctcagcgcctggaccgcgagtcgcaggcggtgtacagcctcatcttggtggccagcgacctgggccagccagtgccatacgagactatgcagccgctgcaggtggccctggaggacatcgatgacaacgaaccccttttcgtgaggcctccaaaaggcagcccccagtaccagctgctgacagtgcctgagcactcaccacgcggcaccctcgtgggcaacgtgacaggcgcagtggatgcagatgagggccccaacgcgatcgtgtactacttcatcgcagccggcaacgaagagaagaacttccatctgcagcccgatgggtgtctgctggtgctgcgggacctggaccgggagcgagaagccatcttctccttcatcgtcaaggcctccagcaatcgcagctggacacctccccgtggaccctccccaaccctcgacctggttgctgacctcacactgcaggaggtgcgcgttgtgctagaggacatcaacgaccagccaccacgcttcaccaaggctgagtacactgcaggggtggccaccgacgccaaggtgggctcagagttgatccaggtgctggccctggatgcagacattggcaacaacagccttgtcttctacagcattctggccatccactacttccgggcccttgccaacgactctgaagatgtgggccaggtcttcaccatggggagcatggacggcattctgcgcaccttcgacctcttcatggcctacagccccggctacttcgtggtggacattgtggcccgagacctggcaggccacaacgacacggccatcatcggcatctacatcctgagggacgaccagcgcgtcaagatcgtcattaacgagatccccgaccgtgtgcgcggcttcgaggaggagttcatccacctgctctccaacatcactggggccattgtcaatactgacaatgtgcagttccatgtggacaagaagggccgggtgaactttgcgcagacagaactgcttatccacgtggtgaaccgcgataccaaccgcatcctggacgtggaccggtacccggcgaccgtgccccacagccctagccgccctccccactgcccgggcttaccctggtcctgctcccgcagatggcgatcatcgtcctggctatcctcctgttcctggccgccatgctctttgtcctcatgaactggtactacaggactgtacacaagaggaagctcaaggccattgtggctggctcagctgggaatcgtggcttcatcgacatcatggacatgcctaacaccaacaagtactcctttgatggagccaaccctgtgtggctggatcccttctgtcggaacctggagctggccgcccaggcggagcatgaggatgacctaccggagaacctgagtgagatcgccgacctgtggaacagccccacgcgcacccatggaacttttgggcgtgagccagcagctgtcaagcctgatgatgaccgatacctgcgggctgccatccaggagtatgacaacattgccaagctgggccagatcattcgtgaggggccaatcaagggctcgctgctgaaggtggtcctggaggattacctgcggctcaaaaagctctttgcacagcggatggtgcaaaaagcctcctcctgccactcctccatctctgagctgatacagactgagctggacgaggagccaggagaccacagcccagggcagggtagcctgcgcttccgccacaagccaccagtggagctcaaggggcccgatgggatccatgtggtgcacggcagcacgggcacgctgctggccaccgacctcaacagcctgcccgaggaagaccagaagggcctgggccgctcgctggagacgctgaccgctgccgaggccactgccttcgagcgcaacgcccgcacagaatccgccaaatccacacccctgcacaaacttcgcgacgtgatcatggagacccccctggagatcacagagctgtgactagacagggaagccttgtgggtgtgagcagcacccatccaccgtcccctcccagggagcaagggcagggacagggccggtcgggggggaccctccaaggccaggccttggggacaaccttggcttggccctggcagcccgcatcagctgctcagatcccacttttgccagacgctcattcagcatctgacctctaccttcataagatctgttatttttataagaaaaccaaacaaaaatgttaagcatctaaggacaaggtaaggagggtcactggggcccaagagtctggggaccagcttggctcaggctgagctgaaagaggccaaacaggccctcctccctcccggctccaccccgcaagcaccatcccctccggctaagcaggcgcaagggaggcccagcgcggacatcccctgctggccggacacccgactccagtccaagtctcgctacatttccgccacatccctctctgctggacgtccaggtggaggtggcatccccacgtggacaagaaagtcaatgtcaatgaacaagcattctctccatttcactggcttcccaaatgtgtgcccagcttataaacagaagtgactgatgttccctccggttttgaatgtggagtgtttgtgtgtgttccttttttaaattaagttattccctcaat

SEQ ID NO: 358223 - DNA, 388 bp, Homo sapiens
ccctgtgatgataaccggctgagacccgagccatttccacttcagatgggcatcgttcccacttgcctgtcacctttgctccctgctgtgccctgtgggcatttgtgccgcctcccctagatgtgcccacctaccccagggctcatgccccttcctggggattcggggcactgagtctctgagccgtaccccgcctttgggcttcctgcagggagcatggacggcattctgcgcaccttcgacctcttcatggcctacagccccggctacttcgtggtggacattgtggcccgagacctggcaggccacaacgacacggccatcatcggcatctacatcctgagggacgaccagcgcgtcaagatcgtcattaacgagatccccgacc

SEQ ID NO: 358224 - DNA, 501 bp, Homo sapiens
cgaggctgccatcctggagaatctggcactgggtactgagattgtgcgggtccaggcctactccatcgacaacctcaaccaaatcacgtaccgcttcgacgcctacaccagcacccaggccaaagccctcttcaagatagacgccatcacggtgaggggctgggggcagggagcaccatttcttccaatctaaccaacattggttgagctccttctgtgtgcacagcactctcctctttgtcataaaatgtccttgagatggccaagtgtggtgttaggtacctgtagtcccagctgcttgagaggctggggcaggaagattgcttcagctcaggagtttggaggctgcagtgagctgcgtttgcaccactgcactccagcccgggcaacagagtgagaccttgtctcttacaaagaaacaaaaaaaagtccccgagatcaatatccctgtaacacatccattttcatatgtaggagtaagataaagtttatacctatgca

SEQ ID NO: 358225 - DNA, 224 bp, Homo sapiens
ggcttatcattgtagcaaatttaagctcattgcatttttggctgaatgttataattaatgtttgatttgcaaaagtctgatgttgaggtaatctaaaagaatcctttgaaaatttctttgtgttaagtatttatatatttatatgttatgtgatctgatatatgacaaagtctcataaaaatgttcgtacacagtagtaagcattctttaagatattcagagca

SEQ ID NO: 358226 - DNA, 2858 bp, Homo sapiens
acgcccacttccgcttcccgtgctgggggcggtggcagggccggtgggcggtggcggctcccggtctcggctcgggcacggccctgggcaggccgcccgccagccgcaggggcgctcctgagcttcgcggggccgcagtccgggatgcctgcgcgaagggaggggcgaagggccggccgttgccgacgtgggtgttaagtggccgccccagccggcgacccggagccgagagcgggcggcggagcctgagctggacgcggccacgccggcgcggcgggatatgtggtgcctgtcataagctccagagagctgccttccacaagaccagcagaagagtgggcaaacatgaaatccaatcctgctatccaggctgccattgacctcacagcgggggctgcaggaggtacagcatgtgtactgaccgggcagccctttgacacaatgaaagtgaagatgcagacgttccctgacctgtaccggggcctcaccgactgctgcctgaagacttactcccaggtgggcttccgtggcttctacaagggtaccagtccagcactaatcgccaacatcgctgagaactcagtcctcttcatgtgctacggcttctgccagcaggtggtgcggaaagtggctggattggacaagcaggcaaagctgagtgatctgcagaatgcagccgccggttccttcgcctctgcctttgctgcactggtgctctgccccacggagctcgtgaagtgccggctgcagaccatgtatgagatggagacatcagggaagatagccaagagccagaatacagtgtggtctgtcatcaaaagtattcttaggaaagatggccccttggggttctaccatggactctcaagcactttacttcgagaagtaccaggctatttcttcttcttcggtggctatgaactgagccggtccttttttgcatcagggagatcaaaagatgaattaggccctgtacctttgatgttaagtggtggagttggtgggatttgcctctggcttgcggtatacccagtggattgtatcaaatccagaattcaagttctttccatgtctggaaaacaggcaggatttatcagaacctttataaatgttgtgaaaaatgaaggaataacggccttatattctggactgaaacctactatgattcgagcattccctgccaatggagcactctttttggcctacgaatatagcaggaagttgatgatgaaccagttggaagcatactgaagtgtcttggtgggcctgagccaagcacaggtgtttgaggactacagttcatctcagggtttcttggagtacaagaccagtgtgaagttattctgatttcttgggaattttgctttttgtcttcccttctaccctacatcttaaactttatggaagaacctctattttgcatcatatcatttctgtccataattgtactgaaatagaaaagtgaccgctcttgctcttggtaaaatatagagtggtcagtagccttatgcacctaattcaaaaggtggaatatagttctgtcagggcttttacgtaaacctccacttgtacatgcaatttggacagttatgtgttgagggaaatacagtttggtaccttgtttatttcaaatatcagaaaaacccagaggtgatcatttctcatgaagatgcttataaatggttgcttaacccattctagatgtagggtctgcttaatgtgtgtacttttctaagtggtggcacgtgcctgtagtcccagctactcaggaggctgaggcaggagaatcgcttgaacccgggaggcagaagttgcagtgaactgaaattgtgccactgcactccagactgggtgacacagcgagacttcatctcaaaaaaaaaaagaaaagaaaagcaattgtacttcactatgccatatgtatgtattcactgaccaaaaattcactgaccaaccaaccaaactccacacttcatctgatcccccatagacttggggatggacagctgttctttggccatatggtataagaggatcattcttgtcactacttaagttagcctcatcattttgtgctgctccaacaccagcagggtatctcccaataaagtgttcctaagcagcctgtatactgagtgcaagcaggctatcaattttaataatagtccataccatgtatgtgtttctgtcagcagaatgtacatgttgtacaaaacctccaggttccttaagctttttgctgtccatgaatcctctgtggcaactgtaatcacagagccagaagccagagggccagggatatgagaggctgacaaacatcaggggacatctggggaggagatccctgtcatgtctcttgtgccatggagctattatggctggtcttccatttgctttttctttaagtgaaaaccatttttctactttgcttttctctccatacttaaatggtcagtagctactgagtggtgctttatctgaataggcctggatcgaagtaaaatagaaatgggactggctttccacaggaagtaaactgcttcagagcccacagtcccctgctcagtgtccggaaagaagtcagtcatccctgttggcagtaaatcttcccacaggccgtccattagagatttaactagatatgttcaatagaaagagtctgaggcaagtggaaatgaggaacggaaacttaggttgggagaatattttttttttattcattctgtttgcttaattcagagtacagtttgtgctatttcatatctgtactccaggcagaaatataacttgaaaatactgtgtctaaagaaatttcagtgttctatcattaaattatttacttaataaaaaagtctgat

SEQ ID NO: 358227 - DNA, 2800 bp, Homo sapiens
acgcccacttccgcttcccgtgctgggggcggtggcagggccggtgggcggtggcggctcccggtctcggctcgggcacggccctgggcaggccgcccgccagccgcaggggcgctcctgagcttcgcggggccgcagtccgggatgcctgcgcgaagggaggggcgaagggccggccgttgccgacgtgggtgttaagtggccgccccagccggcgacccggagccgagagcgggcggcggagcctgagctggacgcggccacgccggcgcggcgggatatgtggtgcctgtcataagctccagagagctgccttccacaagaccagcagaagagtgggcaaacatgaaatccaatcctgctatccaggctgccattgacctcacagcgggggctgcaggaggtacagcatgtgtactgaccgggcagccctttgacacaatgaaagtgaagatgcagacgttccctgacctgtaccggggcctcaccgactgctgcctgaagacttactcccaggtgggcttccgtggcttctacaagggtaccagtccagcactaatcgccaacatcgctgagaactcagtcctcttcatgtgctacggcttctgccagcaggtggtgcggaaagtggctggattggacaagcaggcaaagctgagtgatctgcagaatgcagccgccggttccttcgcctctgcctttgctgcactggtgctctgccccacggagctcgtgaagtgccggctgcagaccatgtatgagatggagacatcagggaagatagccaagagccagaatacagtgtggtctgtcatcaaaagtattcttaggaaagatggccccttggggttctaccatggactctcaagcactttacttcgagaagtaccaggctatttcttcttcttcggtggctatgaactgagccggtccttttttgcatcagggagatcaaaagatgaattaggccctgtacctttgatgttaagtggtggagttggtgggatttgcctctggcttgcggtatacccagtggattgtatcaaatccagaattcaagttctttccatgtctggaaaacaggcaggatttatcagaacctttataaatgttgtgaaaaatgaaggaataacggccttatattctggactgaaacctactatgattcgagcattccctgccaatggagcactctttttggcctacgaatatagcaggaagttgatgatgaaccagttggaagcatactgaagtgtcttggtgggcctgagccaagcacaggtgtttgaggactacagttcatctcagggtttcttggagtacaagaccagtgtgaagttattctgatttcttgggaattttgctttttgtcttcccttctaccctacatcttaaactttatggaagaacctctattttgcatcatatcatttctgtccataattgtactgaaatagaaaagtgaccgctcttgctcttggtaaaatatagagtggtcagtagccttatgcacctaattcaaaaggtggaatatagttctgtcagggcttttacgtaaacctccacttgtacatgcaatttggacagttatgtgttgagggaaatacagtttggtaccttgtttatttcaaatatcagaaaaacccagaggtgatcatttctcatgaagatgcttataaatggttgcttaacccattctagatgtagggtctgcttaatgtgtgtacttttctaagtggttgattattttttatttttttgatacagagtctcactcttgcactccagactgggtgacacagcgagacttcatctcaaaaaaaaaaagaaaagaaaagcaattgtacttcactatgccatatgtatgtattcactgaccaaaaattcactgaccaaccaaccaaactccacacttcatctgatcccccatagacttggggatggacagctgttctttggccatatggtataagaggatcattcttgtcactacttaagttagcctcatcattttgtgctgctccaacaccagcagggtatctcccaataaagtgttcctaagcagcctgtatactgagtgcaagcaggctatcaattttaataatagtccataccatgtatgtgtttctgtcagcagaatgtacatgttgtacaaaacctccaggttccttaagctttttgctgtccatgaatcctctgtggcaactgtaatcacagagccagaagccagagggccagggatatgagaggctgacaaacatcaggggacatctggggaggagatccctgtcatgtctcttgtgccatggagctattatggctggtcttccatttgctttttctttaagtgaaaaccatttttctactttgcttttctctccatacttaaatggtcagtagctactgagtggtgctttatctgaataggcctggatcgaagtaaaatagaaatgggactggctttccacaggaagtaaactgcttcagagcccacagtcccctgctcagtgtccggaaagaagtcagtcatccctgttggcagtaaatcttcccacaggccgtccattagagatttaactagatatgttcaatagaaagagtctgaggcaagtggaaatgaggaacggaaacttaggttgggagaatattttttttttattcattctgtttgcttaattcagagtacagtttgtgctatttcatatctgtactccaggcagaaatataacttgaaaatactgtgtctaaagaaatttcagtgttctatcattaaattatttacttaataaaaaagtctgat

SEQ ID NO: 358228 - DNA, 3069 bp, Homo sapiens
tttaagcataaataaatttcagttcattctctatttacatacacgttattaatcggtagagctcaaattaaagaggtttttctatagaatgaaatatttagctctttggggattaattagccagactccttgtttcctttccgtggtgccgggtctgatcagtcccactgggcattaggcaaagtgagcgatgaagtcttcccaggtctcccctccctttctgtggtttccgtttcttgtgcacacagtagctgctgtttactgattacgtagccggtgctgtgccaagcctgtctcctccatttttatttaatcctcacgctaaccctgtgaggtggcatggatgaggagctgaggctcagaagttacatggcttgtccaggatctcacagcaaagccatagtccctctgaccctattgcccaggctcctacatattcactgcactgtttgtcgctgttgaacacatgtctgtctctctcccctgcctggcatgagctccttcagggtgggacttagatgccaggcacatcaaggacctgctctaaattgtttactggacatggctggaaggttttggaggaaaagaggttgaaatgaaccgaagcaggggaggtacagcatgtgtactgaccgggcagccctttgacacaatgaaagtgaagatgcagacgttccctgacctgtaccggggcctcaccgactgctgcctgaagacttactcccaggtgggcttccgtggcttctacaagggtaccagtccagcactaatcgccaacatcgctgagaactcagtcctcttcatgtgctacggcttctgccagcaggtggtgcggaaagtggctggattggacaagcaggcaaagctgagtgatctgcagaatgcagccgccggttccttcgcctctgcctttgctgcactggtgctctgccccacggagctcgtgaagtgccggctgcagaccatgtatgagatggagacatcagggaagatagccaagagccagaatacagtgtggtctgtcatcaaaagtattcttaggaaagatggccccttggggttctaccatggactctcaagcactttacttcgagaagtaccaggctatttcttcttcttcggtggctatgaactgagccggtccttttttgcatcagggagatcaaaagatgaattaggccctgtacctttgatgttaagtggtggagttggtgggatttgcctctggcttgcggtatacccagtggattgtatcaaatccagaattcaagttctttccatgtctggaaaacaggcaggatttatcagaacctttataaatgttgtgaaaaatgaaggaataacggccttatattctggactgaaacctactatgattcgagcattccctgccaatggagcactctttttggcctacgaatatagcaggaagttgatgatgaaccagttggaagcatactgaagtgtcttggtgggcctgagccaagcacaggtgtttgaggactacagttcatctcagggtttcttggagtacaagaccagtgtgaagttattctgatttcttgggaattttgctttttgtcttcccttctaccctacatcttaaactttatggaagaacctctattttgcatcatatcatttctgtccataattgtactgaaatagaaaagtgaccgctcttgctcttggtaaaatatagagtggtcagtagccttatgcacctaattcaaaaggtggaatatagttctgtcagggcttttacgtaaacctccacttgtacatgcaatttggacagttatgtgttgagggaaatacagtttggtaccttgtttatttcaaatatcagaaaaacccagaggtgatcatttctcatgaagatgcttataaatggttgcttaacccattctagatgtagggtctgcttaatgtgtgtacttttctaagtggtggcacgtgcctgtagtcccagctactcaggaggctgaggcaggagaatcgcttgaacccgggaggcagaagttgcagtgaactgaaattgtgccactgcactccagactgggtgacacagcgagacttcatctcaaaaaaaaaaagaaaagaaaagcaattgtacttcactatgccatatgtatgtattcactgaccaaaaattcactgaccaaccaaccaaactccacacttcatctgatcccccatagacttggggatggacagctgttctttggccatatggtataagaggatcattcttgtcactacttaagttagcctcatcattttgtgctgctccaacaccagcagggtatctcccaataaagtgttcctaagcagcctgtatactgagtgcaagcaggctatcaattttaataatagtccataccatgtatgtgtttctgtcagcagaatgtacatgttgtacaaaacctccaggttccttaagctttttgctgtccatgaatcctctgtggcaactgtaatcacagagccagaagccagagggccagggatatgagaggctgacaaacatcaggggacatctggggaggagatccctgtcatgtctcttgtgccatggagctattatggctggtcttccatttgctttttctttaagtgaaaaccatttttctactttgcttttctctccatacttaaatggtcagtagctactgagtggtgctttatctgaataggcctggatcgaagtaaaatagaaatgggactggctttccacaggaagtaaactgcttcagagcccacagtcccctgctcagtgtccggaaagaagtcagtcatccctgttggcagtaaatcttcccacaggccgtccattagagatttaactagatatgttcaatagaaagagtctgaggcaagtggaaatgaggaacggaaacttaggttgggagaatattttttttttattcattctgtttgcttaattcagagtacagtttgtgctatttcatatctgtactccaggcagaaatataacttgaaaatactgtgtctaaagaaatttcagtgttctatcattaaattatttacttaataaaaaagtctgat

SEQ ID NO: 358229 - DNA, 2747 bp, Homo sapiens
acgcccacttccgcttcccgtgctgggggcggtggcagggccggtgggcggtggcggctcccggtctcggctcgggcacggccctgggcaggccgcccgccagccgcaggggcgctcctgagcttcgcggggccgcagtccgggatgcctgcgcgaagggaggggcgaagggccggccgttgccgacgtgggtgttaagtggccgccccagccggcgacccggagccgagagcgggcggcggagcctgagctggacgcggccacgccggcgcggcgggatatgtggtgcctgtcataagctccagagagctgccttccacaagaccagcagaagagtgggcaaacatgaaatccaatcctgctatccaggctgccattgacctcacagcgggggctgcaggaggtacagcatgtgtactgaccgggcagccctttgacacaatgaaagtgaagatgcagacgttccctgacctgtaccggggcctcaccgactgctgcctgaagacttactcccaggtgggcttccgtggcttctacaagggtaccagtccagcactaatcgccaacatcgctgagaactcagtcctcttcatgtgctacggcttctgccagcaggtggtgcggaaagtggctggattggacaagcaggcaaagctgagtgatctgcagaatgcagccgccggttccttcgcctctgcctttgctgcactggtgctctgccccacggagctcgtgaagtgccggctgcagaccatgtatgagatggagacatcagggaagatagccaagagccagaatacagtgtggtctgtcatcaaaagtattcttaggaaagatggccccttggggttctaccatggactctcaagcactttacttcgagaagtaccaggctatttcttcttcttcggtggctatgaactgagccggtccttttttgcatcagggagatcaaaagatgaattaggccctgtacctttgatgttaagtggtggagttggtgggatttgcctctggcttgcggtatacccagtggattgtatcaaatccagaattcaagttctttccatgtctggaaaacaggcaggatttatcagaacctttataaatgttgtgaaaaatgaaggaataacggccttatattctggactgaaacctactatgattcgagcattccctgccaatggagcactctttttggcctacgaatatagcaggaagttgatgatgaaccagttggaagcatactgaagtgtcttggtgggcctgagccaagcacaggtgtttgaggactacagttcatctcagggtttcttggagtacaagaccagtgtgaagttattctgatttcttgggaattttgctttttgtcttcccttctaccctacatcttaaactttatggaagaacctctattttgcatcatatcatttctgtccataattgtactgaaatagaaaagtgaccgctcttgctcttggtaaaatatagagtggtcagtagccttatgcacctaattcaaaaggtggaatatagttctgtcagggcttttacgtaaacctccacttgtacatgcaatttggacagttatgtgttgagggaaatacagtttggtaccttgtttatttcaaatatcagaaaaacccagaggtgatcatttctcatgaagatgcttataaatggttgcttaacccattctagatgtagggtctgcttaatgtgtgtacttttctaagtggttgattattttttatttttttgatacagagtctcactcttgcactccagactgggtgacacagcgagacttcatctcaaaaaaaaaaagaaaagaaaagcaattgtacttcactatgccatatgtatgtattcactgaccaaaaattcactgaccaaccaaccaaactccacacttcatctgatcccccatagacttggggatggacagctgttctttggccatatggtataagaggatcattcttgtcactacttaagttagcctcatcattttgtgctgctccaacaccagcagggtatctcccaataaagtgttcctaagcagcctgtatactgagtgcaagcaggctatcaattttaataatagtccataccatgtatgtgtttctgtcagcagaatgtacatgttgtactgtaatcacagagccagaagccagagggccagggatatgagaggctgacaaacatcaggggacatctggggaggagatccctgtcatgtctcttgtgccatggagctattatggctggtcttccatttgctttttctttaagtgaaaaccatttttctactttgcttttctctccatacttaaatggtcagtagctactgagtggtgctttatctgaataggcctggatcgaagtaaaatagaaatgggactggctttccacaggaagtaaactgcttcagagcccacagtcccctgctcagtgtccggaaagaagtcagtcatccctgttggcagtaaatcttcccacaggccgtccattagagatttaactagatatgttcaatagaaagagtctgaggcaagtggaaatgaggaacggaaacttaggttgggagaatattttttttttattcattctgtttgcttaattcagagtacagtttgtgctatttcatatctgtactccaggcagaaatataacttgaaaatactgtgtctaaagaaatttcagtgttctatcattaaattatttacttaataaaaaagtctgat

SEQ ID NO: 358230 - DNA, 2504 bp, Homo sapiens
acgcccacttccgcttcccgtgctgggggcggtggcagggccggtgggcggtggcggctcccggtctcggctcgggcacggccctgggcaggccgcccgccagccgcaggggcgctcctgagcttcgcggggccgcagtccgggatgcctgcgcgaagggaggggcgaagggccggccgttgccgacgtgggtgttaagtggccgccccagccggcgacccggagccgagagcgggcggcggagcctgagctggacgcggccacgccggcgcggcgggatatgtggtgcctgtcataagctccagagagctgccttccacaagaccagcagaagagtgggcaaacatgaaatccaatcctgtctgccccacggagctcgtgaagtgccggctgcagaccatgtatgagatggagacatcagggaagatagccaagagccagaatacagtgtggtctgtcatcaaaagtattcttaggaaagatggccccttggggttctaccatggactctcaagcactttacttcgagaagtaccaggctatttcttcttcttcggtggctatgaactgagccggtccttttttgcatcagggagatcaaaagatgaattaggccctgtacctttgatgttaagtggtggagttggtgggatttgcctctggcttgcggtatacccagtggattgtatcaaatccagaattcaagttctttccatgtctggaaaacaggcaggatttatcagaacctttataaatgttgtgaaaaatgaaggaataacggccttatattctggactgaaacctactatgattcgagcattccctgccaatggagcactctttttggcctacgaatatagcaggaagttgatgatgaaccagttggaagcatactgaagtgtcttggtgggcctgagccaagcacaggtgtttgaggactacagttcatctcagggtttcttggagtacaagaccagtgtgaagttattctgatttcttgggaattttgctttttgtcttcccttctaccctacatcttaaactttatggaagaacctctattttgcatcatatcatttctgtccataattgtactgaaatagaaaagtgaccgctcttgctcttggtaaaatatagagtggtcagtagccttatgcacctaattcaaaaggtggaatatagttctgtcagggcttttacgtaaacctccacttgtacatgcaatttggacagttatgtgttgagggaaatacagtttggtaccttgtttatttcaaatatcagaaaaacccagaggtgatcatttctcatgaagatgcttataaatggttgcttaacccattctagatgtagggtctgcttaatgtgtgtacttttctaagtggtggcacgtgcctgtagtcccagctactcaggaggctgaggcaggagaatcgcttgaacccgggaggcagaagttgcagtgaactgaaattgtgccactgcactccagactgggtgacacagcgagacttcatctcaaaaaaaaaaagaaaagaaaagcaattgtacttcactatgccatatgtatgtattcactgaccaaaaattcactgaccaaccaaccaaactccacacttcatctgatcccccatagacttggggatggacagctgttctttggccatatggtataagaggatcattcttgtcactacttaagttagcctcatcattttgtgctgctccaacaccagcagggtatctcccaataaagtgttcctaagcagcctgtatactgagtgcaagcaggctatcaattttaataatagtccataccatgtatgtgtttctgtcagcagaatgtacatgttgtacaaaacctccaggttccttaagctttttgctgtccatgaatcctctgtggcaactgtaatcacagagccagaagccagagggccagggatatgagaggctgacaaacatcaggggacatctggggaggagatccctgtcatgtctcttgtgccatggagctattatggctggtcttccatttgctttttctttaagtgaaaaccatttttctactttgcttttctctccatacttaaatggtcagtagctactgagtggtgctttatctgaataggcctggatcgaagtaaaatagaaatgggactggctttccacaggaagtaaactgcttcagagcccacagtcccctgctcagtgtccggaaagaagtcagtcatccctgttggcagtaaatcttcccacaggccgtccattagagatttaactagatatgttcaatagaaagagtctgaggcaagtggaaatgaggaacggaaacttaggttgggagaatattttttttttattcattctgtttgcttaattcagagtacagtttgtgctatttcatatctgtactccaggcagaaatataacttgaaaatactgtgtctaaagaaatttcagtgttctatcattaaattatttacttaataaaaaagtctgat

SEQ ID NO: 358231 - DNA, 434 bp, Homo sapiens
agtggattgtatcaaatccagaattcaagttctttccatgtctggaaaacaggcaggatttatcagaacctttataaatgttgtgaaaaatgaaggtgagtaaatacctgtttttcaagcatctatatacatcttaaaatctgagatacgggccgggcgtggtggctcatgcctgtgatcccagcactttgggaggctgaggcaggtggatcatgaggtcaggagatcgagaccatcctggctaacacggtgaaaccccgtctctactaaaaataccaaaaaaatcagccaggcgtggtggcaggcacctgtagtcccagctactcgggaggctgagacaggagaatggcgtcaacctgggaggcggagcttgcagtgagctgagattgcaccactgcactccagcctgggcaacagcgagactctgtctcaaa

SEQ ID NO: 358232 - DNA, 523 bp, Homo sapiens
gtaagttctggggtaggctgcctgtgccttccttccatggataatggaactgtagcctcgtactagagcagtcatctgtcctgattgcaggaggtacagcatgtgtactgaccgggcagccctttgacacaatgaaagtgaagatgcagacgttccctgacctgtaccggggcctcaccgactgctgcctgaagacttactcccaggtgggcttccgtggcttctacaagggtaccagtccagcactaatcgccaacatcgctgagaactcagtcctcttcatgtgctacggcttctgccagcaggtggtgcggaaagtggctggattggacaagcaggcaaagctgaggtgagtcaaggacacacactttttttatttgtttaaaaaaaccccacaaaactggcaagacatggtggctcatgcctgtaatcccagcactttgggaggcaaaggcaggaaaatggcttgaggctgagagttcaaaaccagcctgggcaacacagcaagatcctcatctctaca

SEQ ID NO: 358233 - DNA, 471 bp, Homo sapiens
aagtgaccgctcttgctcttggtaaaatatagagtggtcagtagccttatgcacctaattcaaaaggtggaatatagttctgtcagggcttttacgtaaacctccacttgtacatgcaatttggacagttatgtgttgagggaaatacagtttggtaccttgtttatttcaaatatcagaaaaacccagaggtgatcatttctcatgaagatgcttataaatggttgcttaacccattctagatgtagggtctgcttaatgtgtgtacttttctaagtggttgattattttttatttttttgatacagagtctcactctgtcacccagactggagtgcagtggcacgatctcggctcactgcaacctccgcctcctgggttcaagcgattctctcacctcagcctcctgagtagctgggattacaggtacgcgccaccatgtccagctaattttttttggtattttttgta

SEQ ID NO: 358234 - DNA, 1694 bp, Homo sapiens
acgcccacttccgcttcccgtgctgggggcggtggcagggccggtgggcggtggcggctcccggtctcggctcgggcacggccctgggcaggccgcccgccagccgcaggggcgctcctgagcttcgcggggccgcagtccgggatgcctgcgcgaagggaggggcgaagggccggccgttgccgacgtgggtgttaagtggccgccccagccggcgacccggagccgagagcgggcggcggagcctgagctggacgcggccacgccggcgcggcgggatatgtggtgcctgtcataagctccagagagctgccttccacaagaccagcagaagagtgggcaaacatgaaatccaatcctgctatccaggctgccattgacctcacagcgggggctgcaggaggtacagcatgtgtactgaccgggcagccctttgacacaatgaaagtgaagatgcagacgttccctgacctgtaccggggcctcaccgactgctgcctgaagacttactcccaggtgggcttccgtggcttctacaagggtaccagtccagcactaatcgccaacatcgctgagaactcagtcctcttcatgtgctacggcttctgccagcaggtggtgcggaaagtggctggattggacaagcaggcaaagctgagtgatctgcagaatgcagccgccggttccttcgcctctgcctttgctgcactggtgctctgccccacggagctcgtgaagtgccggctgcagaccatgtatgagatggagacatcagggaagatagccaagagccagaatacagtgtggtctgtcatcaaaagtattcttaggaaagatggccccttggggttctaccatggactctcaagcactttacttcgagaagtaccaggctatttcttcttcttcggtggctatgaactgagccggtccttttttgcatcagggagatcaaaagatgaattaggccctgtacctttgatgttaagtggtggagttggtgggatttgcctctggcttgcggtatacccagtggattgtatcaaatccagaattcaagttctttccatgtctggaaaacaggcaggatttatcagaacctttataaatgttgtgaaaaatgaaggaataacggccttatattctggactgaaacctactatgattcgagcattccctgccaatggagcactctttttggcctacgaatatagcaggaagttgatgatgaaccagttggaagcatactgaagtgtcttggtgggcctgagccaagcacaggtgtttgaggactacagttcatctcagggtttcttggagtacaagaccagtgtgaagttattctgatttcttgggaattttgctttttgtcttcccttctaccctacatcttaaactttatggaagaacctctattttgcatcatatcatttctgtccataattgtactgaaatagaaaagtgaccgctcttgctcttggtaaaatatagagtggtcagtagccttatgcacctaattcaaaaggtggaatatagttctgtcagggcttttacgtaaacctccacttgtacatgcaatttggacagttatgtgttgagggaaatacagtttggtaccttgtttatttcaaatatcagaaaaacccagaggtgatcatttctcatgaagatgcttataaatggttgcttaaccc

SEQ ID NO: 358235 - DNA, 3235 bp, Homo sapiens
tttaagcataaataaatttcagttcattctctatttacatacacgttattaatcggtagagctcaaattaaagaggtttttctatagaatgaaatatttagctctttggggattaattagccagactccttgtttcctttccgtggtgccgggtctgatcagtcccactgggcattaggcaaagtgagcgatgaagtcttcccaggtctcccctccctttctgtggtttccgtttcttgtgcacacagtagctgctgtttactgattacgtagccggtgctgtgccaagcctgtctcctccatttttatttaatcctcacgctaaccctgtgaggtggcatggatgaggagctgaggctcagaagttacatggcttgtccaggatctcacagcaaagccatagtccctctgaccctattgcccaggctcctacatattcactgcactgtttgtcgctgttgaacacatgtctgtctctctcccctgcctggcatgagctccttcagggtgggacttagatgccaggcacatcaaggacctgctctaaattgtttactggacatggctggaaggttttggaggaaaagaggttgaaatgaaccgaagcaggggaggtacagcatgtgtactgaccgggcagccctttgacacaatgaaagtgaagatgcagacgttccctgacctgtaccggggcctcaccgactgctgcctgaagacttactcccaggtgggcttccgtggcttctacaagggtaccagtccagcactaatcgccaacatcgctgagaactcagtcctcttcatgtgctacggcttctgccagcaggtggtgcggaaagtggctggattggacaagcaggcaaagctgaggttaacagagagtccctgagggaggccaactgtggatctgcaggctggctgcaagacaacagaaaccattttaagcttcagttctaacaagctgctaaggagtgaagtgggggaaaggagtggactgaacagcattggatggtttccacaccccataaaagcgtgttgatctgcagaatgcagccgccggttccttcgcctctgcctttgctgcactggtgctctgccccacggagctcgtgaagtgccggctgcagaccatgtatgagatggagacatcagggaagatagccaagagccagaatacagtgtggtctgtcatcaaaagtattcttaggaaagatggccccttggggttctaccatggactctcaagcactttacttcgagaagtaccaggctatttcttcttcttcggtggctatgaactgagccggtccttttttgcatcagggagatcaaaagatgaattaggccctgtacctttgatgttaagtggtggagttggtgggatttgcctctggcttgcggtatacccagtggattgtatcaaatccagaattcaagttctttccatgtctggaaaacaggcaggatttatcagaacctttataaatgttgtgaaaaatgaaggaataacggccttatattctggactgaaacctactatgattcgagcattccctgccaatggagcactctttttggcctacgaatatagcaggaagttgatgatgaaccagttggaagcatactgaagtgtcttggtgggcctgagccaagcacaggtgtttgaggactacagttcatctcagggtttcttggagtacaagaccagtgtgaagttattctgatttcttgggaattttgctttttgtcttcccttctaccctacatcttaaactttatggaagaacctctattttgcatcatatcatttctgtccataattgtactgaaatagaaaagtgaccgctcttgctcttggtaaaatatagagtggtcagtagccttatgcacctaattcaaaaggtggaatatagttctgtcagggcttttacgtaaacctccacttgtacatgcaatttggacagttatgtgttgagggaaatacagtttggtaccttgtttatttcaaatatcagaaaaacccagaggtgatcatttctcatgaagatgcttataaatggttgcttaacccattctagatgtagggtctgcttaatgtgtgtacttttctaagtggtggcacgtgcctgtagtcccagctactcaggaggctgaggcaggagaatcgcttgaacccgggaggcagaagttgcagtgaactgaaattgtgccactgcactccagactgggtgacacagcgagacttcatctcaaaaaaaaaaagaaaagaaaagcaattgtacttcactatgccatatgtatgtattcactgaccaaaaattcactgaccaaccaaccaaactccacacttcatctgatcccccatagacttggggatggacagctgttctttggccatatggtataagaggatcattcttgtcactacttaagttagcctcatcattttgtgctgctccaacaccagcagggtatctcccaataaagtgttcctaagcagcctgtatactgagtgcaagcaggctatcaattttaataatagtccataccatgtatgtgtttctgtcagcagaatgtacatgttgtacaaaacctccaggttccttaagctttttgctgtccatgaatcctctgtggcaactgtaatcacagagccagaagccagagggccagggatatgagaggctgacaaacatcaggggacatctggggaggagatccctgtcatgtctcttgtgccatggagctattatggctggtcttccatttgctttttctttaagtgaaaaccatttttctactttgcttttctctccatacttaaatggtcagtagctactgagtggtgctttatctgaataggcctggatcgaagtaaaatagaaatgggactggctttccacaggaagtaaactgcttcagagcccacagtcccctgctcagtgtccggaaagaagtcagtcatccctgttggcagtaaatcttcccacaggccgtccattagagatttaactagatatgttcaatagaaagagtctgaggcaagtggaaatgaggaacggaaacttaggttgggagaatattttttttttattcattctgtttgcttaattcagagtacagtttgtgctatttcatatctgtactccaggcagaaatataacttgaaaatactgtgtctaaagaaatttcagtgttctatcattaaattatttacttaataaaaaagtctgat

SEQ ID NO: 358236 - DNA, 3024 bp, Homo sapiens
acgcccacttccgcttcccgtgctgggggcggtggcagggccggtgggcggtggcggctcccggtctcggctcgggcacggccctgggcaggccgcccgccagccgcaggggcgctcctgagcttcgcggggccgcagtccgggatgcctgcgcgaagggaggggcgaagggccggccgttgccgacgtgggtgttaagtggccgccccagccggcgacccggagccgagagcgggcggcggagcctgagctggacgcggccacgccggcgcggcgggatatgtggtgcctgtcataagctccagagagctgccttccacaagaccagcagaagagtgggcaaacatgaaatccaatcctgctatccaggctgccattgacctcacagcgggggctgcaggaggtacagcatgtgtactgaccgggcagccctttgacacaatgaaagtgaagatgcagacgttccctgacctgtaccggggcctcaccgactgctgcctgaagacttactcccaggtgggcttccgtggcttctacaagggtaccagtccagcactaatcgccaacatcgctgagaactcagtcctcttcatgtgctacggcttctgccagcaggtggtgcggaaagtggctggattggacaagcaggcaaagctgaggttaacagagagtccctgagggaggccaactgtggatctgcaggctggctgcaagacaacagaaaccattttaagcttcagttctaacaagctgctaaggagtgaagtgggggaaaggagtggactgaacagcattggatggtttccacaccccataaaagcgtgttgatctgcagaatgcagccgccggttccttcgcctctgcctttgctgcactggtgctctgccccacggagctcgtgaagtgccggctgcagaccatgtatgagatggagacatcagggaagatagccaagagccagaatacagtgtggtctgtcatcaaaagtattcttaggaaagatggccccttggggttctaccatggactctcaagcactttacttcgagaagtaccaggctatttcttcttcttcggtggctatgaactgagccggtccttttttgcatcagggagatcaaaagatgaattaggccctgtacctttgatgttaagtggtggagttggtgggatttgcctctggcttgcggtatacccagtggattgtatcaaatccagaattcaagttctttccatgtctggaaaacaggcaggatttatcagaacctttataaatgttgtgaaaaatgaaggaataacggccttatattctggactgaaacctactatgattcgagcattccctgccaatggagcactctttttggcctacgaatatagcaggaagttgatgatgaaccagttggaagcatactgaagtgtcttggtgggcctgagccaagcacaggtgtttgaggactacagttcatctcagggtttcttggagtacaagaccagtgtgaagttattctgatttcttgggaattttgctttttgtcttcccttctaccctacatcttaaactttatggaagaacctctattttgcatcatatcatttctgtccataattgtactgaaatagaaaagtgaccgctcttgctcttggtaaaatatagagtggtcagtagccttatgcacctaattcaaaaggtggaatatagttctgtcagggcttttacgtaaacctccacttgtacatgcaatttggacagttatgtgttgagggaaatacagtttggtaccttgtttatttcaaatatcagaaaaacccagaggtgatcatttctcatgaagatgcttataaatggttgcttaacccattctagatgtagggtctgcttaatgtgtgtacttttctaagtggtggcacgtgcctgtagtcccagctactcaggaggctgaggcaggagaatcgcttgaacccgggaggcagaagttgcagtgaactgaaattgtgccactgcactccagactgggtgacacagcgagacttcatctcaaaaaaaaaaagaaaagaaaagcaattgtacttcactatgccatatgtatgtattcactgaccaaaaattcactgaccaaccaaccaaactccacacttcatctgatcccccatagacttggggatggacagctgttctttggccatatggtataagaggatcattcttgtcactacttaagttagcctcatcattttgtgctgctccaacaccagcagggtatctcccaataaagtgttcctaagcagcctgtatactgagtgcaagcaggctatcaattttaataatagtccataccatgtatgtgtttctgtcagcagaatgtacatgttgtacaaaacctccaggttccttaagctttttgctgtccatgaatcctctgtggcaactgtaatcacagagccagaagccagagggccagggatatgagaggctgacaaacatcaggggacatctggggaggagatccctgtcatgtctcttgtgccatggagctattatggctggtcttccatttgctttttctttaagtgaaaaccatttttctactttgcttttctctccatacttaaatggtcagtagctactgagtggtgctttatctgaataggcctggatcgaagtaaaatagaaatgggactggctttccacaggaagtaaactgcttcagagcccacagtcccctgctcagtgtccggaaagaagtcagtcatccctgttggcagtaaatcttcccacaggccgtccattagagatttaactagatatgttcaatagaaagagtctgaggcaagtggaaatgaggaacggaaacttaggttgggagaatattttttttttattcattctgtttgcttaattcagagtacagtttgtgctatttcatatctgtactccaggcagaaatataacttgaaaatactgtgtctaaagaaatttcagtgttctatcattaaattatttacttaataaaaaagtctgat

SEQ ID NO: 358237 - DNA, 2745 bp, Homo sapiens
acgcccacttccgcttcccgtgctgggggcggtggcagggccggtgggcggtggcggctcccggtctcggctcgggcacggccctgggcaggccgcccgccagccgcaggggcgctcctgagcttcgcggggccgcagtccgggatgcctgcgcgaagggaggggcgaagggccggccgttgccgacgtgggtgttaagtggccgccccagccggcgacccggagccgagagcgggcggcggagcctgagctggacgcggccacgccggcgcggcgggatatgtggtgcctgtcataagctccagagagctgccttccacaagaccagcagaagagtgggcaaacatgaaatccaatcctgctatccaggctgccattgacctcacagcgggggctgcaggaggtacagcatgtgtactgaccgggcagccctttgacacaatgaaagtgaagatgcagacgttccctgacctgtaccggggcctcaccgactgctgcctgaagacttactcccaggtgggcttccgtggcttctacaagggtaccagtccagcactaatcgccaacatcgctgagaactcagtcctcttcatgtgctacggcttctgccagcaggtggtgcggaaagtggctggattggacaagcaggcaaagctgagtgatctgcagaatgcagccgccggttccttcgcctctgcctttgctgcactggtgctctgccccacggagctcgtgaagtgccggctgcagaccatgtatgagatggagacatcagggaagatagccaagagccagaatacagtgtggtctgtcatcaaaagtattcttaggaaagatggccccttggggttctaccatggactctcaagcactttacttcgagaagtaccaggctatttcttcttcttcggtggctatgaactgagccggtccttttttgcatcagggagatcaaaagatgaattaggccctgtacctttgatgttaagtggtggagttggtgggatttgcctctggcttgcggtatacccagtggattgtatcaaatccagaattcaagttctttccatgtctggaaaacaggcaggatttatcagaacctttataaatgttgtgaaaaatgaaggaataacggccttatattctggactgaaacctactatgattcgagcattccctgccaatggagcactctttttggcctacgaatatagcaggaagttgatgatgaaccagttggaagcatactgaagtgtcttggtgggcctgagccaagcacaggtgtttgaggactacagttcatctcagggtttcttggagtacaagaccagtgtgaagttattctgatttcttgggaattttgctttttgtcttcccttctaccctacatcttaaactttatggaagaacctctattttgcatcatatcatttctgtccataattgtactgaaatagaaaagtgaccgctcttgctcttggtaaaatatagagtggtcagtagccttatgcacctaattcaaaaggtggaatatagttctgtcagggcttttacgtaaacctccacttgtacatgcaatttggacagttatgtgttgagggaaatacagtttggtaccttgtttatttcaaatatcagaaaaacccagaggtgatcatttctcatgaagatgcttataaatggttgcttaacccattctagatgtagggtctgcttaatgtgtgtacttttctaagtggttgattattttttatttttttgatacagagtctcactcttgcactccagactgggtgacacagcgagacttcatctcaaaaaaaaaaagaaaagaaaagcaattgtacttcactatgccatatgtatgtattcactgaccaaaaattcactgaccaaccaaccaaactccacacttcatctgatcccccatagacttggggatggacagctgttctttggccatatggtataagaggatcattcttgtcactacttaagttagcctcatcattttgtgctgctccaacaccagcagggtatctcccaataaagtgttcctaagcagcctgtatactgagtgcaagcaggctatcaattttaataatagtccataccatgtatgtgtttctgtcagcagaatgtacatgttgtacaaaacctccaggttccttaagctttttgctgtccatgaatcctctgtggcaactgtaatcacagagccagaagccagagggccagggatatgagaggctgacaaacatcaggggacatctggggaggagatccctgtcatgtctcttgtgccatggagctattatggctggtcttccatttgctttttctttaagtgaaaaccatttttctactttgcttttctctccatacttaaatggtcagtagctactgagtggtgctttatctgaataggcctggatcgaaagtcccctgctcagtgtccggaaagaagtcagtcatccctgttggcagtaaatcttcccacaggccgtccattagagatttaactagatatgttcaatagaaagagtctgaggcaagtggaaatgaggaacggaaacttaggttgggagaatattttttttttattcattctgtttgcttaattcagagtacagtttgtgctatttcatatctgtactccaggcagaaatataacttgaaaatactgtgtctaaagaaatttcagtgttctatcattaaattatttacttaataaaaaagtctgat

SEQ ID NO: 358238 - DNA, 335 bp, Homo sapiens
tattatatatatgatcaaaagttttaataaggggtactttaacagaaaacaattctagtccagtgtgttctggaatagtagccccaaaataactagtccaaataacatgttcaaatatttgaagacaattttaaattcttttctaaaatccttggaagacatgcctctccaaataggcatctcaaatgagttaatatatattacagaataaaatatatactctaaacagtgactctcaaacaggggtgacttcatcacccataggaaatatagcactgtctggaaacaaaccaagggtgccactggtatctagtgggaagaggtcagggatacta

SEQ ID NO: 358239 - DNA, 987 bp, Homo sapiens
tcgccctcccaccccctagccatgcagaggtgaatgggggaacccaggaggggctgagagctccaggccaccttgagggaatccacgaggtcttctaccaggaagaagtgccgcagctgcgtggccgccgagaccacgcgggaggtgatctggtgggacaaacgttccgtctgctcccgagtcagggtgaggtccacatccagggcagcctggacaacatgacctgcatcctggtctgcttccctggggcccctaggccttctgaggaggcgatcaggagggagctagcactggacgcagccctgggctgcagaatcgctgaactgtgtgcctctgctcagaagccccccagcctgaacacagttttcaggactctggcctcagaggacatcccagatttacctcctgggggagggctggactgcaaggccactgtcattgctgaagtttattctcagatctgccaggtctcagaagagtgcggagagaaggggcaggatggggctgggaagtccaaccccacgcatttgggctcagccttggacatggaggcctgacagctgttgtcctttggggatcctttgcttctctggggcctcaacagaactaaagaagaaaaccgaccctttccccaactacatgtaccagcggaaggaaggaaggccaatgtaggaacccaaaatgcttatttcttcttctcttacttccctctcacagaaaagtcttacgaatggggaaattccaccaacatccagaccaaaaagaataaagcccagcccaaatcgaaaaaaaaaaaaaaaaaaaaaaaaaacaaaaaaacccaaccaaatgtttttgaaatattcagagccgaacagattctgagagataacccagtccaataacctctttccttcttattactcatctgtttttgaggggaagtagagttttgattattaaactttatttacataagtgattccaaatacattttcttgtaaaaaa

SEQ ID NO: 358240 - DNA, 880 bp, Homo sapiens
taggggaagagggaaggaggcctggagtctggcgagggacttgggagaggatggtgaacgagccacggcagagaggatgagagcgtggatccctggggcagcctggacaacatgacctgcatcctggtctgcttccctggggcccctaggccttctgaggaggcgatcaggagggagctagcactggacgcagccctgggctgcagaatcgctgaactgtgtgcctctgctcagaagccccccagcctgaacacagttttcaggactctggcctcagaggacatcccagatttacctcctgggggagggctggactgcaaggccactgtcattgctgaagtttattctcagatctgccaggtctcagaagagtgcggagagaaggggcaggatggggctgggaagtccaaccccacgcatttgggctcagccttggacatggaggcctgacagctgttgtcctttggggatcctttgcttctctggggcctcaacagaactaaagaagaaaaccgaccctttccccaactacatgtaccagcggaaggaaggaaggccaatgtaggaacccaaaatgcttatttcttcttctcttacttccctctcacagaaaagtcttacgaatggggaaattccaccaacatccagaccaaaaagaataaagcccagcccaaatcgaaaaaaaaaaaaaaaaaaaaaaaaaacaaaaaaacccaaccaaatgtttttgaaatattcagagccgaacagattctgagagataacccagtccaataacctctttccttcttattactcatctgtttttgaggggaagtagagttttgattattaaactttatttacataagtgattccaaatacattttcttgtaaaaaa

SEQ ID NO: 358241 - DNA, 410 bp, Homo sapiens
gaaaaggaagaggtgccaggagacaagacagaatttctcattaccttctcccacattttgtgttacagaaggggcaggatggggctgggaagtccaaccccacgcatttgggctcagccttggacatggaggcctgacagctgttgtcctttggggatcctttgcttctctggggcctcaacagaactaaagaagaaaaccgaccctttccccaactacatgtaccagcggaaggaaggaaggccaatgtaggaacccaaaatgcttatttcttcttctcttacttccctctcacagaaaagtcttacgaatggggaaattccaccaacatccagaccaaaaagaataaagcccagatgcggccgtttttcttatctcctaatccccccgaatccacgcctcacactcta

SEQ ID NO: 358242 - DNA, 898 bp, Homo sapiens
gagagttagtggaagggacttaagagaaagggcgtggtcttttggaaaggggcgattctgggtcgtaggagccgggccggaagtattgattagtgctggaaggtggaagagcagggcagcctggacaacatgacctgcatcctggtctgcttccctggggcccctaggccttctgaggaggcgatcaggagggagctagcactggacgcagccctgggctgcagaatcgctgaactgtgtgcctctgctcagaagccccccagcctgaacacagttttcaggactctggcctcagaggacatcccagatttacctcctgggggagggctggactgcaaggccactgtcattgctgaagtttattctcagatctgccaggtctcagaagagtgcggagagaaggggcaggatggggctgggaagtccaaccccacgcatttgggctcagccttggacatggaggcctgacagctgttgtcctttggggatcctttgcttctctggggcctcaacagaactaaagaagaaaaccgaccctttccccaactacatgtaccagcggaaggaaggaaggccaatgtaggaacccaaaatgcttatttcttcttctcttacttccctctcacagaaaagtcttacgaatggggaaattccaccaacatccagaccaaaaagaataaagcccagcccaaatcgaaaaaaaaaaaaaaaaaaaaaaaaaacaaaaaaacccaaccaaatgtttttgaaatattcagagccgaacagattctgagagataacccagtccaataacctctttccttcttattactcatctgtttttgaggggaagtagagttttgattattaaactttatttacataagtgattccaaatacattttcttgtaaaaaa

SEQ ID NO: 358243 - DNA, 828 bp, Homo sapiens
tcgccctcccaccccctagccatgcagaggtgaatgggggaacccaggaggggctgagagctccaggccaccttgagggaatccacgaggtcttctaccaggaagaagtgccgcagctgcgtggccgccgagaccacgcgggaggtgatctggtgggacaaacgttccgtctgctcccgagtcagggtgaggtccacatccagggcagcctggacaacatgacctgcatcctggtctgcttccctggggcccctaggccttctgaggaggcgatcaggagggagctagcactggacgcagccctgggctgcagaatcgctgaactgtgtgcctctgctcagaagccccccagcctgaacacagttttcaggactctggcctcagaggacatcccagatttacctcctgggggagggctggactgcaaggccactgtcattgctgaagtttattctcagatctgccaggtctcagaagagtgcggagagaaggggcaggatggggctgggaagtccaaccccacgcatttgggctcagccttggacatggaggcctgacagctgttgtcctttggggatcctttgcttctctggggcctcaacagaactaaagaagaaaaccgaccctttccccaactacatgtaccagcggaaggaaggaaggccaatgtaggaacccaaaatgcttatttcttcttctcttacttccctctcacagaaaagtcttacgaatggggaaattccaccaacatccagaccaaaaagaataaagcccgatgcggccagactataactacgaaaagaacgcagtgaggaataagaaaagaaa

SEQ ID NO: 358244 - DNA, 926 bp, Homo sapiens
tcgccctcccaccccctagccatgcagaggtgaatgggggaacccaggaggggctgagagctccaggccaccttgagggaatccacgaggtcttctaccaggaagaagtgccgcagctgcgtggccgccgagaccacgcgggaggtgatctggtgggacaaacgttccgtctgctcccgagtcagggtgaggtccacatccagggcagcctggacaacatgacctgcatcctggtctgcttccctggggcccctaggccttctgaggaggcgatcaggagggagctagcactggacgcagccctgggctgcagaatcgctgaactgtgtgcctctgctcagaagccccccagcctgaacacagttttcaggactctggcctcagaggacatcccagatttacctcctgggggagggctggactgcaaaaggggcaggatggggctgggaagtccaaccccacgcatttgggctcagccttggacatggaggcctgacagctgttgtcctttggggatcctttgcttctctggggcctcaacagaactaaagaagaaaaccgaccctttccccaactacatgtaccagcggaaggaaggaaggccaatgtaggaacccaaaatgcttatttcttcttctcttacttccctctcacagaaaagtcttacgaatggggaaattccaccaacatccagaccaaaaagaataaagcccagcccaaatcgaaaaaaaaaaaaaaaaaaaaaaaaaacaaaaaaacccaaccaaatgtttttgaaatattcagagccgaacagattctgagagataacccagtccaataacctctttccttcttattactcatctgtttttgaggggaagtagagttttgattattaaactttatttacataagtgattccaaatacattttcttgtaaaaaa

SEQ ID NO: 358245 - DNA, 567 bp, Homo sapiens
gaaaaggaagaggtgccaggagacaagacagaatttctcattaccttctcccacattttgtgttacagaaggggcaggatggggctgggaagtccaaccccacgcatttgggctcagccttggacatggaggcctgacagctgttgtcctttggggatcctttgcttctctggggcctcaacagaactaaagaagaaaaccgaccctttccccaactacatgtaccagcggaaggaaggaaggccaatgtaggaacccaaaatgcttatttcttcttctcttacttccctctcacagaaaagtcttacgaatggggaaattccaccaacatccagaccaaaaagaataaagcccagcccaaatcgaaaaaaaaaaaaaaaaaaaaaaaaaacaaaaaaacccaaccaaatgtttttgaaatattcagagccgaacagattctgagagataacccagtccaataacctctttccttcttattactcatctgtttttgaggggaagtagagttttgattattaaactttatttacataagtgattccaaatacattttcttgtaaaaaa

SEQ ID NO: 358246 - DNA, 767 bp, Homo sapiens
tcgccctcccaccccctagccatgcagaggtgaatgggggaacccaggaggggctgagagctccaggccaccttgagggaatccacgaggtcttctaccaggaagaagtgccgcagctgcgtggccgccgagaccacgcgggaggtgatctggtgggacaaacgttccgtctgctcccgagtcagggtgaggtccacatccagggcagcctggacaacatgacctgcatcctggtctgcttccctggggcccctaggccttctgaggaggcgatcaggagggagctagcactggacgcagccctgggctgcagaatcgctgaactgtgtgcctctgctcagaagccccccagcctgaacacagttttcaggactctggcctcagaggacatcccagatttacctcctgggggagggctggactgcaaaaggggcaggatggggctgggaagtccaaccccacgcatttgggctcagccttggacatggaggcctgacagctgttgtcctttggggatcctttgcttctctggggcctcaacagaactaaagaagaaaaccgaccctttccccaactacatgtaccagcggaaggaaggaaggccaatgtaggaacccaaaatgcttatttcttcttctcttacttccctctcacagaaaagtcttacgaatggggaaattccaccaacatccagaccaaaaagaataaagcccgatgcggccagactataactacgaaaagaacgcagtgaggaataagaaaagaaa

SEQ ID NO: 358247 - DNA, 1183 bp, Homo sapiens
gcggccgcacgggggtgccgaggcgtctggggggcctgcgcttcggggcgagcgcagcgcaaggctggcgcgcgcgcatggaggatgctcactgcacttggctttcgttacctggtctgcccccgggctgggccttgtttgccgtcctcgacggccacggtggggctcgagctgcccgcttcggtgcacgccatttgccaggccatgtgctccaggagctgggcccggagcctagcgagcccgagggcgtgcgcgaggcgctgcgccgagccttcttgagcgccgacgagcgcctgcgctccctctggccccgcgtggaaacgggcggctgcacggccgtggtgttgctggtctccccgcggtttctgtacctggcgcactgcggtgactcccgcgcggtgctgagccgcgctggcgccgtggccttcagcacagaggaccaccggccccttcgaccccgggaacgcgagcgcatccacgccgctggcggcaccatccgccgccgccgcgtcgagggctctctggccgtgtcgcgagcgttgggcgactttacctacaaggaggctccggggaggccccccgagctacagctcgtttctgcggagccagaggtggccgcactggcacgccaggctgaggacgagttcatgctcctggcctctgatggcgtctgggacactgtgtctggtgctgcctggcgggactggtggcttcacgcctccgcttgggcctggccccagagcttctctgcgcgcactgttgtcctttggggatcctttgcttctctggggcctcaacagaactaaagaagaaaaccgaccctttccccaactacatgtaccagcggaaggaaggaaggccaatgtaggaacccaaaatgcttatttcttcttctcttacttccctctcacagaaaagtcttacgaatggggaaattccaccaacatccagaccaaaaagaataaagcccagcccaaatcgaaaaaaaaaaaaaaaaaaaaaaaaaacaaaaaaacccaaccaaatgtttttgaaatattcagagccgaacagattctgagagataacccagtccaataacctctttccttcttattactcatctgtttttgaggggaagtagagttttgattattaaactttatttacataagtgattccaaatacattttcttgtaaaaaa

SEQ ID NO: 358248 - DNA, 838 bp, Homo sapiens
tcgccctcccaccccctagccatgcagaggtgaatgggggaacccaggaggggctgagagctccaggccaccttgagggaatccacgaggtcttctaccaggaagaagtgccgcagctgcgtggccgccgagaccacgcgggaggtgatctggtgggacaaacgttccgtctgctcccgagtcagggtgaggtccacatccagggcagcctggacaacatgacctgcatcctggtctgcttccctggggcccctaggccttctgaggaggcgatcaggagggagctagcactggacgcagccctgggctgcagaatcgctgaactgtgtgcctctgctcagaagccccccagcctgaacacagttttcaggactctggcctcagaggacatcccagatttacctcctgggggagggctggactgcaaggccactgtcattgctgaagtttattctcagatctgccaggtctcagaagagtgcggagagaaggggcaggatggggctgggaagtccaaccccacgcatttgggctcagccttggacatggaggcctgacagctgttgtcctttggggatcctttgcttctctggggcctcaacagaactaaagaagaaaaccgaccctttccccaactacatgtaccagcggaaggaaggaaggccaatgtaggaacccaaaatgcttatttcttcttctcttacttccctctcacagaaaagtcttacgaatggggaaattccaccaacatccagaccaaaaagaataaagcccagcgtaggcgcgccgaaacacttctcggcctcacatgccacgcacgtcccggactacgcaatat

SEQ ID NO: 358249 - DNA, 956 bp, Homo sapiens
tcgccctcccaccccctagccatgcagaggtgaatgggggaacccaggaggggctgagagctccaggccaccttgagggaatccacgaggtcttctaccaggaagaagtgccgcagctgcgtggccgccgagaccacgcgggaggtgatctggtgggacaaacgttccgtctgctcccgagtcagggtgaggtccacatccagggcagcctggacaacatgacctgcatcctggtctgcttccctggggcccctaggccttctgaggaggcgatcaggagggagctagcactggacgcagccctgggctgcagaatcgctgaactgtgtgcctctgctcagaagccccccagcctgaacacagttttcaggactctggcctcagaggacatcccagatttacctcctgggggagggctggactgcaaatctgccaggtctcagaagagtgcggagagaaggggcaggatggggctgggaagtccaaccccacgcatttgggctcagccttggacatggaggcctgacagctgttgtcctttggggatcctttgcttctctggggcctcaacagaactaaagaagaaaaccgaccctttccccaactacatgtaccagcggaaggaaggaaggccaatgtaggaacccaaaatgcttatttcttcttctcttacttccctctcacagaaaagtcttacgaatggggaaattccaccaacatccagaccaaaaagaataaagcccagcccaaatcgaaaaaaaaaaaaaaaaaaaaaaaaaacaaaaaaacccaaccaaatgtttttgaaatattcagagccgaacagattctgagagataacccagtccaataacctctttccttcttattactcatctgtttttgaggggaagtagagttttgattattaaactttatttacataagtgattccaaatacattttcttgtaaaaaa

SEQ ID NO: 358250 - DNA, 3915 bp, Homo sapiens
gcggccgcagctccgtttccggtggctcgtcgcgctcgctcactccagctgcagccactctcgcccgtggctgcttcctccatcctggtattttttggagcttccatcctggttcttccaaagtgcccggacccaaaacaggaaagtgttgcggagataggaacatgggagagaaacaatctgggtaacatgaaagtgatgctggttgctaagggaaggcaacttgattctgtgggaagggctgtagctgatccatccgttgtctagatttgagtatgagcacagtggaagaggattctgacacagtaacagtagaaactgtgaactctgtgactttgactcaggacacagaagggaatctcattcttcactgccctcagaatgaagcggatgaaatagactcagaagatagtattgaacctccacataaaaggctttgtttgtcctctgaggatgatcagagtattgatgattctactccttgcatatcagttgttgcacttccactttcagaaaatgatcagagctttgaagtgaccatgactgcaaccacagaagtagcagatgatgaggttactgaggggactgtgacacagatacagattttgcagaatgagcaactagatgaaatatctcccttgggtaacgaggaagtttcagcagttagccaagcatggtttacaactaaagaagataaggattctctgactaataaaggacataaatggaagcaggggatgtggtccaaggaagaaattgatattttgatgaacaatattgaacgctatcttaaggcacgcggaataaaagatgctacagaaatcatctttgagatgtcaaaagacgaaagaaaagatttctacaggactatagcatggggtctgaaccggcctttgtttgcagtttatagaagagtgcttcgcatgtatgatgacagaaaccatgtgggaaaatatacacctgaagaaattgagaagctcaaggaacaactgtggaccccaaaaaaaggccacactttcaaactttggctctcaaagtattgctgcccacaacttccaaaccagtcaaatgggaagaagaagaatgaagaataaatgatgaaattaaaagggagaaaacaattgaaccaaatgctgattggcagactcttgttttaggctccggataaagcatggcaatgactgggcaacaataggggcggcgctaggaagaagtgcatcttctgtcaaagatcggtgccgactgatgaaggatacttgcaacacagggaagtggacagaagaagaagaaaagagacttgcagaagtggttcatgagttgacaagcactgagccaggtgacatagtcacacagggtgtgtcttgggcagctgtggctgaacgagtcggtacccgctcagaaaagcaatgtcgttctaaatggctcaactacctgaattggaaacagagtgggggtactgaatggaccaaggaagatgaaatcaatctcatcctcaggatagcagaacttgatgtagctgatgaaaatgacattaactgggatctgttagctgagggatggagtagtgtccgttcaccacaatggctacgaagtaaatggtggaccatcaaaaggcaaattgcaaaccataaggatgtttcgttccctgtcttaataaaaggtcttaaacagttacatgagaaccaaaaaaacaacccaacgcttttggagaataaatcaggatctggagttccaaacagtaataccaattccagtgtgcagcatgttcagataagagttgcccgcttggaagataatacagccatctcttctagccccatggcagcattgcagattccagtccagatcacccatgtttcttcagcagactctcctgctaccgttgactcagaaacaataacactaaacagtggaacactacagacatttgagattcttccctctttccatctacagcccactggcactccaggcacctacctacttcaaacaagctcaagccaaggccttcccctaactctgactgctagtcccacagtaaccctgacagctgctgctcctgcttctcctgaacagattattgttcatgctttatccccagaacatttgttgaacacaagtgataatgttacagtgcagtgtcacacaccaagagtcatcattcagactgttgccacagaggacatcacttcttccatatcccaagcagaactgacagtcgatagtgatattcagtcatctgattttcctgagcctccagacgccctagaagcagacactttcccagatgaaattcatcaccctaagatgactgtggagccatcatttaatgatgctcatgtatccaaattcagtgaccaaaatagcacagaactgatgaatagtgttatggtcagaacagaagaagaaatctctgacaccgaccttaaacaagaggaatcaccctctgatttagccagtgcttatgttactgagggtttagagtctcccactatagaagaacaagttgatcaaacaattgatgatgaaacaatacttatcgttccttcaccacatggctttatccaggcatctgatgttatagatactgaatctgtcttgcctttgacaacactaacagatcccatactccaacatcatcaggaagaatcaaatatcattggatcatccttgggcagtcctgtttcagaagattcaaaggatgtcgaagatttggtaaactgtcattagaataattcttagaaataggcagttcaagcaaagaaggcacactgttaattacaacctcttcaaagaaataggagcaacccccaagaggcttaatttaccaatttaaatagccacagtccttaagccacacacattgttgctgctatgactttttacctcctttaaacacatcatctgaggttgagttttatgacagtatgtagttgagtggaggctgggagttttaagcataaatccctgtttagtgttacatgggaataaggaatttcattcacttcagccactaagaaaagtttagaatcacgaaagcttaactgctgtggtttaaagtacagtttctctaaagatcagacatggcactgtctcctctcaagcctggttgtagttcagatgagtcttttcaacatggtcttcaacatggtctagagcttaccagtgatcttctgatcttcaagaagactaagtttgagacttgaccagcatacaagtatagagacctaggaggtggtcttgtggtggtacatttggttaacccattgctggcagtgggagctgatttaggcagggtaaacaggaaagcattaaaagttaaaattcactacaggttttttgttacttttaaagggaatatggataagcatagtaacaaaacccaccagaatctaagcagttttcaccccctcagaaaccactgtcattagtttacaaagttagcactttgaagtaaaactaaatgaggaaggaagtaatgttacctatccttgataccatgaccatttattagatgttttgctatataaattaccgagagaatagtttgtcatccacttagtgtgttagctggtggggtacaatataacctctcatctcaggctattttaaaaaaacaatatttgcttctataacaaaaggaaacaaatctaagaatcattcctgtactacagaagggttaaggcaaaggtagccttttgggctttttaatgaatatgacccctatagaaaagtcaagaaaaaaaaacccttgtataaattattttatttattattgtaattagatcttcacaaagttgtcttttcactgtgttttgtcaacgtgaaattaaattgtagttataagcaaaagttggttgcctagggaacaattgtatattcagtttaacagaaataaaagaatatttgtcttaa

SEQ ID NO: 358251 - DNA, 638 bp, Homo sapiens
gggttgttttgaggaaaggaaaccagggaaaccttaaatttttaatcccggcggggtgtcttgatccctttaaaaggggaaatgtttaagcaacggcgccaacccccccagattttagacgtgttttcaccccctcagaaaccactgtcattagtttacaaagttagcactttgaagtaaaactaaatgaggaaggaagtaatgttacctatccttgataccatgaccatttattagatgttttgctatataaattaccgagagaatagtttgtcatccacttagtgtgttagctggtggggtacaatataacctctcatctcaggctattttaaaaaaacaatatttgcttctataacaaaaggaaacaaatctaagaatcattcctgtactacagaagggttaaggcaaaggtagccttttgggctttttaatgaatatgacccctatagaaaagtcaagaaaaaaaaacccttgtataaattattttatttattattgtaattagatcttcacaaagttgtcttttcactgtgttttgtcaacgtgaaattaaattgtagttataagcaaaagttggttgcctagggaacaattgtatattcagtttaacagaaataaaagaatatttgtcttaa

SEQ ID NO: 358252 - DNA, 618 bp, Homo sapiens
agcctgtccatatgggttggacgaggatatgttgttttttaaaatatcttatttttataagctctcacatccagtatgcagttatttattccaaatactttccctccttacctccccccacctcccttgctgcttagatggtggtctgtcggagaatcaatgttctttttgtctacccatctcccttcagtcttaataaaaggtcttaaacagttacatgagaaccaaaaaaacaacccaacgcttttggagaataaatcaggatctggagttccaaacagtaataccaattccagtgtgcagcatgttcagataagagttgcccgcttggaagataatacagccatctcttctagccccatggcagcattgcagattccagtccagatcacccatgtttgtaagtgtttgatcttcaagattccttgctgtttgatctatatgatttggttaatggctctgatgtcttttggttttctagaatgttaatagaaatttacccaagtcggtgaactgaaggacatctaagatattttgtttagttcagttaatatttgcacacacaatgaatgtgtgacaggaaggatgtataagcagtcgtccaaccatatggaccat

SEQ ID NO: 358253 - DNA, 637 bp, Homo sapiens
atttacaactttaacaggttctttaatgttttatagccagaacatttgttgaacacaagtgataatgttacagtgcagtgtcacacaccaagagtcatcattcagactgttgccacagaggacatcacttcttccatatcccaagcagaactgacagtcgatagtgatattcagtcatctgattttcctgagcctccagacgccctagaagcagacactttcccagatgaaattcatcaccctaagatgactgtggagccatcatttaatgatgctcatgtatccaaattcagtgaccaaaatagcacagaactgatgaatagtgttatggtcagaacagaagaagaaatctctgacaccgaccttaaacaagaggaatcaccctctgatttagccagtgcttatgttactgagaggtaagttgtactttaagaacaactgaatggattcttgccttgagcctcaaacctgcagtttgggaaacttttttctgaagactcatgaaattaagctcaaacccccaacctcacacctcacaaagtgttgtcactggcagaaatgggcaggcagtgatcctgtggcagtcaggaagaataagaaaaccatgttctatcttaccacagttcctcactaaaac

SEQ ID NO: 358254 - DNA, 351 bp, Homo sapiens
gggggggccaaaaaaacccccctcttccctccggggttttttaaaaaaaaccccaattgtgttttataaacaaaaaggaaacaaatctaagaatcattcctgtactacagaagggttaaggcaaaggtagccttttgggctttttaatgaatatgacccctatagaaaagtcaagaaaaaaaaacccttgtataaattattttatttattattgtaattagatcttcacaaagttgtcttttcactgtgttttgtcaacgtgaaattaaattgtagttataagcaaaagttggttgcctagggaacaattgtatattcagtttaacagaaataaaagaatatttgtcttaa

SEQ ID NO: 358255 - DNA, 296 bp, Homo sapiens
gaagaagaggaagaagcagcgatattttcttttttcctttgggactgactgtcactcttgctggactcagcctggtttgcaattgcgcgatcttggacattccttgctgtttgatctatatgatttggttaatggctctgatgtcttttggttttctagaatgttaatagaaatttacccaagtcggtgaactgaaggacatctaagatattttgtttagttcagttaatatttgcacacacaatgaatgtgtgacaggaaggatgtataagcagtcgtccaaccatatggaccat

SEQ ID NO: 358256 - DNA, 4440 bp, Homo sapiens
ttaaggtctttggttggcttttgaggataaagatgagaagcttattgaaagaaacctttaaaaaccatttcatatttcataaagtttcacattgctttcaagagcttgtaatttgtcttttctggcctaattgtttaaggttttgtttttgttttttccacagattcctagatagggttgttcatctgtcatcttaaaagggttttctggatgaatagggtactatataatttttaatgctttaagataaaacataaagaggtgttaataattataaaggaaaactatagttactaataatatttatggtgctgtattgattgatatacacatcatgttacataatggtaccacagtctacagttcatagaatcactagcatagctgagcctgttttttttttttttttcagagaacgtttgtctgcctgatgagagccacttgggttaagaaactacctgtgaatagtcatcatttctgtccttcattggggaatacttttagaggccagtttccaaaaattctgcttaaaaaagaattctggttttgtcttactcttccagatgagatatcacagaggcttgggcctagattgtcatcagcatactgctatactattcgtttgttcttattaagccttattgtgtgtaatgctgttactttttcagaagtgttgcggagataggaacatgggagagaaacaatctgggtaacatgaaagtgatgctggttgctaagggaaggcaacttgattctgtgggaagggctgtagctgatccatccgttgtctagatttgagtatgagcacagtggaagaggattctgacacagtaacagtagaaactgtgaactctgtgactttgactcaggacacagaagggaatctcattcttcactgccctcagaatgaagcggatgaaatagactcagaagatagtattgaacctccacataaaaggctttgtttgtcctctgaggatgatcagagtattgatgattctactccttgcatatcagttgttgcacttccactttcagaaaatgatcagagctttgaagtgaccatgactgcaaccacagaagtagcagatgatgaggttactgaggggactgtgacacagatacagattttgcagaatgagcaactagatgaaatatctcccttgggtaacgaggaagtttcagcagttagccaagcatggtttacaactaaagaagataaggattctctgactaataaaggacataaatggaagcaggggatgtggtccaaggaagaaattgatattttgatgaacaatattgaacgctatcttaaggcacgcggaataaaagatgctacagaaatcatctttgagatgtcaaaagacgaaagaaaagatttctacaggactatagcatggggtctgaaccggcctttgtttgcagtttatagaagagtgcttcgcatgtatgatgacagaaaccatgtgggaaaatatacacctgaagaaattgagaagctcaaggaacaactgtggaccccaaaaaaaggccacactttcaaactttggctctcaaagtattgctgcccacaacttccaaaccagtcaaatgggaagaagaagaatgaagaataaatgatgaaattaaaagggagaaaacaattgaaccaaatgctgattggcagactcttgttttaggctccggataaagcatggcaatgactgggcaacaataggggcggcgctaggaagaagtgcatcttctgtcaaagatcggtgccgactgatgaaggatacttgcaacacagggaagtggacagaagaagaagaaaagagacttgcagaagtggttcatgagttgacaagcactgagccaggtgacatagtcacacagggtgtgtcttgggcagctgtggctgaacgagtcggtacccgctcagaaaagcaatgtcgttctaaatggctcaactacctgaattggaaacagagtgggggtactgaatggaccaaggaagatgaaatcaatctcatcctcaggatagcagaacttgatgtagctgatgaaaatgacattaactgggatctgttagctgagggatggagtagtgtccgttcaccacaatggctacgaagtaaatggtggaccatcaaaaggcaaattgcaaaccataaggatgtttcgttccctgtcttaataaaaggtcttaaacagttacatgagaaccaaaaaaacaacccaacgcttttggagaataaatcaggatctggagttccaaacagtaataccaattccagtgtgcagcatgttcagataagagttgcccgcttggaagataatacagccatctcttctagccccatggcagcattgcagattccagtccagatcacccatgtttcttcagcagactctcctgctaccgttgactcagaaacaataacactaaacagtggaacactacagacatttgagattcttccctctttccatctacagcccactggcactccaggcacctacctacttcaaacaagctcaagccaaggccttcccctaactctgactgctagtcccacagtaaccctgacagctgctgctcctgcttctcctgaacagattattgttcatgctttatccccagaacatttgttgaacacaagtgataatgttacagtgcagtgtcacacaccaagagtcatcattcagactgttgccacagaggacatcacttcttccatatcccaagcagaactgacagtcgatagtgatattcagtcatctgattttcctgagcctccagacgccctagaagcagacactttcccagatgaaattcatcaccctaagatgactgtggagccatcatttaatgatgctcatgtatccaaattcagtgaccaaaatagcacagaactgatgaatagtgttatggtcagaacagaagaagaaatctctgacaccgaccttaaacaagaggaatcaccctctgatttagccagtgcttatgttactgagggtttagagtctcccactatagaagaacaagttgatcaaacaattgatgatgaaacaatacttatcgttccttcaccacatggctttatccaggcatctgatgttatagatactgaatctgtcttgcctttgacaacactaacagatcccatactccaacatcatcaggaagaatcaaatatcattggatcatccttgggcagtcctgtttcagaagattcaaaggatgtcgaagatttggtaaactgtcattagaataattcttagaaataggcagttcaagcaaagaaggcacactgttaattacaacctcttcaaagaaataggagcaacccccaagaggcttaatttaccaatttaaatagccacagtccttaagccacacacattgttgctgctatgactttttacctcctttaaacacatcatctgaggttgagttttatgacagtatgtagttgagtggaggctgggagttttaagcataaatccctgtttagtgttacatgggaataaggaatttcattcacttcagccactaagaaaagtttagaatcacgaaagcttaactgctgtggtttaaagtacagtttctctaaagatcagacatggcactgtctcctctcaagcctggttgtagttcagatgagtcttttcaacatggtcttcaacatggtctagagcttaccagtgatcttctgatcttcaagaagactaagtttgagacttgaccagcatacaagtatagagacctaggaggtggtcttgtggtggtacatttggttaacccattgctggcagtgggagctgatttaggcagggtaaacaggaaagcattaaaagttaaaattcactacaggttttttgttacttttaaagggaatatggataagcatagtaacaaaacccaccagaatctaagcagttttcaccccctcagaaaccactgtcattagtttacaaagttagcactttgaagtaaaactaaatgaggaaggaagtaatgttacctatccttgataccatgaccatttattagatgttttgctatataaattaccgagagaatagtttgtcatccacttagtgtgttagctggtggggtacaatataacctctcatctcaggctattttaaaaaaacaatatttgcttctataacaaaaggaaacaaatctaagaatcattcctgtactacagaagggttaaggcaaaggtagccttttgggctttttaatgaatatgacccctatagaaaagtcaagaaaaaaaaacccttgtataaattattttatttattattgtaattagatcttcacaaagttgtcttttcactgtgttttgtcaacgtgaaattaaattgtagttataagcaaaagttggttgcctagggaacaattgtatattcagtttaacagaaataaaagaatatttgtcttaa

SEQ ID NO: 358257 - DNA, 4154 bp, Homo sapiens
cgcccagtggagcctgtccggcccccttgctgcccgctagctcccgccggctggcgcaagctgtcggcgccggggcactgcgggcggggtcggagcctggccttcctgacgttgcagctgccgtccccgcacgttccggccagggcctccctcttagggccgggcggtgcccgtggctcaggctgcagagtagaaagcacaaaaaccagcctgattgtatctggaaaaaaccattatgttacagttgataggctcaccccaaaatatgcttttggggactgatttagcacctgcatattctgcgtgaatctctttaattggttgcagttgagctaatggtggagccaaaatgctattgccctgtcttcatcaacatttaatcaagtgttgcggagataggaacatgggagagaaacaatctgggtaacatgaaagtgatgctggttgctaagggaaggcaacttgattctgtgggaagggctgtagctgatccatccgttgtctagatttgagtatgagcacagtggaagaggattctgacacagtaacagtagaaactgtgaactctgtgactttgactcaggacacagaagggaatctcattcttcactgccctcagaatgaagcggatgaaatagactcagaagatagtattgaacctccacataaaaggctttgtttgtcctctgaggatgatcagagtattgatgattctactccttgcatatcagttgttgcacttccactttcagaaaatgatcagagctttgaagtgaccatgactgcaaccacagaagtagcagatgatgaggttactgaggggactgtgacacagatacagattttgcagaatgagcaactagatgaaatatctcccttgggtaacgaggaagtttcagcagttagccaagcatggtttacaactaaagaagataaggattctctgactaataaaggacataaatggaagcaggggatgtggtccaaggaagaaattgatattttgatgaacaatattgaacgctatcttaaggcacgcggaataaaagatgctacagaaatcatctttgagatgtcaaaagacgaaagaaaagatttctacaggactatagcatggggtctgaaccggcctttgtttgcagtttatagaagagtgcttcgcatgtatgatgacagaaaccatgtgggaaaatatacacctgaagaaattgagaagctcaaggaacaactgtggaccccaaaaaaaggccacactttcaaactttggctctcaaagtattgctgcccacaacttccaaaccagtcaaatgggaagaagaagaatgaagaataaatgatgaaattaaaagggagaaaacaattgaaccaaatgctgattggcagactcttgttttaggctccggataaagcatggcaatgactgggcaacaataggggcggcgctaggaagaagtgcatcttctgtcaaagatcggtgccgactgatgaaggatacttgcaacacagggaagtggacagaagaagaagaaaagagacttgcagaagtggttcatgagttgacaagcactgagccaggtgacatagtcacacagggtgtgtcttgggcagctgtggctgaacgagtcggtacccgctcagaaaagcaatgtcgttctaaatggctcaactacctgaattggaaacagagtgggggtactgaatggaccaaggaagatgaaatcaatctcatcctcaggatagcagaacttgatgtagctgatgaaaatgacattaactgggatctgttagctgagggatggagtagtgtccgttcaccacaatggctacgaagtaaatggtggaccatcaaaaggcaaattgcaaaccataaggatgtttcgttccctgtcttaataaaaggtcttaaacagttacatgagaaccaaaaaaacaacccaacgcttttggagaataaatcaggatctggagttccaaacagtaataccaattccagtgtgcagcatgttcagataagagttgcccgcttggaagataatacagccatctcttctagccccatggcagcattgcagattccagtccagatcacccatgtttcttcagcagactctcctgctaccgttgactcagaaacaataacactaaacagtggaacactacagacatttgagattcttccctctttccatctacagcccactggcactccaggcacctacctacttcaaacaagctcaagccaaggccttcccctaactctgactgctagtcccacagtaaccctgacagctgctgctcctgcttctcctgaacagattattgttcatgctttatccccagaacatttgttgaacacaagtgataatgttacagtgcagtgtcacacaccaagagtcatcattcagactgttgccacagaggacatcacttcttccatatcccaagcagaactgacagtcgatagtgatattcagtcatctgattttcctgagcctccagacgccctagaagcagacactttcccagatgaaattcatcaccctaagatgactgtggagccatcatttaatgatgctcatgtatccaaattcagtgaccaaaatagcacagaactgatgaatagtgttatggtcagaacagaagaagaaatctctgacaccgaccttaaacaagaggaatcaccctctgatttagccagtgcttatgttactgagggtttagagtctcccactatagaagaacaagttgatcaaacaattgatgatgaaacaatacttatcgttccttcaccacatggctttatccaggcatctgatgttatagatactgaatctgtcttgcctttgacaacactaacagatcccatactccaacatcatcaggaagaatcaaatatcattggatcatccttgggcagtcctgtttcagaagattcaaaggatgtcgaagatttggtaaactgtcattagaataattcttagaaataggcagttcaagcaaagaaggcacactgttaattacaacctcttcaaagaaataggagcaacccccaagaggcttaatttaccaatttaaatagccacagtccttaagccacacacattgttgctgctatgactttttacctcctttaaacacatcatctgaggttgagttttatgacagtatgtagttgagtggaggctgggagttttaagcataaatccctgtttagtgttacatgggaataaggaatttcattcacttcagccactaagaaaagtttagaatcacgaaagcttaactgctgtggtttaaagtacagtttctctaaagatcagacatggcactgtctcctctcaagcctggttgtagttcagatgagtcttttcaacatggtcttcaacatggtctagagcttaccagtgatcttctgatcttcaagaagactaagtttgagacttgaccagcatacaagtatagagacctaggaggtggtcttgtggtggtacatttggttaacccattgctggcagtgggagctgatttaggcagggtaaacaggaaagcattaaaagttaaaattcactacaggttttttgttacttttaaagggaatatggataagcatagtaacaaaacccaccagaatctaagcagttttcaccccctcagaaaccactgtcattagtttacaaagttagcactttgaagtaaaactaaatgaggaaggaagtaatgttacctatccttgataccatgaccatttattagatgttttgctatataaattaccgagagaatagtttgtcatccacttagtgtgttagctggtggggtacaatataacctctcatctcaggctattttaaaaaaacaatatttgcttctataacaaaaggaaacaaatctaagaatcattcctgtactacagaagggttaaggcaaaggtagccttttgggctttttaatgaatatgacccctatagaaaagtcaagaaaaaaaaacccttgtataaattattttatttattattgtaattagatcttcacaaagttgtcttttcactgtgttttgtcaacgtgaaattaaattgtagttataagcaaaagttggttgcctagggaacaattgtatattcagtttaacagaaataaaagaatatttgtcttaa

SEQ ID NO: 358258 - DNA, 4231 bp, Homo sapiens
ttaaggtctttggttggcttttgaggataaagatgagaagcttattgaaagaaacctttaaaaaccatttcatatttcataaagtttcacattgctttcaagagcttgtaatttgtcttttctggcctaattgtttaaggttttgtttttgttttttccacagattcctagatagggttgttcatctgtcatcttaaaagggttttctggatgaatagggtactatataatttttaatgctttaagataaaacataaagaggtgttaataattataaaggaaaactatagttactaataatatttatggtgctgtattgattgatatacacatcatgttacataatggtaccacagtctacagttcatagaatcactagcatagctgagcctgttttttttttttttttcagagaacgtttgtctgcctgatgagagccacttgggttaagaaactacctagtgttgcggagataggaacatgggagagaaacaatctgggtaacatgaaagtgatgctggttgctaagggaaggcaacttgattctgtgggaagggctgtagctgatccatccgttgtctagatttgagtatgagcacagtggaagaggattctgacacagtaacagtagaaactgtgaactctgtgactttgactcaggacacagaagggaatctcattcttcactgccctcagaatgaagcggatgaaatagactcagaagatagtattgaacctccacataaaaggctttgtttgtcctctgaggatgatcagagtattgatgattctactccttgcatatcagttgttgcacttccactttcagaaaatgatcagagctttgaagtgaccatgactgcaaccacagaagtagcagatgatgaggttactgaggggactgtgacacagatacagattttgcagaatgagcaactagatgaaatatctcccttgggtaacgaggaagtttcagcagttagccaagcatggtttacaactaaagaagataaggattctctgactaataaaggacataaatggaagcaggggatgtggtccaaggaagaaattgatattttgatgaacaatattgaacgctatcttaaggcacgcggaataaaagatgctacagaaatcatctttgagatgtcaaaagacgaaagaaaagatttctacaggactatagcatggggtctgaaccggcctttgtttgcagtttatagaagagtgcttcgcatgtatgatgacagaaaccatgtgggaaaatatacacctgaagaaattgagaagctcaaggaacaactgtggaccccaaaaaaaggccacactttcaaactttggctctcaaagtattgctgcccacaacttccaaaccagtcaaatgggaagaagaagaatgaagaataaatgatgaaattaaaagggagaaaacaattgaaccaaatgctgattggcagactcttgttttaggctccggataaagcatggcaatgactgggcaacaataggggcggcgctaggaagaagtgcatcttctgtcaaagatcggtgccgactgatgaaggatacttgcaacacagggaagtggacagaagaagaagaaaagagacttgcagaagtggttcatgagttgacaagcactgagccaggtgacatagtcacacagggtgtgtcttgggcagctgtggctgaacgagtcggtacccgctcagaaaagcaatgtcgttctaaatggctcaactacctgaattggaaacagagtgggggtactgaatggaccaaggaagatgaaatcaatctcatcctcaggatagcagaacttgatgtagctgatgaaaatgacattaactgggatctgttagctgagggatggagtagtgtccgttcaccacaatggctacgaagtaaatggtggaccatcaaaaggcaaattgcaaaccataaggatgtttcgttccctgtcttaataaaaggtcttaaacagttacatgagaaccaaaaaaacaacccaacgcttttggagaataaatcaggatctggagttccaaacagtaataccaattccagtgtgcagcatgttcagataagagttgcccgcttggaagataatacagccatctcttctagccccatggcagcattgcagattccagtccagatcacccatgtttcttcagcagactctcctgctaccgttgactcagaaacaataacactaaacagtggaacactacagacatttgagattcttccctctttccatctacagcccactggcactccaggcacctacctacttcaaacaagctcaagccaaggccttcccctaactctgactgctagtcccacagtaaccctgacagctgctgctcctgcttctcctgaacagattattgttcatgctttatccccagaacatttgttgaacacaagtgataatgttacagtgcagtgtcacacaccaagagtcatcattcagactgttgccacagaggacatcacttcttccatatcccaagcagaactgacagtcgatagtgatattcagtcatctgattttcctgagcctccagacgccctagaagcagacactttcccagatgaaattcatcaccctaagatgactgtggagccatcatttaatgatgctcatgtatccaaattcagtgaccaaaatagcacagaactgatgaatagtgttatggtcagaacagaagaagaaatctctgacaccgaccttaaacaagaggaatcaccctctgatttagccagtgcttatgttactgagggtttagagtctcccactatagaagaacaagttgatcaaacaattgatgatgaaacaatacttatcgttccttcaccacatggctttatccaggcatctgatgttatagatactgaatctgtcttgcctttgacaacactaacagatcccatactccaacatcatcaggaagaatcaaatatcattggatcatccttgggcagtcctgtttcagaagattcaaaggatgtcgaagatttggtaaactgtcattagaataattcttagaaataggcagttcaagcaaagaaggcacactgttaattacaacctcttcaaagaaataggagcaacccccaagaggcttaatttaccaatttaaatagccacagtccttaagccacacacattgttgctgctatgactttttacctcctttaaacacatcatctgaggttgagttttatgacagtatgtagttgagtggaggctgggagttttaagcataaatccctgtttagtgttacatgggaataaggaatttcattcacttcagccactaagaaaagtttagaatcacgaaagcttaactgctgtggtttaaagtacagtttctctaaagatcagacatggcactgtctcctctcaagcctggttgtagttcagatgagtcttttcaacatggtcttcaacatggtctagagcttaccagtgatcttctgatcttcaagaagactaagtttgagacttgaccagcatacaagtatagagacctaggaggtggtcttgtggtggtacatttggttaacccattgctggcagtgggagctgatttaggcagggtaaacaggaaagcattaaaagttaaaattcactacaggttttttgttacttttaaagggaatatggataagcatagtaacaaaacccaccagaatctaagcagttttcaccccctcagaaaccactgtcattagtttacaaagttagcactttgaagtaaaactaaatgaggaaggaagtaatgttacctatccttgataccatgaccatttattagatgttttgctatataaattaccgagagaatagtttgtcatccacttagtgtgttagctggtggggtacaatataacctctcatctcaggctattttaaaaaaacaatatttgcttctataacaaaaggaaacaaatctaagaatcattcctgtactacagaagggttaaggcaaaggtagccttttgggctttttaatgaatatgacccctatagaaaagtcaagaaaaaaaaacccttgtataaattattttatttattattgtaattagatcttcacaaagttgtcttttcactgtgttttgtcaacgtgaaattaaattgtagttataagcaaaagttggttgcctagggaacaattgtatattcagtttaacagaaataaaagaatatttgtcttaa

SEQ ID NO: 358259 - DNA, 4712 bp, Homo sapiens
ttaaggtctttggttggcttttgaggataaagatgagaagcttattgaaagaaacctttaaaaaccatttcatatttcataaagtttcacattgctttcaagagcttgtaatttgtcttttctggcctaattgtttaaggttttgtttttgttttttccacagattcctagatagggttgttcatctgtcatcttaaaagggttttctggatgaatagggtactatataatttttaatgctttaagataaaacataaagaggtgttaataattataaaggaaaactatagttactaataatatttatggtgctgtattgattgatatacacatcatgttacataatggtaccacagtctacagttcatagaatcactagcatagctgagcctgttttttttttttttttcagagaacgtttgtctgcctgatgagagccacttgggttaagaaactacctgtgaatagtcatcatttctgtccttcattggggaatacttttagaggccagtttccaaaaattctgcttaaaaaagaattctggttttgtcttactcttccagatgagatatcacagaggcttgggcctagattgtcatcagcatactgctatactattcgtttgttcttattaagccttattgtgtgtaatgctgttactttttcagaagtgttgcggagataggaacatgggagagaaacaatctgggtaacatgaaagtgatgctggttgctaagggaaggcaacttgattctgtgggaagggctgtagctgatccatccgttgtctagatttgagtatgagcacagtggaagaggattctgacacagtaacagtagaaactgtgaactctgtgactttgactcaggacacagaagggaatctcattcttcactgccctcagaatgaagcggatgaaatagactcagaagatagtattgaacctccacataaaaggctttgtttgtcctctgaggatgatcagagtattgatgattctactccttgcatatcagttgttgcacttccactttcagaaaatgatcagagctttgaagtgaccatgactgcaaccacagaagtagcagatgatgaggttactgaggggactgtgacacagatacagattttgcagaatgagcaactagatgaaatatctcccttgggtaacgaggaagtttcagcagttagccaagcatggtttacaactaaagaagataaggattctctgactaataaaggacataaatggaagcaggggatgtggtccaaggaagaaattgatattttgatgaacaatattgaacgctatcttaaggcacgcggaataaaagatgctacagaaatcatctttgagatgtcaaaagacgaaagaaaagatttctacaggactatagcatggggtctgaaccggcctttgtttgcagtttatagaagagtgcttcgcatgtatgatgacagaaaccatgtgggaaaatatacacctgaagaaattgagaagctcaaggaacaactgtggaccccaaaaaaaggccacactttcaaactttggctctcaaagtattgctgcccacaacttccaaaccagtcaaatgggaagaagaagaatgaagaataaatgatgaaattaaaagggagaaaacaattgaaccaaatgctgattggcagactcttgttttaggctccggataaagcatggcaatgactgggcaacaataggggcggcgctaggaagaagtgcatcttctgtcaaagatcggtgccgactgatgaaggatacttgcaacacagggaagtggacagaagaagaagaaaagagacttgcagaagtggttcatgagttgacaagcactgagccaggtgacatagtcacacagggtgtgtcttgggcagctgtggctgaacgagtcggtacccgctcagaaaagcaatgtcgttctaaatggctcaactacctgaattggaaacagagtgggggtactgaatggaccaaggaagatgaaatcaatctcatcctcaggatagcagaacttgatgtagctgatgaaaatgacattaactgggatctgttagctgagggatggagtagtgtccgttcaccacaatggctacgaagtaaatggtggaccatcaaaaggcaaattgcaaaccataaggatgtttcgttccctgtcttaataaaaggtcttaaacagttacatgagaaccaaaaaaacaacccaacgcttttggagaataaatcaggatctggagttccaaacagtaataccaattccagtgtgcagcatgttcagataagagttgcccgcttggaagataatacagccatctcttctagccccatggcagcattgcagattccagtccagatcacccatgtttcttcagcagactctcctgctaccgttgactcagaaacaataacactaaacagtggaacactacagacatttgagattcttccctctttccatctacagcccactggcactccaggcacctacctacttcaaacaagctcaagccaaggccttcccctaactctgactgctagtcccacagtaaccctgacagctgctgctcctgcttctcctgaacagattattgttcatgctttatccccagaacatttgttgaacacaagtgataatgttacagtgcagtgtcacacaccaagagtcatcattcagactgttgccacagaggacatcacttcttccatatcccaagcagaactgacagtcgatagtgatattcagtcatctgattttcctgagcctccagacgccctagaagcagacactttcccagatgaaattcatcaccctaagatgactgtggagccatcatttaatgatgctcatgtatccaaattcagtgaccaaaatagcacagaactgatgaatagtgttatggtcagaacagaagaagaaatctctgacaccgaccttaaacaagaggaatcaccctctgatttagccagtgcttatgttactgagggtttagagtctcccactatagaagaacaagttgatcaaacaattgatgatgaaacaatacttatcgttccttcaccacatggctttatccaggcatctgatgttatagatactgaatctgtcttgcctttgacaacactaacagatcccatactccaacatcatcaggaagaatcaaatatcattggatcatccttgggcagtcctgtttcagaagattcaaaggatgtcgaagatttggtaaactgtcattagaataattcttagaaataggcagttcaagcaaagaaggcacactgttaattacaacctcttcaaagaaataggagcaacccccaagaggcttaatttaccaatttaaatagccacagtccttaagccacacacattgttgctgctatgactttttacctcctttaaacacatcatctgaggttgagttttatgacagtatgtagttgagtggaggctgggagttttaagcataaatccctgtttagtgttacatgggaataaggaatttcattcacttcagccactaagaaaagtttagaatcacgaaagcttaactgctgtggtttaaagtacagtttctctaaagatcagacatggcactgtctcctctcaagcctggttgtagttcagatgagtcttttcaacatggtcttcaacatggtctagagcttaccagtgatcttctgatcttcaagaagactaagtttgagacttgaccagcatacaagtatagagacctaggaggtggtcttgtggtggtacatttggttaacccattgctggcagtgggagctgatttaggcagggtaaacaggaaagcattaaaagttaaaattcactacaggttttttgttacttttaaagggaatatggataagcatagtaacaaaacccaccagaatctaagcagttttcaccccctcagaaaccactgtcattagtttacaaagttagcactttgaagtaaaactaaatgaggaaggaagtaatgttacctatccttgataccatgaccatttattagatgttttgctatataaattaccgagagaatagtttgtcatccacttagtgtgttagctggtggggtacaatataacctctcatctcaggctattttaaaaaaacaatatttgcttctataacaaaaggaaacaaatctaagaatcattcctgtactacagaagggttaaggcaaaggtagccttttgggctttttaatgaatatgacccctatagaaaagtcaagaaaaaaaaacccttgtataaattattttatttattattgtaattagatcttcacaaagttgtcttttcactgtgttttgtcaacgtgaaattaaattgtagttataagcaaaagttggttgcctagggaacaattgtatattcagtttaacagaaataaaagaatatttgtcttaaaatgcaagatttgtttttacatagccttttgccatacaattataaaaatttcatttcaaaagtgaaatttttttgtgctgttttagctttaagggttggaatgtttaggtgcaacatcagctccttaaagaaaaagcaaagtgatctaggatatgtctcccttgcaagagggaattaacatttacaattaacatgaaaatcatgtatcagacttctgcaggagattcttcagcataccttatccaaaaattactcactgtcctaatgtatca

SEQ ID NO: 358260 - DNA, 2457 bp, Homo sapiens
agcctgtccatatgggttggacgaggatatgttgttttttaaaatatcttatttttataagctctcacatccagtatgcagttatttattccaaatactttccctccttacctccccccacctcccttgctgcttagatggtggtctgtcggagaatcaatgttctttttgtctacccatctcccttcagtcttaataaaaggtcttaaacagttacatgagaaccaaaaaaacaacccaacgcttttggagaataaatcaggatctggagttccaaacagtaataccaattccagtgtgcagcatgttcagataagagttgcccgcttggaagataatacagccatctcttctagccccatggcagcattgcagattccagtccagatcacccatgtttcttcagcagactctcctgctaccgttgactcagaaacaataacactaaacagtggaacactacagacatttgagattcttccctctttccatctacagcccactggcactccaggcacctacctacttcaaacaagctcaagccaaggccttcccctaactctgactgctagtcccacagtaaccctgacagctgctgctcctgcttctcctgaacagattattgttcatgctttatccccagaacatttgttgaacacaagtgataatgttacagtgcagtgtcacacaccaagagtcatcattcagactgttgccacagaggacatcacttcttccatatcccaagcagaactgacagtcgatagtgatattcagtcatctgattttcctgagcctccagacgccctagaagcagacactttcccagatgaaattcatcaccctaagatgactgtggagccatcatttaatgatgctcatgtatccaaattcagtgaccaaaatagcacagaactgatgaatagtgttatggtcagaacagaagaagaaatctctgacaccgaccttaaacaagaggaatcaccctctgatttagccagtgcttatgttactgagggtttagagtctcccactatagaagaacaagttgatcaaacaattgatgatgaaacaatacttatcgttccttcaccacatggctttatccaggcatctgatgttatagatactgaatctgtcttgcctttgacaacactaacagatcccatactccaacatcatcaggaagaatcaaatatcattggatcatccttgggcagtcctgtttcagaagattcaaaggatgtcgaagatttggtaaactgtcattagaataattcttagaaataggcagttcaagcaaagaaggcacactgttaattacaacctcttcaaagaaataggagcaacccccaagaggcttaatttaccaatttaaatagccacagtccttaagccacacacattgttgctgctatgactttttacctcctttaaacacatcatctgaggttgagttttatgacagtatgtagttgagtggaggctgggagttttaagcataaatccctgtttagtgttacatgggaataaggaatttcattcacttcagccactaagaaaagtttagaatcacgaaagcttaactgctgtggtttaaagtacagtttctctaaagatcagacatggcactgtctcctctcaagcctggttgtagttcagatgagtcttttcaacatggtcttcaacatggtctagagcttaccagtgatcttctgatcttcaagaagactaagtttgagacttgaccagcatacaagtatagagacctaggaggtggtcttgtggtggtacatttggttaacccattgctggcagtgggagctgatttaggcagggtaaacaggaaagcattaaaagttaaaattcactacaggttttttgttacttttaaagggaatatggataagcatagtaacaaaacccaccagaatctaagcagttttcaccccctcagaaaccactgtcattagtttacaaagttagcactttgaagtaaaactaaatgaggaaggaagtaatgttacctatccttgataccatgaccatttattagatgttttgctatataaattaccgagagaatagtttgtcatccacttagtgtgttagctggtggggtacaatataacctctcatctcaggctattttaaaaaaacaatatttgcttctataacaaaaggaaacaaatctaagaatcattcctgtactacagaagggttaaggcaaaggtagccttttgggctttttaatgaatatgacccctatagaaaagtcaagaaaaaaaaacccttgtataaattattttatttattattgtaattagatcttcacaaagttgtcttttcactgtgttttgtcaacgtgaaattaaattgtagttataagcaaaagttggttgcctagggaacaattgtatattcagtttaacagaaataaaagaatatttgtcttaa

SEQ ID NO: 358261 - DNA, 4642 bp, Homo sapiens
ttaaggtctttggttggcttttgaggataaagatgagaagcttattgaaagaaacctttaaaaaccatttcatatttcataaagtttcacattgctttcaagagcttgtaatttgtcttttctggcctaattgtttaaggttttgtttttgttttttccacagattcctagatagggttgttcatctgtcatcttaaaagggttttctggatgaatagggtactatataatttttaatgctttaagataaaacataaagaggtgttaataattataaaggaaaactatagttactaataatatttatggtgctgtattgattgatatacacatcatgttacataatggtaccacagtctacagttcatagaatcactagcatagctgagcctgttttttttttttttttcagagaacgtttgtctgcctgatgagagccacttgggttaagaaactacctgtgaatagtcatcatttctgtccttcattggggaatacttttagaggccagtttccaaaaattctgcttaaaaaagaattctggttttgtcttactcttccagatgagatatcacagaggcttgggcctagattgtcatcagcatactgctatactattcgtttgttcttattaagccttattgtgtgtaatgctgttactttttcagaagtgttgcggagataggaacatgggagagaaacaatctgggtaacatgaaagtgatgctggttgctaagggaaggcaacttgattctgtgggaagggctgtagctgatccatccgttgtctagatttgagtatgagcacagtggaagaggattctgacacagtaacagtagaaactgtgaactctgtgactttgactcaggacacagaagggaatctcattcttcactgccctcagaatgaagcggatgaaatagactcagaagatagtattgaacctccacataaaaggctttgtttgtcctctgaggatgatcagagtattgatgattctactccttgcatatcagttgttgcacttccactttcagaaaatgatcagagctttgaagtgaccatgactgcaaccacagaagtagcagatgatgaggttactgaggggactgtgacacagatacagattttgcagaatgagcaactagatgaaatatctcccttgggtaacgaggaagtttcagcagttagccaagcatggtttacaactaaagaagataaggattctctgactaataaaggacataaatggaagcaggggatgtggtccaaggaagaaattgatattttgatgaacaatattgaacgctatcttaaggcacgcggaataaaagatgctacagaaatcatctttgagatgtcaaaagacgaaagaaaagatttctacaggactatagcatggggtctgaaccggcctttgtttgcagtttatagaagagtgcttcgcatgtatgatgacagaaaccatgtgggaaaatatacacctgaagaaattgagaagctcaaggaacaactgtggaccccaaaaaaaggccacactttcaaactttggctctcaaagtattgctgcccacaacttccaaaccagtcaaatgggaagaagaagaatgaagaataaatgatgaaattaaaagggagaaaacaattgaaccaaatgctgattggcagactcttgttttaggctccggataaagcatggcaatgactgggcaacaataggggcggcgctaggaagaagtgcatcttctgtcaaagatcggtgccgactgatgaaggatacttgcaacacagggaagtggacagaagaagaagaaaagagacttgcagaagtggttcatgagttgacaagcactgagccaggtgacatagtcacacagggtgtgtcttgggcagctgtggctgaacgagtcggtacccgctcagaaaagcaatgtcgttctaaatggctcaactacctgaattggaaacagagtgggggtactgaatggaccaaggaagatgaaatcaatctcatcctcaggatagcagaacttgatgtagctgatgaaaatgacattaactgggatctgttagctgagggatggagtagtgtccgttcaccacaatggctacgaagtaaatggtggaccatcaaaaggcaaattgcaaaccataaggatgtttcgttccctgtcttaataaaaggtcttaaacagttacatgagaaccaaaaaaacaacccaacgcttttggagaataaatcaggatctggagttccaaacagtaataccaattccagtgtgcagcatgttcagataagagttgcccgcttggaagataatacagccatctcttctagccccatggcagcattgcagattccagtccagatcacccatgtttcttcagcagactctcctgctaccgttgactcagaaacaataacactaaacagtggaacactacagacatttgagattcttccctctttccatctacagcccactggcactccaggcacctacctacttcaaacaagctcaagccaaggccttcccctaactctgactgctagtcccacagtaaccctgacagctgctgctcctgcttctcctgaacagattattgttcatgctttatccccagaacatttgttgaacacaagtgataatgttacagtgcagtgtcacacaccaagagtcatcattcagactgttgccacagaggacatcacttcttccatatcccaagcagaactgacagtcgatagtgatattcagtcatctgattttcctgagcctccagacgccctagaagcagacactttcccagatgaaattcatcaccctaagatgactgtggagccatcatttaatgatgctcatgtatccaaattcagtgaccaaaatagcacagaactgatgaatagtgttatggtcagaacagaagaagaaatctctgacaccgaccttaaacaagaggaatcaccctctgatttagccagtgcttatgttactgagggtttagagtctcccactatagaagaacaagttgatcaaacaattgatgatgaaacaatacttatcgttccttcaccacatggctttatccaggcatctgatgttatagatactgaatctgtcttgcctttgacaacactaacaggtactgtaatataatacttactatgtgcctgataaattttagatggaaaaaaacagacatttaattaacttgtttcagtctttcttgatccaataagctactagtcctgttgagttctacactgtggtagaataccttaaattcttgacatggattagagaataaatatatacatttaagactaacttgaaactcattacagatcccatactccaacatcatcaggaagaatcaaatatcattggatcatccttgggcagtcctgtttcagaagattcaaaggatgtcgaagatttggtaaactgtcattagaataattcttagaaataggcagttcaagcaaagaaggcacactgttaattacaacctcttcaaagaaataggagcaacccccaagaggcttaatttaccaatttaaatagccacagtccttaagccacacacattgttgctgctatgactttttacctcctttaaacacatcatctgaggttgagttttatgacagtatgtagttgagtggaggctgggagttttaagcataaatccctgtttagtgttacatgggaataaggaatttcattcacttcagccactaagaaaagtttagaatcacgaaagcttaactgctgtggtttaaagtacagtttctctaaagatcagacatggcactgtctcctctcaagcctggttgtagttcagatgagtcttttcaacatggtcttcaacatggtctagagcttaccagtgatcttctgatcttcaagaagactaagtttgagacttgaccagcatacaagtatagagacctaggaggtggtcttgtggtggtacatttggttaacccattgctggcagtgggagctgatttaggcagggtaaacaggaaagcattaaaagttaaaattcactacaggttttttgttacttttaaagggaatatggataagcatagtaacaaaacccaccagaatctaagcagttttcaccccctcagaaaccactgtcattagtttacaaagttagcactttgaagtaaaactaaatgaggaaggaagtaatgttacctatccttgataccatgaccatttattagatgttttgctatataaattaccgagagaatagtttgtcatccacttagtgtgttagctggtggggtacaatataacctctcatctcaggctattttaaaaaaacaatatttgcttctataacaaaaggaaacaaatctaagaatcattcctgtactacagaagggttaaggcaaaggtagccttttgggctttttaatgaatatgacccctatagaaaagtcaagaaaaaaaaacccttgtataaattattttatttattattgtaattagatcttcacaaagttgtcttttcactgtgttttgtcaacgtgaaattaaattgtagttataagcaaaagttggttgcctagggaacaattgtatattcagtttaacagaaataaaagaatatttgtcttaa

SEQ ID NO: 358262 - DNA, 4386 bp, Homo sapiens
ttaaggtctttggttggcttttgaggataaagatgagaagcttattgaaagaaacctttaaaaaccatttcatatttcataaagtttcacattgctttcaagagcttgtaatttgtcttttctggcctaattgtttaaggttttgtttttgttttttccacagattcctagatagggttgttcatctgtcatcttaaaagggttttctggatgaatagggtactatataatttttaatgctttaagataaaacataaagaggtgttaataattataaaggaaaactatagttactaataatatttatggtgctgtattgattgatatacacatcatgttacataatggtaccacagtctacagttcatagaatcactagcatagctgagcctgttttttttttttttttcagagaacgtttgtctgcctgatgagagccacttgggttaagaaactacctgtgaatagtcatcatttctgtccttcattggggaatacttttagaggccagtttccaaaaattctgcttaaaaaagaattctggttttgtcttactcttccagatgagatatcacagaggcttgggcctagattgtcatcagcatactgctatactattcgtttgttcttattaagccttattgtgtgtaatgctgttactttttcagaagtgttgcggagataggaacatgggagagaaacaatctgggtaacatgaaagtgatgctggttgctaagggaaggcaacttgattctgtgggaagggctgtagctgatccatccgttgtctagatttgagtatgagcacagtggaagaggattctgacacagtaacagtagaaactgtgaactctgtgactttgactcaggacacagaagggaatctcattcttcactgccctcagaatgaagcggatgaaatagactcagaagatagtattgaacctccacataaaaggctttgtttgtcctctgaggatgatcagagtattgatgattctactccttgcatatcagttgttgcacttccactttcagaaaatgatcagagctttgaagtgaccatgactgcaaccacagaagtagcagatgatgaggttactgaggggactgtgacacagatacagattttgcagaatgagcaactagatgaaatatctcccttgggtaacgaggaagtttcagcagttagccaagcatggtttacaactaaagaagataaggattctctgactaataaaggacataaatggaagcaggggatgtggtccaaggaagaaattgatattttgatgaacaatattgaacgctatcttaaggcacgcggaataaaagatgctacagaaatcatctttgagatgtcaaaagacgaaagaaaagatttctacaggactatagcatggggtctgaaccggcctttgtttgcagtttatagaagagtgcttcgcatgtatgatgacagaaaccatgtgggaaaatatacacctgaagaaattgagaagctcaaggaacaactgtggaccccaaaaaaaggccacactttcaaactttggctctcaaagtattgctgcccacaacttccaaaccagtcaaatgggaagaagaagaatgaagaataaatgatgaaattaaaagggagaaaacaattgaaccaaatgctgattggcagactcttgttttaggctccggataaagcatggcaatgactgggcaacaataggggcggcgctaggaagaagtgcatcttctgtcaaagatcggtgccgactgatgaaggatacttgcaacacagggaagtggacagaagaagaagaaaagagacttgcagaagtggttcatgagttgacaagcactgagccaggtgacatagtcacacagggtgtgtcttgggcagctgtggctgaacgagtcggtacccgctcagaaaagcaatgtcgttctaaatggctcaactacctgaattggaaacagagtgggggtactgaatggaccaaggaagatgaaatcaatctcatcctcaggatagcagaacttgatgtagctgatgaaaatgacattaactgggatctgttagctgagggatggagtagtgtccgttcaccacaatggctacgaagtaaatggtggaccatcaaaaggcaaattgcaaaccataaggatgtttcgttccctgtcttaataaaaggtcttaaacagttacatgagaaccaaaaaaacaacccaacgcttttggagaataaatcaggatctggagttccaaacagtaataccaattccagtgtgcagcatgttcagataagagttgcccgcttggaagataatacagccatctcttctagccccatggcagcattgcagattccagtccagatcacccatgtttcttcagcagactctcctgctaccgttgactcagaaacaataacactaaacagtggaacactacagacatttgagattcttccctctttccatctacagcccactggcactccaggcacctacctacttcaaacaagctcaagccaaggccttcccctaactctgactgctagtcccacagtaaccctgacagctgctgctcctgcttctcctgaacagattattgttcatgctttatccccagaacatttgttgaacacaagtgataatgttacagtgcagtgtcacacaccaagagtcatcattcagactgttgccacagaggacatcacttcttccatatcccaagcagaactgacagtcgatagtgatattcagtcatctgattttcctgagcctccagacgccctagaagcagacactttcccagatgaaattcatcaccctaagatgactgtggagccatcatttaatgatgctcatgtatccaaattcagtgaccctgacaccgaccttaaacaagaggaatcaccctctgatttagccagtgcttatgttactgagggtttagagtctcccactatagaagaacaagttgatcaaacaattgatgatgaaacaatacttatcgttccttcaccacatggctttatccaggcatctgatgttatagatactgaatctgtcttgcctttgacaacactaacagatcccatactccaacatcatcaggaagaatcaaatatcattggatcatccttgggcagtcctgtttcagaagattcaaaggatgtcgaagatttggtaaactgtcattagaataattcttagaaataggcagttcaagcaaagaaggcacactgttaattacaacctcttcaaagaaataggagcaacccccaagaggcttaatttaccaatttaaatagccacagtccttaagccacacacattgttgctgctatgactttttacctcctttaaacacatcatctgaggttgagttttatgacagtatgtagttgagtggaggctgggagttttaagcataaatccctgtttagtgttacatgggaataaggaatttcattcacttcagccactaagaaaagtttagaatcacgaaagcttaactgctgtggtttaaagtacagtttctctaaagatcagacatggcactgtctcctctcaagcctggttgtagttcagatgagtcttttcaacatggtcttcaacatggtctagagcttaccagtgatcttctgatcttcaagaagactaagtttgagacttgaccagcatacaagtatagagacctaggaggtggtcttgtggtggtacatttggttaacccattgctggcagtgggagctgatttaggcagggtaaacaggaaagcattaaaagttaaaattcactacaggttttttgttacttttaaagggaatatggataagcatagtaacaaaacccaccagaatctaagcagttttcaccccctcagaaaccactgtcattagtttacaaagttagcactttgaagtaaaactaaatgaggaaggaagtaatgttacctatccttgataccatgaccatttattagatgttttgctatataaattaccgagagaatagtttgtcatccacttagtgtgttagctggtggggtacaatataacctctcatctcaggctattttaaaaaaacaatatttgcttctataacaaaaggaaacaaatctaagaatcattcctgtactacagaagggttaaggcaaaggtagccttttgggctttttaatgaatatgacccctatagaaaagtcaagaaaaaaaaacccttgtataaattattttatttattattgtaattagatcttcacaaagttgtcttttcactgtgttttgtcaacgtgaaattaaattgtagttataagcaaaagttggttgcctagggaacaattgtatattcagtttaacagaaataaaagaatatttgtcttaa

SEQ ID NO: 358263 - DNA, 3223 bp, Homo sapiens
ttaaggtctttggttggcttttgaggataaagatgagaagcttattgaaagaaacctttaaaaaccatttcatatttcataaagtttcacattgctttcaagagcttgtaatttgtcttttctggcctaattgtttaaggttttgtttttgttttttccacagattcctagatagggttgttcatctgtcatcttaaaagggttttctggatgaatagggtactatataatttttaatgctttaagataaaacataaagaggtgttaataattataaaggaaaactatagttactaataatatttatggtgctgtattgattgatatacacatcatgttacataatggtaccacagtctacagttcatagaatcactagcatagctgagcctgttttttttttttttttcagagaacgtttgtctgcctgatgagagccacttgggttaagaaactacctgtgaatagtcatcatttctgtccttcattggggaatacttttagaggccagtttccaaaaattctgcttaaaaaagaattctggttttgtcttactcttccagatgagatatcacagaggcttgggcctagattgtcatcagcatactgctatactattcgtttgttcttattaagccttattgtgtgtaatgctgttactttttcagaagtgttgcggagataggaacatgggagagaaacaatctgggtaacatgaaagtgatgctggttgctaagggaaggcaacttgattctgtgggaagggctgtagctgatccatccgttgtctagatttgagtatgagcacagtggaagaggattctgacacagtaacagtagaaactgtgaactctgtgactttgactcaggacacagaagggaatctcattcttcactgccctcagaatgaagcggatgaaatagactcagaagatagtattgaacctccacataaaaggctttgtttgtcctctgaggatgatcagagtattgatgattctactccttgcatatcagttgttgcacttccactttcagaaaatgatcagagctttgaagtgaccatgactgcaaccacagaagtagcagatgatgaggttactgaggggactgtgacacagatacagattttgcagaatgagcaactagatgaaatatctcccttgggtaacgaggaagtttcagcagttagccaagcatggtttacaactaaagaagataaggattctctgactaataaaggacataaatggaagcaggggatgtggtccaaggaagaaattgatattttgatgaacaatattgaacgctatcttaaggcacgcggaataaaagatgctacagaaatcatctttgagatgtcaaaagacgaaagaaaagatttctacaggactatagcatggggtctgaaccggcctttgtttgcagtttatagaagagtgcttcgcatgtatgatgacagaaaccatgtgggaaaatatacacctgaagaaattgagaagctcaaggaacaactgtggaccccaaaaaaaggccacactttcaaactttggctctcaaagtattgctgcccacaacttccaaaccagtcaaatgggaagaagaagaatgaagaataaatgatgaaattaaaagggagaaaacaattgaaccaaatgctgattggcagactcttgttttaggctccggataaagcatggcaatgactgggcaacaataggggcggcgctaggaagaagtgcatcttctgtcaaagatcggtgccgactgatgaaggatacttgcaacacagggaagtggacagaagaagaagaaaagagacttgcagaagtggttcatgagttgacaagcactgagccaggtgacatagtcacacagggtgtgtcttgggcagctgtggctgaacgagtcggtacccgctcagaaaagcaatgtcgttctaaatggctcaactacctgaattggaaacagagtgggggtactgaatggaccaaggaagatgaaatcaatctcatcctcaggatagcagaacttgatgtagctgatgaaaatgacattaactgggatctgttagctgagggatggagtagtgtccgttcaccacaatggctacgaagtaaatggtggaccatcaaaaggcaaattgcaaaccataaggatgtttcgttccctgtcttaataaaaggtcttaaacagttacatgagaaccaaaaaaacaacccaacgcttttggagaataaatcaggatctggagttccaaacagtaataccaattccagtgtgcagcatgttcagataagagttgcccgcttggaagataatacagccatctcttctagccccatggcagcattgcagattccagtccagatcacccatgtttcttcagcagactctcctgctaccgttgactcagaaacaataacactaaacagtggaacactacagacatttgagattcttccctctttccatctacagcccactggcactccaggcacctacctacttcaaacaagctcaagccaaggccttcccctaactctgactgctagtcccacagtaaccctgacagctgctgctcctgcttctcctgaacagattattgttcatgctttatccccagaacatttgttgaacacaagtgataatgttacagtgcagtgtcacacaccaagagtcatcattcagactgttgccacagaggacatcacttcttccatatcccaagcagaactgacagtcgatagtgatattcagtcatctgattttcctgagcctccagacgccctagaagcagacactttcccagatgaaattcatcaccctaagatgactgtggagccatcatttaatgatgctcatgtatccaaattcagtgaccaaaatagcacagaactgatgaatagtgttatggtcagaacagaagaagaaatctctgacaccgaccttaaacaagaggaatcaccctctgatttagccagtgcttatgttactgagaggtaagttgtactttaagaacaactgaatggattcttgccttgagcctcaaacctgcagtttgggaaacttttttctgaagactcatgaaattaagctcaaacccccaacctcacacctcacaaagtgttgtcactggcagaaatgggcaggcagtgatcctgtggcagtcaggaagaataagaaaaccatgttctatcttaccacagttcctcactaaaac

SEQ ID NO: 358264 - DNA, 2601 bp, Homo sapiens
ttaaggtctttggttggcttttgaggataaagatgagaagcttattgaaagaaacctttaaaaaccatttcatatttcataaagtttcacattgctttcaagagcttgtaatttgtcttttctggcctaattgtttaaggttttgtttttgttttttccacagattcctagatagggttgttcatctgtcatcttaaaagggttttctggatgaatagggtactatataatttttaatgctttaagataaaacataaagaggtgttaataattataaaggaaaactatagttactaataatatttatggtgctgtattgattgatatacacatcatgttacataatggtaccacagtctacagttcatagaatcactagcatagctgagcctgttttttttttttttttcagagaacgtttgtctgcctgatgagagccacttgggttaagaaactacctgtgaatagtcatcatttctgtccttcattggggaatacttttagaggccagtttccaaaaattctgcttaaaaaagaattctggttttgtcttactcttccagatgagatatcacagaggcttgggcctagattgtcatcagcatactgctatactattcgtttgttcttattaagccttattgtgtgtaatgctgttactttttcagaagtgttgcggagataggaacatgggagagaaacaatctgggtaacatgaaagtgatgctggttgctaagggaaggcaacttgattctgtgggaagggctgtagctgatccatccgttgtctagatttgagtatgagcacagtggaagaggattctgacacagtaacagtagaaactgtgaactctgtgactttgactcaggacacagaagggaatctcattcttcactgccctcagaatgaagcggatgaaatagactcagaagatagtattgaacctccacataaaaggctttgtttgtcctctgaggatgatcagagtattgatgattctactccttgcatatcagttgttgcacttccactttcagaaaatgatcagagctttgaagtgaccatgactgcaaccacagaagtagcagatgatgaggttactgaggggactgtgacacagatacagattttgcagaatgagcaactagatgaaatatctcccttgggtaacgaggaagtttcagcagttagccaagcatggtttacaactaaagaagataaggattctctgactaataaaggacataaatggaagcaggggatgtggtccaaggaagaaattgatattttgatgaacaatattgaacgctatcttaaggcacgcggaataaaagatgctacagaaatcatctttgagatgtcaaaagacgaaagaaaagatttctacaggactatagcatggggtctgaaccggcctttgtttgcagtttatagaagagtgcttcgcatgtatgatgacagaaaccatgtgggaaaatatacacctgaagaaattgagaagctcaaggaacaactgtggaccccaaaaaaaggccacactttcaaactttggctctcaaagtattgctgcccacaacttccaaaccagtcaaatgggaagaagaagaatgaagaataaatgatgaaattaaaagggagaaaacaattgaaccaaatgctgattggcagactcttgttttaggctccggataaagcatggcaatgactgggcaacaataggggcggcgctaggaagaagtgcatcttctgtcaaagatcggtgccgactgatgaaggatacttgcaacacagggaagtggacagaagaagaagaaaagagacttgcagaagtggttcatgagttgacaagcactgagccaggtgacatagtcacacagggtgtgtcttgggcagctgtggctgaacgagtcggtacccgctcagaaaagcaatgtcgttctaaatggctcaactacctgaattggaaacagagtgggggtactgaatggaccaaggaagatgaaatcaatctcatcctcaggatagcagaacttgatgtagctgatgaaaatgacattaactgggatctgttagctgagggatggagtagtgtccgttcaccacaatggctacgaagtaaatggtggaccatcaaaaggcaaattgcaaaccataaggatgtttcgttccctgtcttaataaaaggtcttaaacagttacatgagaaccaaaaaaacaacccaacgcttttggagaataaatcaggatctggagttccaaacagtaataccaattccagtgtgcagcatgttcagataagagttgcccgcttggaagataatacagccatctcttctagccccatggcagcattgcagattccagtccagatcacccatgtttgtaagtgtttgatcttcaagattccttgctgtttgatctatatgatttggttaatggctctgatgtcttttggttttctagaatgttaatagaaatttacccaagtcggtgaactgaaggacatctaagatattttgtttagttcagttaatatttgcacacacaatgaatgtgtgacaggaaggatgtataagcagtcgtccaaccatatggaccat

SEQ ID NO: 358265 - DNA, 447 bp, Homo sapiens
aagtcgtgtcggtaccggtgtgtcatgaaacagatagctgagaccagaccatagaaatacacaggagcaaagagcagcctcttaaaccttcaggctaggtaatgacttgagacgattatgccctacattgtattacttgttcgcaccttcacaatgggtaagtacatttgtgtctagtaaactaaactcagtccgtttttgtatataaaagtagacttaatcattgttaaactatctttcctttttcctttagtctttccatctacagcccactggcactccaggcacctacctacttcaaacaagctcaagccaaggccttcccctaactctgactgctagtcccacagtaaccctgacagctgctgctcctgcttctcctgaacagattattgttcatgctttatccccagacatttgtttcatgacacacggtaccgagctcga

SEQ ID NO: 358266 - DNA, 2518 bp, Homo sapiens
ttaaggtctttggttggcttttgaggataaagatgagaagcttattgaaagaaacctttaaaaaccatttcatatttcataaagtttcacattgctttcaagagcttgtaatttgtcttttctggcctaattgtttaaggttttgtttttgttttttccacagattcctagatagggttgttcatctgtcatcttaaaagggttttctggatgaatagggtactatataatttttaatgctttaagataaaacataaagaggtgttaataattataaaggaaaactatagttactaataatatttatggtgctgtattgattgatatacacatcatgttacataatggtaccacagtctacagttcatagaatcactagcatagctgagcctgttttttttttttttttcagagaacgtttgtctgcctgatgagagccacttgggttaagaaactacctgtgaatagtcatcatttctgtccttcattggggaatacttttagaggccagtttccaaaaattctgcttaaaaaagaattctggttttgtcttactcttccagatgagatatcacagaggcttgggcctagattgtcatcagcatactgctatactattcgtttgttcttattaagccttattgtgtgtaatgctgttactttttcagaagtgttgcggagataggaacatgggagagaaacaatctgggtaacatgaaagtgatgctggttgctaagggaaggcaacttgattctgtgggaagggctgtagctgatccatccgttgtctagatttgagtatgagcacagtggaagaggattctgacacagtaacagtagaaactgtgaactctgtgactttgactcaggacacagaagggaatctcattcttcactgccctcagaatgaagcggatgaaatagactcagaagatagtattgaacctccacataaaaggctttgtttgtcctctgaggatgatcagagtattgatgattctactccttgcatatcagttgttgcacttccactttcagaaaatgatcagagctttgaagtgaccatgactgcaaccacagaagtagcagatgatgaggttactgaggggactgtgacacagatacagattttgcagaatgagcaactagatgaaatatctcccttgggtaacgaggaagtttcagcagttagccaagcatggtttacaactaaagaagataaggattctctgactaataaaggacataaatggaagcaggggatgtggtccaaggaagaaattgatattttgatgaacaatattgaacgctatcttaaggcacgcggaataaaagatgctacagaaatcatctttgagatgtcaaaagacgaaagaaaagatttctacaggactatagcatggggtctgaaccggcctttgtttgcagtttatagaagagtgcttcgcatgtatgatgacagaaaccatgtgggaaaatatacacctgaagaaattgagaagctcaaggaacaactgtggaccccaaaaaaaggccacactttcaaactttggctctcaaagtattgctgcccacaacttccaaaccagtcaaatgggaagaagaagaatgaagaataaatgatgaaattaaaagggagaaaacaattgaaccaaatgctgattggcagactcttgttttaggctccggataaagcatggcaatgactgggcaacaataggggcggcgctaggaagaagtgcatcttctgtcaaagatcggtgccgactgatgaaggatacttgcaacacagggaagtggacagaagaagaagaaaagagacttgcagaagtggttcatgagttgacaagcactgagccaggtgacatagtcacacagggtgtgtcttgggcagctgtggctgaacgagtcggtacccgctcagaaaagcaatgtcgttctaaatggctcaactacctgaattggaaacagagtgggggtactgaatggaccaaggaagatgaaatcaatctcatcctcaggatagcagaacttgatgtagctgatgaaaatgacattaactgggatctgttagctgagggatggagtagtgtccgttcaccacaatggctacgaagtaaatggtggaccatcaaaaggcaaattgcaaaccataaggatgtttcgttccctgtcttaataaaaggtcttaaacagttacatgagaaccaaaaaaacaacccaacgcttttggagaataaatcaggatctggagttccaaacagtaataccaattccagtgtgcagcatgttcagataagagttgcccgcttggaagataatacagccatctcttctagccccatggcagcattgcagattccagtccagatcacccatgtttcttcagcagactctcctgctaccgttgactcagaaacaataacactaaacagtggaacactacagacatttgagattcttccctttctaatgtacagctcactgcactccagcgtgctgaacaagggtctctagt

SEQ ID NO: 358267 - DNA, 895 bp, Homo sapiens
aagtcgtgtcggtaccggtgtgtcatgaaacagatagctgagaccagaccatagaaatacacaggagcaaagagcagcctcttaaaccttcaggctaggtaatgacttgagacgattatgccctacattgtattacttgttcgcaccttcacaatgggtaagtacatttgtgtctagtaaactaaactcagtccgtttttgtatataaaagtagacttaatcattgttaaactatctttcctttttcctttagtctttccatctacagcccactggcactccaggcacctacctacttcaaacaagctcaagccaaggccttcccctaactctgactgctagtcccacagtaaccctgacagctgctgctcctgcttctcctgaacagattattgttcatgctttatccgtatgttacataaattacttgatttttgagtacctgttatagaccaggattagttgataaggaccaaaatagaaggtagttatctaaacagttcttcctactgctgctgttccaggcacagtgttatacaccatcactctgccttcactggagtgtatgtttcatcccttctctttatgtaagatggctatacattagaatagggacattagaagaacaaaggccctagcaagtaaaggacaagggttctagaaaaatagtgataaaagtatttacagtttgagaggtaagagatgtggggggagacagtgaggtacccccagaccgccatttttaatagcaccttaactagtgattttatgttttatagcgcccaacgtatgttaacccctagtgatattgctgccttcctttggggatcccccgagaactcattatccccactagttgccccaaagtgaaaaaattttttctctttttcttatc

SEQ ID NO: 358268 - DNA, 2431 bp, Homo sapiens
ttaaggtctttggttggcttttgaggataaagatgagaagcttattgaaagaaacctttaaaaaccatttcatatttcataaagtttcacattgctttcaagagcttgtaatttgtcttttctggcctaattgtttaaggttttgtttttgttttttccacagattcctagatagggttgttcatctgtcatcttaaaagggttttctggatgaatagggtactatataatttttaatgctttaagataaaacataaagaggtgttaataattataaaggaaaactatagttactaataatatttatggtgctgtattgattgatatacacatcatgttacataatggtaccacagtctacagttcatagaatcactagcatagctgagcctgttttttttttttttttcagagaacgtttgtctgcctgatgagagccacttgggttaagaaactacctgtgaatagtcatcatttctgtccttcattggggaatacttttagaggccagtttccaaaaattctgcttaaaaaagaattctggttttgtcttactcttccagatgagatatcacagaggcttgggcctagattgtcatcagcatactgctatactattcgtttgttcttattaagccttattgtgtgtaatgctgttactttttcagaagtgttgcggagataggaacatgggagagaaacaatctgggtaacatgaaagtgatgctggttgctaagggaaggcaacttgattctgtgggaagggctgtagctgatccatccgttgtctagatttgagtatgagcacagtggaagaggattctgacacagtaacagtagaaactgtgaactctgtgactttgactcaggacacagaagggaatctcattcttcactgccctcagaatgaagcggatgaaatagactcagaagatagtattgaacctccacataaaaggctttgtttgtcctctgaggatgatcagagtattgatgattctactccttgcatatcagttgttgcacttccactttcagaaaatgatcagagctttgaagtgaccatgactgcaaccacagaagtagcagatgatgaggttactgaggggactgtgacacagatacagattttgcagaatgagcaactagatgaaatatctcccttgggtaacgaggaagtttcagcagttagccaagcatggtttacaactaaagaagataaggattctctgactaataaaggacataaatggaagcaggggatgtggtccaaggaagaaattgatattttgatgaacaatattgaacgctatcttaaggcacgcggaataaaagatgctacagaaatcatctttgagatgtcaaaagacgaaagaaaagatttctacaggactatagcatggggtctgaaccggcctttgtttgcagtttatagaagagtgcttcgcatgtatgatgacagaaaccatgtgggaaaatatacacctgaagaaattgagaagctcaaggaacaactgtggaccccaaaaaaaggccacactttcaaactttggctctcaaagtattgctgcccacaacttccaaaccagtcaaatgggaagaagaagaatgaagaataaatgatgaaattaaaagggagaaaacaattgaaccaaatgctgattggcagactcttgttttaggctccggataaagcatggcaatgactgggcaacaataggggcggcgctaggaagaagtgcatcttctgtcaaagatcggtgccgactgatgaaggatacttgcaacacaggatagcagaacttgatgtagctgatgaaaatgacattaactgggatctgttagctgagggatggagtagtgtccgttcaccacaatggctacgaagtaaatggtggaccatcaaaaggcaaattgcaaaccataaggatgtttcgttccctggtaatgtattacttactttttaagctcctccccttttcttaccatatttactccttaggagtgagaggttagaagttctttgccccagctagagatatcatagcagatttctacttacaccacttccctgtttctctcagtaattgtttccttccccagagaagagttaatactgtttgtaattcctaaagcccctaaaatgaaaatgtacacacttattcttgttcttctacgtaaactatcaggaggaaataaaatcatgccacataacgatttaatttttatgtttttagagacagggtctagcttggttgtccaggccgacatgcagtggtgtgatcatagctcactgtaaccttaaacctgtcggctcaagtgattctcccacctcagcctcctgaatagctcggactacaggcacacaccaccatgtccagctattttttttcgtagagatgaggtcttgccatgttacccaggttggtct

SEQ ID NO: 358269 - DNA, 1230 bp, Homo sapiens
ttaaggtctttggttggcttttgaggataaagatgagaagcttattgaaagaaacctttaaaaaccatttcatatttcataaagtttcacattgctttcaagagcttgtaatttgtcttttctggcctaattgtttaaggttttgtttttgttttttccacagattcctagatagggttgttcatctgtcatcttaaaagggttttctggatgaatagggtactatataatttttaatgctttaagataaaacataaagaggtgttaataattataaaggaaaactatagttactaataatatttatggtgctgtattgattgatatacacatcatgttacataatggtaccacagtctacagttcatagaatcactagcatagctgagcctgttttttttttttttttcagagaacgtttgtctgcctgatgagagccacttgggttaagaaactacctgtgaatagtcatcatttctgtccttcattggggaatacttttagaggccagtttccaaaaattctgcttaaaaaagaattctggttttgtcttactcttccagatgagatatcacagaggcttgggcctagattgtcatcagcatactgctatactattcgtttgttcttattaagccttattgtgtgtaatgctgttactttttcagaagtgttgcggagataggaacatgggagagaaacaatctgggtaacatgaaagtgatgctggttgctaagggaaggcaacttgattctgtgggaagggctgtagctgatccatccgttgtctaggtaagtctgcttctgttgcaaggatctcacatgatttgcaaatttgtcaaaactagatcatgatttccatttacctttattttgggaatggcataattactattgtaaaatgaatgatgtccttttcaaatagtaatttgcatagtaaaattttaatgaattattggatctttaccatgtaaatgttaatatatttaagtttttgtgccaaaggaaaatacattcacttcagtggtaaatatatgaatggactaatatcttgtgtataggagccagagagagccaggcgtgttggcacgtgcctgtacccagctattcgggtggctaagacaggagtatcacttgagctcagaagttcaaggctctagggcccttaagactgtgcctgtgaatagcctctgcactccagcctgggcaacaatgaagaccccttctcta

SEQ ID NO: 358270 - DNA, 360 bp, Homo sapiens
tggaaattcaatttattgaatttgatagtttattcttggaacatttaagtgtcacttttgtatctcttgcatcatcttaaaagtttatatttgatttattaatgaattagtgatatattatttttctaaatgccgttgatgacctttaacattaaaacaaattttaaaagcatagtatatccatatgcattttatcagaaatccctaaatcaaagaaatgtaacccatttaggcacgcggaataaaagatgctacagaaatcatctttgagatgtcaaaagacgaaagaaaagatttctacaggactatagcatggggtctgaaccggcctttgtttgcagtttatagaagagtgcttcg

SEQ ID NO: 358271 - DNA, 3743 bp, Homo sapiens
gcggccgcagctccgtttccggtggctcgtcgcgctcgctcactccagctgcagccactctcgcccgtggctgcttcctccatcctggtattttttggagcttccatcctggttcttccaaagtgcccggacccaaaacaggaaagtgttgcggagataggaacatgggagagaaacaatctgggtaacatgaaagtgatgctggttgctaagggaaggcaacttgattctgtgggaagggctgtagctgatccatccgttgtctagatttgagtatgagcacagtggaagaggattctgacacagtaacagtagaaactgtgaactctgtgactttgactcaggacacagaagggaatctcattcttcactgccctcagaatgaagcggatgaaatagactcagaagatagtattgaacctccacataaaaggctttgtttgtcctctgaggatgatcagagtattgatgattctactccttgcatatcagttgttgcacttccactttcagaaaatgatcagagctttgaagtgaccatgactgcaaccacagaagtagcagatgatgaggttactgaggggactgtgacacagatacagattttgcagaatgagcaactagatgaaatatctcccttgggtaacgaggaagtttcagcagttagccaagcatggtttacaactaaagaagataaggattctctgactaataaaggacataaatggaagcaggggatgtggtccaaggaagaaattgatattttgatgaacaatattgaacgctatcttaaggcacgcggaataaaagatgctacagaaatcatctttgagatgtcaaaagacgaaagaaaagatttctacaggactatagcatggggtctgaaccggcctttgtttgcagtttatagaagagtgcttcgcatgtatgatgacagaaaccatgtgggaaaatatacacctgaagaaattgagaagctcaaggagctccggataaagcatggcaatgactgggcaacaataggggcggcgctaggaagaagtgcatcttctgtcaaagatcggtgccgactgatgaaggatacttgcaacacagggaagtggacagaagaagaagaaaagagacttgcagaagtggttcatgagttgacaagcactgagccaggtgacatagtcacacagggtgtgtcttgggcagctgtggctgaacgagtcggtacccgctcagaaaagcaatgtcgttctaaatggctcaactacctgaattggaaacagagtgggggtactgaatggaccaaggaagatgaaatcaatctcatcctcaggatagcagaacttgatgtagctgatgaaaatgacattaactgggatctgttagctgagggatggagtagtgtccgttcaccacaatggctacgaagtaaatggtggaccatcaaaaggcaaattgcaaaccataaggatgtttcgttccctgtcttaataaaaggtcttaaacagttacatgagaaccaaaaaaacaacccaacgcttttggagaataaatcaggatctggagttccaaacagtaataccaattccagtgtgcagcatgttcagataagagttgcccgcttggaagataatacagccatctcttctagccccatggcagcattgcagattccagtccagatcacccatgtttcttcagcagactctcctgctaccgttgactcagaaacaataacactaaacagtggaacactacagacatttgagattcttccctctttccatctacagcccactggcactccaggcacctacctacttcaaacaagctcaagccaaggccttcccctaactctgactgctagtcccacagtaaccctgacagctgctgctcctgcttctcctgaacagattattgttcatgctttatccccagaacatttgttgaacacaagtgataatgttacagtgcagtgtcacacaccaagagtcatcattcagactgttgccacagaggacatcacttcttccatatcccaagcagaactgacagtcgatagtgatattcagtcatctgattttcctgagcctccagacgccctagaagcagacactttcccagatgaaattcatcaccctaagatgactgtggagccatcatttaatgatgctcatgtatccaaattcagtgaccaaaatagcacagaactgatgaatagtgttatggtcagaacagaagaagaaatctctgacaccgaccttaaacaagaggaatcaccctctgatttagccagtgcttatgttactgagggtttagagtctcccactatagaagaacaagttgatcaaacaattgatgatgaaacaatacttatcgttccttcaccacatggctttatccaggcatctgatgttatagatactgaatctgtcttgcctttgacaacactaacagatcccatactccaacatcatcaggaagaatcaaatatcattggatcatccttgggcagtcctgtttcagaagattcaaaggatgtcgaagatttggtaaactgtcattagaataattcttagaaataggcagttcaagcaaagaaggcacactgttaattacaacctcttcaaagaaataggagcaacccccaagaggcttaatttaccaatttaaatagccacagtccttaagccacacacattgttgctgctatgactttttacctcctttaaacacatcatctgaggttgagttttatgacagtatgtagttgagtggaggctgggagttttaagcataaatccctgtttagtgttacatgggaataaggaatttcattcacttcagccactaagaaaagtttagaatcacgaaagcttaactgctgtggtttaaagtacagtttctctaaagatcagacatggcactgtctcctctcaagcctggttgtagttcagatgagtcttttcaacatggtcttcaacatggtctagagcttaccagtgatcttctgatcttcaagaagactaagtttgagacttgaccagcatacaagtatagagacctaggaggtggtcttgtggtggtacatttggttaacccattgctggcagtgggagctgatttaggcagggtaaacaggaaagcattaaaagttaaaattcactacaggttttttgttacttttaaagggaatatggataagcatagtaacaaaacccaccagaatctaagcagttttcaccccctcagaaaccactgtcattagtttacaaagttagcactttgaagtaaaactaaatgaggaaggaagtaatgttacctatccttgataccatgaccatttattagatgttttgctatataaattaccgagagaatagtttgtcatccacttagtgtgttagctggtggggtacaatataacctctcatctcaggctattttaaaaaaacaatatttgcttctataacaaaaggaaacaaatctaagaatcattcctgtactacagaagggttaaggcaaaggtagccttttgggctttttaatgaatatgacccctatagaaaagtcaagaaaaaaaaacccttgtataaattattttatttattattgtaattagatcttcacaaagttgtcttttcactgtgttttgtcaacgtgaaattaaattgtagttataagcaaaagttggttgcctagggaacaattgtatattcagtttaacagaaataaaagaatatttgtcttaa

SEQ ID NO: 358272 - DNA, 3954 bp, Homo sapiens
gcggccgcagctccgtttccggtggctcgtcgcgctcgctcactccagctgcagccactctcgcccgtggctgcttcctccatcctggtattttttggagcttccatcctggttcttccaaagtgcccggacccaaaacaggaaagtgttgcggagataggaacatgggagagaaacaatctgggtaacatgaaagtgatgctggttgctaagggaaggcaacttgattctgtgggaagggctgtagctgatccatccgttgtctagatttgagtatgagcacagtggaagaggattctgacacagtaacagtagaaactgtgaactctgtgactttgactcaggacacagaagggaatctcattcttcactgccctcagaatgaagcggatgaaatagactcagaagatagtattgaacctccacataaaaggctttgtttgtcctctgaggatgatcagagtattgatgattctactccttgcatatcagttgttgcacttccactttcagaaaatgatcagagctttgaagtgaccatgactgcaaccacagaagtagcagatgatgaggttactgaggggactgtgacacagatacagattttgcagaatgagcaactagatgaaatatctcccttgggtaacgaggaagtttcagcagttagccaagcatggtttacaactaaagaagataaggattctctgactaataaaggacataaatggaagcaggggatgtggtccaaggaagaaattgatattttgatgaacaatattgaacgctatcttaaggcacgcggaataaaagatgctacagaaatcatctttgagatgtcaaaagacgaaagaaaagatttctacaggactatagcatggggtctgaaccggcctttgtttgcagtttatagaagagtgcttcgcatgtatgatgacagaaaccatgtgggaaaatatacacctgaagaaattgagaagctcaaggagaaaaaggcaattgctgcctgtttttttttcacccacagacaactgtggaccccaaaaaaaggccacactttcaaactttggctctcaaagtattgctgcccacaacttccaaaccagtcaaatgggaagaagaagaatgaagaataaatgatgaaattaaaagggagaaaacaattgaaccaaatgctgattggcagactcttgttttaggctccggataaagcatggcaatgactgggcaacaataggggcggcgctaggaagaagtgcatcttctgtcaaagatcggtgccgactgatgaaggatacttgcaacacagggaagtggacagaagaagaagaaaagagacttgcagaagtggttcatgagttgacaagcactgagccaggtgacatagtcacacagggtgtgtcttgggcagctgtggctgaacgagtcggtacccgctcagaaaagcaatgtcgttctaaatggctcaactacctgaattggaaacagagtgggggtactgaatggaccaaggaagatgaaatcaatctcatcctcaggatagcagaacttgatgtagctgatgaaaatgacattaactgggatctgttagctgagggatggagtagtgtccgttcaccacaatggctacgaagtaaatggtggaccatcaaaaggcaaattgcaaaccataaggatgtttcgttccctgtcttaataaaaggtcttaaacagttacatgagaaccaaaaaaacaacccaacgcttttggagaataaatcaggatctggagttccaaacagtaataccaattccagtgtgcagcatgttcagataagagttgcccgcttggaagataatacagccatctcttctagccccatggcagcattgcagattccagtccagatcacccatgtttcttcagcagactctcctgctaccgttgactcagaaacaataacactaaacagtggaacactacagacatttgagattcttccctctttccatctacagcccactggcactccaggcacctacctacttcaaacaagctcaagccaaggccttcccctaactctgactgctagtcccacagtaaccctgacagctgctgctcctgcttctcctgaacagattattgttcatgctttatccccagaacatttgttgaacacaagtgataatgttacagtgcagtgtcacacaccaagagtcatcattcagactgttgccacagaggacatcacttcttccatatcccaagcagaactgacagtcgatagtgatattcagtcatctgattttcctgagcctccagacgccctagaagcagacactttcccagatgaaattcatcaccctaagatgactgtggagccatcatttaatgatgctcatgtatccaaattcagtgaccaaaatagcacagaactgatgaatagtgttatggtcagaacagaagaagaaatctctgacaccgaccttaaacaagaggaatcaccctctgatttagccagtgcttatgttactgagggtttagagtctcccactatagaagaacaagttgatcaaacaattgatgatgaaacaatacttatcgttccttcaccacatggctttatccaggcatctgatgttatagatactgaatctgtcttgcctttgacaacactaacagatcccatactccaacatcatcaggaagaatcaaatatcattggatcatccttgggcagtcctgtttcagaagattcaaaggatgtcgaagatttggtaaactgtcattagaataattcttagaaataggcagttcaagcaaagaaggcacactgttaattacaacctcttcaaagaaataggagcaacccccaagaggcttaatttaccaatttaaatagccacagtccttaagccacacacattgttgctgctatgactttttacctcctttaaacacatcatctgaggttgagttttatgacagtatgtagttgagtggaggctgggagttttaagcataaatccctgtttagtgttacatgggaataaggaatttcattcacttcagccactaagaaaagtttagaatcacgaaagcttaactgctgtggtttaaagtacagtttctctaaagatcagacatggcactgtctcctctcaagcctggttgtagttcagatgagtcttttcaacatggtcttcaacatggtctagagcttaccagtgatcttctgatcttcaagaagactaagtttgagacttgaccagcatacaagtatagagacctaggaggtggtcttgtggtggtacatttggttaacccattgctggcagtgggagctgatttaggcagggtaaacaggaaagcattaaaagttaaaattcactacaggttttttgttacttttaaagggaatatggataagcatagtaacaaaacccaccagaatctaagcagttttcaccccctcagaaaccactgtcattagtttacaaagttagcactttgaagtaaaactaaatgaggaaggaagtaatgttacctatccttgataccatgaccatttattagatgttttgctatataaattaccgagagaatagtttgtcatccacttagtgtgttagctggtggggtacaatataacctctcatctcaggctattttaaaaaaacaatatttgcttctataacaaaaggaaacaaatctaagaatcattcctgtactacagaagggttaaggcaaaggtagccttttgggctttttaatgaatatgacccctatagaaaagtcaagaaaaaaaaacccttgtataaattattttatttattattgtaattagatcttcacaaagttgtcttttcactgtgttttgtcaacgtgaaattaaattgtagttataagcaaaagttggttgcctagggaacaattgtatattcagtttaacagaaataaaagaatatttgtcttaa

SEQ ID NO: 358273 - DNA, 397 bp, Homo sapiens
cagcacagaggagggcggagataggaacatgggagagaaacaatctgggttacatgaaagtgatgctggttgctaggacagcacagaggagggcagtgttgcggagataggaacatgggagagaaacaatctgggtaacatgaaagtgatgctggttgctaagggaaggcaacttgattctgtgggaagggctgtagctgatccatccgttgtctagatttgagtatgagcacagtggaagaggattctgacacagtaacagtagaaactgtgaactctgtgactttgactcaggacacagaagggaatctcattcttcactgccctcagaatgtgtgcggtccagctgtccacctcctctgtgctgtccacctcctctgtgctgtccagctgtcca

SEQ ID NO: 358274 - DNA, 4350 bp, Homo sapiens
cgcccagtggagcctgtccggcccccttgctgcccgctagctcccgccggctggcgcaagctgtcggcgccggggcactgcgggcggggtcggagcctggccttcctgacgttgcagctgccgtccccgcacgttccggccagggcctccctcttagggccgggcggtgcccgtggctcaggctgcagagtagggaagcgagcggctgccgaggcacagcggcgatccggcgggggcggaaaatggcggcggcttcggaggagctaaatggcgccgggacccctggggggtggggtgggccgggaggttgagtagagaactgggccagaaggagtggagacattgataggctcaccccaaaatatgcttttggggactgatttagcacctgcatattctgcgtgaatctctttaattggttgcagttgagctaatggtggagccaaaatgctattgccctgtcttcatcaacatttaatcaagaacgtttgtctgcctgatgagagccacttgggttaagaaactacctgtgaatagtcatcatttctgtccttcattggggaatacttttagaggccaagtgttgcggagataggaacatgggagagaaacaatctgggtaacatgaaagtgatgctggttgctaagggaaggcaacttgattctgtgggaagggctgtagctgatccatccgttgtctagatttgagtatgagcacagtggaagaggattctgacacagtaacagtagaaactgtgaactctgtgactttgactcaggacacagaagggaatctcattcttcactgccctcagaatgaagcggatgaaatagactcagaagatagtattgaacctccacataaaaggctttgtttgtcctctgaggatgatcagagtattgatgattctactccttgcatatcagttgttgcacttccactttcagaaaatgatcagagctttgaagtgaccatgactgcaaccacagaagtagcagatgatgaggttactgaggggactgtgacacagatacagattttgcagaatgagcaactagatgaaatatctcccttgggtaacgaggaagtttcagcagttagccaagcatggtttacaactaaagaagataaggattctctgactaataaaggacataaatggaagcaggggatgtggtccaaggaagaaattgatattttgatgaacaatattgaacgctatcttaaggcacgcggaataaaagatgctacagaaatcatctttgagatgtcaaaagacgaaagaaaagatttctacaggactatagcatggggtctgaaccggcctttgtttgcagtttatagaagagtgcttcgcatgtatgatgacagaaaccatgtgggaaaatatacacctgaagaaattgagaagctcaaggaacaactgtggaccccaaaaaaaggccacactttcaaactttggctctcaaagtattgctgcccacaacttccaaaccagtcaaatgggaagaagaagaatgaagaataaatgatgaaattaaaagggagaaaacaattgaaccaaatgctgattggcagactcttgttttaggctccggataaagcatggcaatgactgggcaacaataggggcggcgctaggaagaagtgcatcttctgtcaaagatcggtgccgactgatgaaggatacttgcaacacagggaagtggacagaagaagaagaaaagagacttgcagaagtggttcatgagttgacaagcactgagccaggtgacatagtcacacagggtgtgtcttgggcagctgtggctgaacgagtcggtacccgctcagaaaagcaatgtcgttctaaatggctcaactacctgaattggaaacagagtgggggtactgaatggaccaaggaagatgaaatcaatctcatcctcaggatagcagaacttgatgtagctgatgaaaatgacattaactgggatctgttagctgagggatggagtagtgtccgttcaccacaatggctacgaagtaaatggtggaccatcaaaaggcaaattgcaaaccataaggatgtttcgttccctgtcttaataaaaggtcttaaacagttacatgagaaccaaaaaaacaacccaacgcttttggagaataaatcaggatctggagttccaaacagtaataccaattccagtgtgcagcatgttcagataagagttgcccgcttggaagataatacagccatctcttctagccccatggcagcattgcagattccagtccagatcacccatgtttcttcagcagactctcctgctaccgttgactcagaaacaataacactaaacagtggaacactacagacatttgagattcttccctctttccatctacagcccactggcactccaggcacctacctacttcaaacaagctcaagccaaggccttcccctaactctgactgctagtcccacagtaaccctgacagctgctgctcctgcttctcctgaacagattattgttcatgctttatccccagaacatttgttgaacacaagtgataatgttacagtgcagtgtcacacaccaagagtcatcattcagactgttgccacagaggacatcacttcttccatatcccaagcagaactgacagtcgatagtgatattcagtcatctgattttcctgagcctccagacgccctagaagcagacactttcccagatgaaattcatcaccctaagatgactgtggagccatcatttaatgatgctcatgtatccaaattcagtgaccaaaatagcacagaactgatgaatagtgttatggtcagaacagaagaagaaatctctgacaccgaccttaaacaagaggaatcaccctctgatttagccagtgcttatgttactgagggtttagagtctcccactatagaagaacaagttgatcaaacaattgatgatgaaacaatacttatcgttccttcaccacatggctttatccaggcatctgatgttatagatactgaatctgtcttgcctttgacaacactaacagatcccatactccaacatcatcaggaagaatcaaatatcattggatcatccttgggcagtcctgtttcagaagattcaaaggatgtcgaagatttggtaaactgtcattagaataattcttagaaataggcagttcaagcaaagaaggcacactgttaattacaacctcttcaaagaaataggagcaacccccaagaggcttaatttaccaatttaaatagccacagtccttaagccacacacattgttgctgctatgactttttacctcctttaaacacatcatctgaggttgagttttatgacagtatgtagttgagtggaggctgggagttttaagcataaatccctgtttagtgttacatgggaataaggaatttcattcacttcagccactaagaaaagtttagaatcacgaaagcttaactgctgtggtttaaagtacagtttctctaaagatcagacatggcactgtctcctctcaagcctggttgtagttcagatgagtcttttcaacatggtcttcaacatggtctagagcttaccagtgatcttctgatcttcaagaagactaagtttgagacttgaccagcatacaagtatagagacctaggaggtggtcttgtggtggtacatttggttaacccattgctggcagtgggagctgatttaggcagggtaaacaggaaagcattaaaagttaaaattcactacaggttttttgttacttttaaagggaatatggataagcatagtaacaaaacccaccagaatctaagcagttttcaccccctcagaaaccactgtcattagtttacaaagttagcactttgaagtaaaactaaatgaggaaggaagtaatgttacctatccttgataccatgaccatttattagatgttttgctatataaattaccgagagaatagtttgtcatccacttagtgtgttagctggtggggtacaatataacctctcatctcaggctattttaaaaaaacaatatttgcttctataacaaaaggaaacaaatctaagaatcattcctgtactacagaagggttaaggcaaaggtagccttttgggctttttaatgaatatgacccctatagaaaagtcaagaaaaaaaaacccttgtataaattattttatttattattgtaattagatcttcacaaagttgtcttttcactgtgttttgtcaacgtgaaattaaattgtagttataagcaaaagttggttgcctagggaacaattgtatattcagtttaacagaaataaaagaatatttgtcttaa

SEQ ID NO: 358275 - DNA, 4321 bp, Homo sapiens
ttaaggtctttggttggcttttgaggataaagatgagaagcttattgaaagaaacctttaaaaaccatttcatatttcataaagtttcacattgctttcaagagcttgtaatttgtcttttctggcctaattgtttaaggttttgtttttgttttttccacagattcctagatagggttgttcatctgtcatcttaaaagggttttctggatgaatagggtactatataatttttaatgctttaagataaaacataaagaggtgttaataattataaaggaaaactatagttactaataatatttatggtgctgtattgattgatatacacatcatgttacataatggtaccacagtctacagttcatagaatcactagcatagctgagcctgttttttttttttttttcagagaacgtttgtctgcctgatgagagccacttgggttaagaaactacctgtgaatagtcatcatttctgtccttcattggggaatacttttagaggccagtttccaaaaattctgcttaaaaaagaattctggttttgtcttactcttccagatgagatatcacagaggcttgggcctagattgtcatcagcatactgctatactattcgtttgttcttattaagccttattgtgtgtaatgctgttactttttcagaagtgttgcggagataggaacatgggagagaaacaatctgggtaacatgaaagtgatgctggttgctaagggaaggcaacttgattctgtgggaagggctgtagctgatccatccgttgtctagatttgagtatgagcacagtggaagaggattctgacacagtaacagtagaaactgtgaactctgtgactttgactcaggacacagaagggaatctcattcttcactgccctcagaatgaagcggatgaaatagactcagaagatagtattgaacctccacataaaaggctttgtttgtcctctgaggatgatcagagtattgatgattctactccttgcatatcagttgttgcacttccactttcagaaaatgatcagagctttgaagtgaccatgactgcaaccacagaagtagcagatgatgaggttactgaggggactgtgacacagatacagattttgcagaatgagcaactagatgaaatatctcccttgggtaacgaggaagtttcagcagttagccaagcatggtttacaactaaagaagataaggattctctgactaataaaggacataaatggaagcaggggatgtggtccaaggaagaaattgatattttgatgaacaatattgaacgctatcttaaggcacgcggaataaaagatgctacagaaatcatctttgagatgtcaaaagacgaaagaaaagatttctacaggactatagcatggggtctgaaccggcctttgtttgcagtttatagaagagtgcttcgcatgtatgatgacagaaaccatgtgggaaaatatacacctgaagaaattgagaagctcaaggagctccggataaagcatggcaatgactgggcaacaataggggcggcgctaggaagaagtgcatcttctgtcaaagatcggtgccgactgatgaaggatacttgcaacacagggaagtggacagaagaagaagaaaagagacttgcagaagtggttcatgagttgacaagcactgagccaggtgacatagtcacacagggtgtgtcttgggcagctgtggctgaacgagtcggtacccgctcagaaaagcaatgtcgttctaaatggctcaactacctgaattggaaacagagtgggggtactgaatggaccaaggaagatgaaatcaatctcatcctcaggatagcagaacttgatgtagctgatgaaaatgacattaactgggatctgttagctgagggatggagtagtgtccgttcaccacaatggctacgaagtaaatggtggaccatcaaaaggcaaattgcaaaccataaggatgtttcgttccctgatggtggtctgtcggagaatcaatgttctttttgtctacccatctcccttcagtcttaataaaaggtcttaaacagttacatgagaaccaaaaaaacaacccaacgcttttggagaataaatcaggatctggagttccaaacagtaataccaattccagtgtgcagcatgttcagataagagttgcccgcttggaagataatacagccatctcttctagccccatggcagcattgcagattccagtccagatcacccatgtttcttcagcagactctcctgctaccgttgactcagaaacaataacactaaacagtggaacactacagacatttgagattcttccctctttccatctacagcccactggcactccaggcacctacctacttcaaacaagctcaagccaaggccttcccctaactctgactgctagtcccacagtaaccctgacagctgctgctcctgcttctcctgaacagattattgttcatgctttatccccagaacatttgttgaacacaagtgataatgttacagtgcagtgtcacacaccaagagtcatcattcagactgttgccacagaggacatcacttcttccatatcccaagcagaactgacagtcgatagtgatattcagtcatctgattttcctgagcctccagacgccctagaagcagacactttcccagatgaaattcatcaccctaagatgactgtggagccatcatttaatgatgctcatgtatccaaattcagtgaccaaaatagcacagaactgatgaatagtgttatggtcagaacagaagaagaaatctctgacaccgaccttaaacaagaggaatcaccctctgatttagccagtgcttatgttactgagggtttagagtctcccactatagaagaacaagttgatcaaacaattgatgatgaaacaatacttatcgttccttcaccacatggctttatccaggcatctgatgttatagatactgaatctgtcttgcctttgacaacactaacagatcccatactccaacatcatcaggaagaatcaaatatcattggatcatccttgggcagtcctgtttcagaagattcaaaggatgtcgaagatttggtaaactgtcattagaataattcttagaaataggcagttcaagcaaagaaggcacactgttaattacaacctcttcaaagaaataggagcaacccccaagaggcttaatttaccaatttaaatagccacagtccttaagccacacacattgttgctgctatgactttttacctcctttaaacacatcatctgaggttgagttttatgacagtatgtagttgagtggaggctgggagttttaagcataaatccctgtttagtgttacatgggaataaggaatttcattcacttcagccactaagaaaagtttagaatcacgaaagcttaactgctgtggtttaaagtacagtttctctaaagatcagacatggcactgtctcctctcaagcctggttgtagttcagatgagtcttttcaacatggtcttcaacatggtctagagcttaccagtgatcttctgatcttcaagaagactaagtttgagacttgaccagcatacaagtatagagacctaggaggtggtcttgtggtggtacatttggttaacccattgctggcagtgggagctgatttaggcagggtaaacaggaaagcattaaaagttaaaattcactacaggttttttgttacttttaaagggaatatggataagcatagtaacaaaacccaccagaatctaagcagttttcaccccctcagaaaccactgtcattagtttacaaagttagcactttgaagtaaaactaaatgaggaaggaagtaatgttacctatccttgataccatgaccatttattagatgttttgctatataaattaccgagagaatagtttgtcatccacttagtgtgttagctggtggggtacaatataacctctcatctcaggctattttaaaaaaacaatatttgcttctataacaaaaggaaacaaatctaagaatcattcctgtactacagaagggttaaggcaaaggtagccttttgggctttttaatgaatatgacccctatagaaaagtcaagaaaaaaaaacccttgtataaattattttatttattattgtaattagatcttcacaaagttgtcttttcactgtgttttgtcaacgtgaaattaaattgtagttataagcaaaagttggttgcctagggaacaattgtatattcagtttaacagaaataaaagaatatttgtcttaa

SEQ ID NO: 358276 - DNA, 2227 bp, Homo sapiens
aagtcgtgtcggtaccggtgtgtcatgaaacagatagctgagaccagaccatagaaatacacaggagcaaagagcagcctcttaaaccttcaggctaggtaatgacttgagacgattatgccctacattgtattacttgttcgcaccttcacaatgggtaagtacatttgtgtctagtaaactaaactcagtccgtttttgtatataaaagtagacttaatcattgttaaactatctttcctttttcctttagtctttccatctacagcccactggcactccaggcacctacctacttcaaacaagctcaagccaaggccttcccctaactctgactgctagtcccacagtaaccctgacagctgctgctcctgcttctcctgaacagattattgttcatgctttatccccagaacatttgttgaacacaagtgataatgttacagtgcagtgtcacacaccaagagtcatcattcagactgttgccacagaggacatcacttcttccatatcccaagcagaactgacagtcgatagtgatattcagtcatctgattttcctgagcctccagacgccctagaagcagacactttcccagatgaaattcatcaccctaagatgactgtggagccatcatttaatgatgctcatgtatccaaattcagtgaccaaaatagcacagaactgatgaatagtgttatggtcagaacagaagaagaaatctctgacaccgaccttaaacaagaggaatcaccctctgatttagccagtgcttatgttactgagggtttagagtctcccactatagaagaacaagttgatcaaacaattgatgatgaaacaatacttatcgttccttcaccacatggctttatccaggcatctgatgttatagatactgaatctgtcttgcctttgacaacactaacagatcccatactccaacatcatcaggaagaatcaaatatcattggatcatccttgggcagtcctgtttcagaagattcaaaggatgtcgaagatttggtaaactgtcattagaataattcttagaaataggcagttcaagcaaagaaggcacactgttaattacaacctcttcaaagaaataggagcaacccccaagaggcttaatttaccaatttaaatagccacagtccttaagccacacacattgttgctgctatgactttttacctcctttaaacacatcatctgaggttgagttttatgacagtatgtagttgagtggaggctgggagttttaagcataaatccctgtttagtgttacatgggaataaggaatttcattcacttcagccactaagaaaagtttagaatcacgaaagcttaactgctgtggtttaaagtacagtttctctaaagatcagacatggcactgtctcctctcaagcctggttgtagttcagatgagtcttttcaacatggtcttcaacatggtctagagcttaccagtgatcttctgatcttcaagaagactaagtttgagacttgaccagcatacaagtatagagacctaggaggtggtcttgtggtggtacatttggttaacccattgctggcagtgggagctgatttaggcagggtaaacaggaaagcattaaaagttaaaattcactacaggttttttgttacttttaaagggaatatggataagcatagtaacaaaacccaccagaatctaagcagttttcaccccctcagaaaccactgtcattagtttacaaagttagcactttgaagtaaaactaaatgaggaaggaagtaatgttacctatccttgataccatgaccatttattagatgttttgctatataaattaccgagagaatagtttgtcatccacttagtgtgttagctggtggggtacaatataacctctcatctcaggctattttaaaaaaacaatatttgcttctataacaaaaggaaacaaatctaagaatcattcctgtactacagaagggttaaggcaaaggtagccttttgggctttttaatgaatatgacccctatagaaaagtcaagaaaaaaaaacccttgtataaattattttatttattattgtaattagatcttcacaaagttgtcttttcactgtgttttgtcaacgtgaaattaaattgtagttataagcaaaagttggttgcctagggaacaattgtatattcagtttaacagaaataaaagaatatttgtcttaa

SEQ ID NO: 358277 - DNA, 4295 bp, Homo sapiens
ttaaggtctttggttggcttttgaggataaagatgagaagcttattgaaagaaacctttaaaaaccatttcatatttcataaagtttcacattgctttcaagagcttgtaatttgtcttttctggcctaattgtttaaggttttgtttttgttttttccacagattcctagatagggttgttcatctgtcatcttaaaagggttttctggatgaatagggtactatataatttttaatgctttaagataaaacataaagaggtgttaataattataaaggaaaactatagttactaataatatttatggtgctgtattgattgatatacacatcatgttacataatggtaccacagtctacagttcatagaatcactagcatagctgagcctgttttttttttttttttcagagaacgtttgtctgcctgatgagagccacttgggttaagaaactacctgtgaatagtcatcatttctgtccttcattggggaatacttttagaggccagtttccaaaaattctgcttaaaaaagaattctggttttgtcttactcttccagatgagatatcacagaggcttgggcctagattgtcatcagcatactgctatactattcgtttgttcttattaagccttattgtgtgtaatgctgttactttttcagaagtgttgcggagataggaacatgggagagaaacaatctgggtaacatgaaagtgatgctggttgctaagggaaggcaacttgattctgtgggaagggctgtagctgatccatccgttgtctagatttgagtatgagcacagtggaagaggattctgacacagtaacagtagaaactgtgaactctgtgactttgactcaggacacagaagggaatctcattcttcactgccctcagaatgaagcggatgaaatagactcagaagatagtattgaacctccacataaaaggctttgtttgtcctctgaggatgatcagagtattgatgattctactccttgcatatcagttgttgcacttccactttcagaaaatgatcagagctttgaagtgaccatgactgcaaccacagaagtagcagatgatgaggttactgaggggactgtgacacagatacagattttgcagaatgagcaactagatgaaatatctcccttgggtaacgaggaagtttcagcagttagccaagcatggtttacaactaaagaagataaggattctctgactaataaaggacataaatggaagcaggggatgtggtccaaggaagaaattgatattttgatgaacaatattgaacgctatcttaaggcacgcggaataaaagatgctacagaaatcatctttgagatgtcaaaagacgaaagaaaagatttctacaggactatagcatggggtctgaaccggcctttgtttgcagtttatagaagagtgcttcgcatgtatgatgacagaaaccatgtgggaaaatatacacctgaagaaattgagaagctcaaggaacaactgtggaccccaaaaaaaggccacactttcaaactttggctctcaaagtattgctgcccacaacttccaaaccagtcaaatgggaagaagaagaatgaagaataaatgatgaaattaaaagggagaaaacaattgaaccaaatgctgattggcagactcttgttttaggctccggataaagcatggcaatgactgggcaacaataggggcggcgctaggaagaagtgcatcttctgtcaaagatcggtgccgactgatgaaggatacttgcaacacagggaagtggacagaagaagaagaaaagagacttgcagaagtggttcatgagttgacaagcactgagccaggtgacatagtcacacagggtgtgtcttgggcagctgtggctgaacgagtcggtacccgctcagaaaagcaatgtcgttctaaatggctcaactacctgaattggaaacagagtgggggtactgaatggaccaaggaagatgaaatcaatctcatcctcaggatagcagaacttgatgtagctgatgaaaatgacattaactgggatctgttagctgagggatggagtagtgtccgttcaccacaatggctacgaagtaaatggtggaccatcaaaaggcaaattgcaaaccataaggatgtttcgttccctgtcttaataaaaggtcttaaacagttacatgagaaccaaaaaaacaacccaacgcttttggagaataaatcaggatctggagttccaaacagtaataccaattccagtgtgcagcatgttcagataagagttgcccgcttggaagataatacagccatctcttctagccccatggcagcattgcagattccagtccagatcacccatgtttcttcagcagactctcctgctaccgttgactcagaaacaataacactaaacagtggaacactacagacatttgagattcttccctctttccatctacagcccactggcactccaggcacctacctacttcaaacaagctcaagccaaggccttcccctaactctgactgctagtcccacagtaaccctgacagctgctgctcctgcttctcctgaacagattattgttcatgctttatccccagaacatttgttgaacacaagtgataatgttacagtgcagtgtcacacaccaagagtcatcattcagactgttgccacagaggacatcacttcttccatatcccaagcagaactgacagtcgatagtgatattcagtcatctgattttcctgagcctccagacgccctagaagcagacactttcccagatgaaattcatcaccctaagatgactgtggagccatcatttaatgatgctcatgtatccaaattcagtgaccaaaatagcacagaactgatgaatagtgttatggtcagaacagaagaagaaatctctgacaccgaccttaaacaagaggaatcaccctctgatttagccagtgcttatgttactgagatcccatactccaacatcatcaggaagaatcaaatatcattggatcatccttgggcagtcctgtttcagaagattcaaaggatgtcgaagatttggtaaactgtcattagaataattcttagaaataggcagttcaagcaaagaaggcacactgttaattacaacctcttcaaagaaataggagcaacccccaagaggcttaatttaccaatttaaatagccacagtccttaagccacacacattgttgctgctatgactttttacctcctttaaacacatcatctgaggttgagttttatgacagtatgtagttgagtggaggctgggagttttaagcataaatccctgtttagtgttacatgggaataaggaatttcattcacttcagccactaagaaaagtttagaatcacgaaagcttaactgctgtggtttaaagtacagtttctctaaagatcagacatggcactgtctcctctcaagcctggttgtagttcagatgagtcttttcaacatggtcttcaacatggtctagagcttaccagtgatcttctgatcttcaagaagactaagtttgagacttgaccagcatacaagtatagagacctaggaggtggtcttgtggtggtacatttggttaacccattgctggcagtgggagctgatttaggcagggtaaacaggaaagcattaaaagttaaaattcactacaggttttttgttacttttaaagggaatatggataagcatagtaacaaaacccaccagaatctaagcagttttcaccccctcagaaaccactgtcattagtttacaaagttagcactttgaagtaaaactaaatgaggaaggaagtaatgttacctatccttgataccatgaccatttattagatgttttgctatataaattaccgagagaatagtttgtcatccacttagtgtgttagctggtggggtacaatataacctctcatctcaggctattttaaaaaaacaatatttgcttctataacaaaaggaaacaaatctaagaatcattcctgtactacagaagggttaaggcaaaggtagccttttgggctttttaatgaatatgacccctatagaaaagtcaagaaaaaaaaacccttgtataaattattttatttattattgtaattagatcttcacaaagttgtcttttcactgtgttttgtcaacgtgaaattaaattgtagttataagcaaaagttggttgcctagggaacaattgtatattcagtttaacagaaataaaagaatatttgtcttaa

SEQ ID NO: 358278 - DNA, 2056 bp, Homo sapiens
atttacaactttaacaggttctttaatgttttatagccagaacatttgttgaacacaagtgataatgttacagtgcagtgtcacacaccaagagtcatcattcagactgttgccacagaggacatcacttcttccatatcccaagcagaactgacagtcgatagtgatattcagtcatctgattttcctgagcctccagacgccctagaagcagacactttcccagatgaaattcatcaccctaagatgactgtggagccatcatttaatgatgctcatgtatccaaattcagtgaccaaaatagcacagaactgatgaatagtgttatggtcagaacagaagaagaaatctctgacaccgaccttaaacaagaggaatcaccctctgatttagccagtgcttatgttactgagggtttagagtctcccactatagaagaacaagttgatcaaacaattgatgatgaaacaatacttatcgttccttcaccacatggctttatccaggcatctgatgttatagatactgaatctgtcttgcctttgacaacactaacaggtactgtaatataatacttactatgtgcctgataaattttagatggaaaaaaacagacatttaattaacttgtttcagtctttcttgatccaataagctactagtcctgttgagttctacactgtggtagaataccttaaattcttgacatggattagagaataaatatatacatttaagactaacttgaaactcattacagatcccatactccaacatcatcaggaagaatcaaatatcattggatcatccttgggcagtcctgtttcagaagattcaaaggatgtcgaagatttggtaaactgtcattagaataattcttagaaataggcagttcaagcaaagaaggcacactgttaattacaacctcttcaaagaaataggagcaacccccaagaggcttaatttaccaatttaaatagccacagtccttaagccacacacattgttgctgctatgactttttacctcctttaaacacatcatctgaggttgagttttatgacagtatgtagttgagtggaggctgggagttttaagcataaatccctgtttagtgttacatgggaataaggaatttcattcacttcagccactaagaaaagtttagaatcacgaaagcttaactgctgtggtttaaagtacagtttctctaaagatcagacatggcactgtctcctctcaagcctggttgtagttcagatgagtcttttcaacatggtcttcaacatggtctagagcttaccagtgatcttctgatcttcaagaagactaagtttgagacttgaccagcatacaagtatagagacctaggaggtggtcttgtggtggtacatttggttaacccattgctggcagtgggagctgatttaggcagggtaaacaggaaagcattaaaagttaaaattcactacaggttttttgttacttttaaagggaatatggataagcatagtaacaaaacccaccagaatctaagcagttttcaccccctcagaaaccactgtcattagtttacaaagttagcactttgaagtaaaactaaatgaggaaggaagtaatgttacctatccttgataccatgaccatttattagatgttttgctatataaattaccgagagaatagtttgtcatccacttagtgtgttagctggtggggtacaatataacctctcatctcaggctattttaaaaaaacaatatttgcttctataacaaaaggaaacaaatctaagaatcattcctgtactacagaagggttaaggcaaaggtagccttttgggctttttaatgaatatgacccctatagaaaagtcaagaaaaaaaaacccttgtataaattattttatttattattgtaattagatcttcacaaagttgtcttttcactgtgttttgtcaacgtgaaattaaattgtagttataagcaaaagttggttgcctagggaacaattgtatattcagtttaacagaaataaaagaatatttgtcttaa

SEQ ID NO: 358279 - DNA, 3108 bp, Homo sapiens
ttaaggtctttggttggcttttgaggataaagatgagaagcttattgaaagaaacctttaaaaaccatttcatatttcataaagtttcacattgctttcaagagcttgtaatttgtcttttctggcctaattgtttaaggttttgtttttgttttttccacagattcctagatagggttgttcatctgtcatcttaaaagggttttctggatgaatagggtactatataatttttaatgctttaagataaaacataaagaggtgttaataattataaaggaaaactatagttactaataatatttatggtgctgtattgattgatatacacatcatgttacataatggtaccacagtctacagttcatagaatcactagcatagctgagcctgttttttttttttttttcagagaacgtttgtctgcctgatgagagccacttgggttaagaaactacctgtgaatagtcatcatttctgtccttcattggggaatacttttagaggccagtttccaaaaattctgcttaaaaaagaattctggttttgtcttactcttccagatgagatatcacagaggcttgggcctagattgtcatcagcatactgctatactattcgtttgttcttattaagccttattgtgtgtaatgctgttactttttcagaagtgttgcggagataggaacatgggagagaaacaatctgggtaacatgaaagtgatgctggttgctaagggaaggcaacttgattctgtgggaagggctgtagctgatccatccgttgtctagatttgagtatgagcacagtggaagaggattctgacacagtaacagtagaaactgtgaactctgtgactttgactcaggacacagaagggaatctcattcttcactgccctcagaatgaagcggatgaaatagactcagaagatagtattgaacctccacataaaaggctttgtttgtcctctgaggatgatcagagtattgatgattctactccttgcatatcagttgttgcacttccactttcagaaaatgatcagagctttgaagtgaccatgactgcaaccacagaagtagcagatgatgaggttactgaggggactgtgacacagatacagattttgcagaatgagcaactagatgaaatatctcccttgggtaacgaggaagtttcagcagttagccaagcatggtttacaactaaagaagataaggattctctgactaataaaggacataaatggaagcaggggatgtggtccaaggaagaaattgatattttgatgaacaatattgaacgctatcttaaggcacgcggaataaaagatgctacagaaatcatctttgagatgtcaaaagacgaaagaaaagatttctacaggactatagcatggggtctgaaccggcctttgtttgcagtttatagaagagtgcttcgcatgtatgatgacagaaaccatgtgggaaaatatacacctgaagaaattgagaagctcaaggaacaactgtggaccccaaaaaaaggccacactttcaaactttggctctcaaagtattgctgcccacaacttccaaaccagtcaaatgggaagaagaagaatgaagaataaatgatgaaattaaaagggagaaaacaattgaaccaaatgctgattggcagactcttgttttaggctccggataaagcatggcaatgactgggcaacaataggggcggcgctaggaagaagtgcatcttctgtcaaagatcggtgccgactgatgaaggatacttgcaacacagggaagtggacagaagaagaagaaaagagacttgcagaagtggttcatgagttgacaagcactgagccaggtgacatagtcacacagggtgtgtcttgggcagctgtggctgaacgagtcggtacccgctcagaaaagcaatgtcgttctaaatggctcaactacctgaattggaaacagagtgggggtactgaatggaccaaggaagatgaaatcaatctcatcctcaggatagcagaacttgatgtagctgatgaaaatgacattaactgggatctgttagctgagggatggagtagtgtccgttcaccacaatggctacgaagtaaatggtggaccatcaaaaggcaaattgcaaaccataaggatgtttcgttccctgtcttaataaaaggtcttaaacagttacatgagaaccaaaaaaacaacccaacgcttttggagaataaatcaggatctggagttccaaacagtaataccaattccagtgtgcagcatgttcagataagagttgcccgcttggaagataatacagccatctcttctagccccatggcagcattgcagattccagtccagatcacccatgtttcttcagcagactctcctgctaccgttgactcagaaacaataacactaaacagtggaacactacagacatttgagattcttccctctttccatctacagcccactggcactccaggcacctacctacttcaaacaagctcaagccaaggccttcccctaactctgactgctagtcccacagtaaccctgacagctgctgctcctgcttctcctgaacagattattgttcatgctttatccgtatgttacataaattacttgatttttgagtacctgttatagaccaggattagttgataaggaccaaaatagaaggtagttatctaaacagttcttcctactgctgctgttccaggcacagtgttatacaccatcactctgccttcactggagtgtatgtttcatcccttctctttatgtaagatggctatacattagaatagggacattagaagaacaaaggccctagcaagtaaaggacaagggttctagaaaaatagtgataaaagtatttacagtttgagaggtaagagatgtggggggagacagtgaggtacccccagaccgccatttttaatagcaccttaactagtgattttatgttttatagcgcccaacgtatgttaacccctagtgatattgctgccttcctttggggatcccccgagaactcattatccccactagttgccccaaagtgaaaaaattttttctctttttcttatc

SEQ ID NO: 358280 - DNA, 2488 bp, Homo sapiens
ttaaggtctttggttggcttttgaggataaagatgagaagcttattgaaagaaacctttaaaaaccatttcatatttcataaagtttcacattgctttcaagagcttgtaatttgtcttttctggcctaattgtttaaggttttgtttttgttttttccacagattcctagatagggttgttcatctgtcatcttaaaagggttttctggatgaatagggtactatataatttttaatgctttaagataaaacataaagaggtgttaataattataaaggaaaactatagttactaataatatttatggtgctgtattgattgatatacacatcatgttacataatggtaccacagtctacagttcatagaatcactagcatagctgagcctgttttttttttttttttcagagaacgtttgtctgcctgatgagagccacttgggttaagaaactacctgtgaatagtcatcatttctgtccttcattggggaatacttttagaggccagtttccaaaaattctgcttaaaaaagaattctggttttgtcttactcttccagatgagatatcacagaggcttgggcctagattgtcatcagcatactgctatactattcgtttgttcttattaagccttattgtgtgtaatgctgttactttttcagaagtgttgcggagataggaacatgggagagaaacaatctgggtaacatgaaagtgatgctggttgctaagggaaggcaacttgattctgtgggaagggctgtagctgatccatccgttgtctagatttgagtatgagcacagtggaagaggattctgacacagtaacagtagaaactgtgaactctgtgactttgactcaggacacagaagggaatctcattcttcactgccctcagaatgaagcggatgaaatagactcagaagatagtattgaacctccacataaaaggctttgtttgtcctctgaggatgatcagagtattgatgattctactccttgcatatcagttgttgcacttccactttcagaaaatgatcagagctttgaagtgaccatgactgcaaccacagaagtagcagatgatgaggttactgaggggactgtgacacagatacagattttgcagaatgagcaactagatgaaatatctcccttgggtaacgaggaagtttcagcagttagccaagcatggtttacaactaaagaagataaggattctctgactaataaaggacataaatggaagcaggggatgtggtccaaggaagaaattgatattttgatgaacaatattgaacgctatcttaaggcacgcggaataaaagatgctacagaaatcatctttgagatgtcaaaagacgaaagaaaagatttctacaggactatagcatggggtctgaaccggcctttgtttgcagtttatagaagagtgcttcgcatgtatgatgacagaaaccatgtgggaaaatatacacctgaagaaattgagaagctcaaggagctccggataaagcatggcaatgactgggcaacaataggggcggcgctaggaagaagtgcatcttctgtcaaagatcggtgccgactgatgaaggatacttgcaacacagggaagtggacagaagaagaagaaaagagacttgcagaagtggttcatgagttgacaagcactgagccaggtgacatagtcacacagggtgtgtcttgggcagctgtggctgaacgagtcggtacccgctcagaaaagcaatgtcgttctaaatggctcaactacctgaattggaaacagagtgggggtactgaatggaccaaggaagatgaaatcaatctcatcctcaggatagcagaacttgatgtagctgatgaaaatgacattaactgggatctgttagctgagggatggagtagtgtccgttcaccacaatggctacgaagtaaatggtggaccatcaaaaggcaaattgcaaaccataaggatgtttcgttccctggtaatgtattacttactttttaagctcctccccttttcttaccatatttactccttaggagtgagaggttagaagttctttgccccagctagagatatcatagcagatttctacttacaccacttccctgtttctctcagtaattgtttccttccccagagaagagttaatactgtttgtaattcctaaagcccctaaaatgaaaatgtacacacttattcttgttcttctacgtaaactatcaggaggaaataaaatcatgccacataacgatttaatttttatgtttttagagacagggtctagcttggttgtccaggccgacatgcagtggtgtgatcatagctcactgtaaccttaaacctgtcggctcaagtgattctcccacctcagcctcctgaatagctcggactacaggcacacaccaccatgtccagctattttttttcgtagagatgaggtcttgccatgttacccaggttggtct

SEQ ID NO: 358281 - DNA, 414 bp, Homo sapiens
tgtttacaatttggtgagtttggacataagtataccctcatgttaccatcaccacagtccaggtaattaatatatccatcacctccaaaagttctctgatgtccttttggttttgttttgttctgtttgttttgtgctgttatggtaagaacacgtaacatgattgggaggccgaggtgggcggatcacgaggtcaggagatcgagaccatcctggctaacacggtgaaaccccatctctactaaaaatacaaaaaattagctgggcgtggtggcgggcgcctgtagtcccagctactcgggaggctgaggcaggagaatggtgtgaacctggggaggtggagctttcagtgagctgagatcgggccactgcactccaacctgggtgacagagccagatactgtctcaaaaaaa

SEQ ID NO: 358282 - DNA, 234 bp, Homo sapiens
caaaactccgtatttaaaaaaaaaaaaaaaaaaaaaatctaaagaagagttctaaaaatatttctaaccaacgacttggaatatatataaagttctgagttctagcctgcttattgggaggaaaaaaactaagtttcattactttatattcatgcttctttagtcaaatagccactatccattttataatagaacctttcagtatttaacacagatacaccatttaataattaa

SEQ ID NO: 358283 - DNA, 841 bp, Homo sapiens
tactttttcaggtgcttgacaataaatttaattcaggtgaaggctcttcccttcgtgcaggcaccaggggtgtatatgagatgcagcatgcctcatagtgatggtgcaaggcatggcatcaaagccaggctgaggcccctccggatgtcagtggagctaacaaacacatgagtgccaaggcccaaggaacagcactttcagcatgtaggaagaaactggattctggaagcttgaattctggcacctagaagctgcaaacccgaagcactgaaagtgaatgcaaagacaggaaggagtggggtggaggcttctgataccaagtgggtgtcgcaaatgagccatacccgaagatcacaagccccacaggagcagggcctaatgggtgggcgggttgggggcttagagctgaagccttttacggccaaccccaccaatcccagtgctagggagtcgccaaggtggacatggagctataggctgtgccgtcctaggaaccaacaaaggttaagaaccactcctgctgagtaccagcaacatggaagacagtggagtgactgcctgcttactcatgcttttgtttttccaatctagaaagtctacagaaactcctgggagcagacccgggctggcagttatgacttcaggctggatgccatccccttccagactgcccgggcatctagggagatcgccagtgatgtaagacccccatgttctctcctgcggtcactgatgagtttttctctggttttcccagttctgttgaaaggcaaaccaccaggacctgtcaagattatctctctctctgcaccaaaactgaacatgtactgtattttaaatg

SEQ ID NO: 358284 - DNA, 866 bp, Homo sapiens
gcataataagatcaagaacttagtgttgttctgaatgggacattgaagcacaaatccagcttctgcgtcatacatggtttcctcttgctttagccttaatctggggttgagaagactcttgtgtctcccaaaaatggctgacaactccttgagggctgaggacttattactctgcccaggcccagtgcctggcccacaccaggtgcttagcaagcatgtgttgaactccacattgggtgtctccatgtgccaggcactgtgctgggtattgggaataagaagatgaataagatgcacatggcccatcaaactgtaagccaattatgtgccttatgagctatgacaggagatgggcaggatgtcatggaacccttagcagagcatctcactaagatcatctgataaacatggggcatgtgattcacatgttttttcatttcaggtgagatacacagaggactatgaacaacaaagagggaaaggcagtttccctgcgatgatcacacccgcctatcagatagccaaaagagccaatgagctggcaagtgatgtaagtgtccttgacaatgtggtcatgttagggagaaagaggaatgtgaacctgggtctgaggagtccaacttcctgttgacttttgcatttaccctgaagccagggagtagttttcctttatagttttaagtcatttacatgacatgactgctttttgttggaaaactatcctagatcaaggaaagaaatcctagaatacttaccttggcgggggggaaacccgtgcctcgcgaaggggcccctacaaaggggggggccgagggttcgggcaacatgaaaaacctgtgggaaaaagggtgtttcataagcattca

SEQ ID NO: 358285 - DNA, 1914 bp, Homo sapiens
gaaggagcgagggaaactcatagggccccagagtgtaagagacgacccccggatccagcactgccggcgcatgggccagctgcagagcgagcttcagtacaggaggggggcgaccagcagccaagcccagttccatctgcccatggacatggtgcacctggtccatgccaagaatgcccaggctctggccagcgaccacgactacaggacacagtatcacaagttcacagcactgcccgaggacctgaagatggcctgggccaagaaagcccatgccctgcagagtgagttgcgctacaagtcagacctgatcggcatgaagggcataggatggctggcgctgagatccccacagatggagagtgcaaagaaggctggagaactcatcagcgagaccaagtaccgtaaaaaaccagacagtatcaagttcaccacagtggttgactccccagacctggttcatgccaagaacagctatatgcactgcaatgagcgcatgtatagatctggagatgcagaatccctgcacagatacaccctgatccccgaccatcccgatttcacccgagctcgcctcaatgcgctgcatctgagtgacaaagtctacagaaactcctgggagcagacccgggctggcagttatgacttcaggctggatgccatccccttccagactgcccgggcatctagggagatcgccagtgatttccggtacaaagaggctttcctgcgggaccgaggcctgcagatcgggtaccgcagtgtcgacgatgacccaaggatgaagcatttcctcaacgttggcaggctccagagtgacaatgagtacaagaaggactttgccaagagtcggtcccagtttcacagcagcacagaccagcccggcctccttcaggccaagaggagccagcagctggccagtgatgtgcactacaggcagcccctgccccagcccacctgcgacccggagcagctgggcctcaggcatgctcagaaggcccaccagctgcagagtgatgtcaagtataaatcagacttgaacctgaccagaggtgttggctggacccctcctggctcctacaaagtggaaatggctcggcgggctgcggaactggccaacgcaaggggcctgggtctccagggagcttaccggggggcagaagcagtggaggctggagatcatcagagtggggaggtgaacccagatgccactgagattctgcacgtcaaaaagaagaaggccctgctgttgtgagccatgtccaccctgattcctgagaggccagagaggaagtttgttcaccagagacaggcttcagatggctttgatttcggcaagctggaatggcccaccagcccatcccagatcttcctttattaaaataataactctgaaagcagatggagaatgttgtatttgtggtcctctctgatacctagacgtggatggctgattctgttgagtgcctcgagtgtctgggctgaggaataaagatgtgatggtggttcccgctgatgctggggattctggagtctgcatttgcaggatgcctgtggtggaggcagtctctgtgaacactgattttctagaaggtacaattgggtaaggaaagcaaacatactatgttgtgttgattccatcattccttgggttaccaagggaggcagaagaagcctggtgatattgtgcaaatgctggtctgggaaggcccaggctgggtggcagttgtctctgcttagagtagggatagtctactgtgtggtcccctggaggctctggaggtgtccattgttggccatgaggcctcccggtgtcagggtgccaaggagagtgggctctgaggtccagaagacagtaccttagaagccactttcacttttgatggtggctttgatccaattcaggaatttggt

SEQ ID NO: 358286 - DNA, 1907 bp, Homo sapiens
tactttttcaggtgcttgacaataaatttaattcaggtgaaggctcttcccttcgtgcaggcaccaggggtgtatatgagatgcagcatgcctcatagtgatggtgcaaggcatggcatcaaagccaggctgaggcccctccggatgtcagtggagctaacaaacacatgagtgccaaggcccaaggaacagcactttcagcatgtaggaagaaactggattctggaagcttgaattctggcacctagaagctgcaaacccgaagcactgaaagtgaatgcaaagacaggaaggagtggggtggaggcttctgataccaagtgggtgtcgcaaatgagccatacccgaagatcacaagccccacaggagcagggcctaatgggtgggcgggttgggggcttagagctgaagccttttacggccaaccccaccaatcccagtgctagggagtcgccaaggtggacatggagctataggctgtgccgtcctaggaaccaacaaaggttaagaaccactcctgctgagtaccagcaacatggaagacagtggagtgactgcctgcttactcatgcttttgtttttccaatctagaaagtctacagaaactcctgggagcagacccgggctggcagttatgacttcaggctggatgccatccccttccagactgcccgggcatctagggagatcgccagtgatttccggtacaaagaggctttcctgcgggaccgaggcctgcagatcgggtaccgcagtgtcgacgatgacccaaggatgaagcatttcctcaacgttggcaggctccagagtgacaatgagtacaagaaggactttgccaagagtcggtcccagtttcacagcagcacagaccagcccggcctccttcaggccaagaggagccagcagctggccagtgatgtgcactacaggcagcccctgccccagcccacctgcgacccggagcagctgggcctcaggcatgctcagaaggcccaccagctgcagagtgatgtcaagtataaatcagacttgaacctgaccagaggtgttggctggacccctcctggctcctacaaagtggaaatggctcggcgggctgcggaactggccaacgcaaggggcctgggtctccagggagcttaccggggggcagaagcagtggaggctggagatcatcagagtggggaggtgaacccagatgccactgagattctgcacgtcaaaaagaagaaggccctgctgttgtgagccatgtccaccctgattcctgagaggccagagaggaagtttgttcaccagagacaggcttcagatggctttgatttcggcaagctggaatggcccaccagcccatcccagatcttcctttattaaaataataactctgaaagcagatggagaatgttgtatttgtggtcctctctgatacctagacgtggatggctgattctgttgagtgcctcgagtgtctgggctgaggaataaagatgtgatggtggttcccgctgatgctggggattctggagtctgcatttgcaggatgcctgtggtggaggcagtctctgtgaacactgattttctagaaggtacaattgggtaaggaaagcaaacatactatgttgtgttgattccatcattccttgggttaccaagggaggcagaagaagcctggtgatattgtgcaaatgctggtctgggaaggcccaggctgggtggcagttgtctctgcttagagtagggatagtctactgtgtggtcccctggaggctctggaggtgtccattgttggccatgaggcctcccggtgtcagggtgccaaggagagtgggctctgaggtccagaagacagtaccttagaagccactttcacttttgatggtggctttgatccaattcaggaatttggt

SEQ ID NO: 358287 - DNA, 1782 bp, Homo sapiens
  misc_feature (4)..(4): n is a, c, g, or t
  misc_feature (26)..(26): n is a, c, g, or t
cccngagttcatcctgagcaaaaacngaatgcagccaaccttgagtgacgcaagatacaaagagtcctggcgtaatcttcgtgctcaaggctacaagctgacaatagaagcgctccccttccaggctgcccgggcctctggagatatagccagtgatttgcgctacaagtcagacctgatcggcatgaagggcataggatggctggcgctgagatccccacagatggagagtgcaaagaaggctggagaactcatcagcgagaccaagtaccgtaaaaaaccagacagtatcaagttcaccacagtggttgactccccagacctggttcatgccaagaacagctatatgcactgcaatgagcgcatgtatagatctggagatgcagaatccctgcacagatacaccctgatccccgaccatcccgatttcacccgagctcgcctcaatgcgctgcatctgagtgacaaagtctacagaaactcctgggagcagacccgggctggcagttatgacttcaggctggatgccatccccttccagactgcccgggcatctagggagatcgccagtgatttccggtacaaagaggctttcctgcgggaccgaggcctgcagatcgggtaccgcagtgtcgacgatgacccaaggatgaagcatttcctcaacgttggcaggctccagagtgacaatgagtacaagaaggactttgccaagagtcggtcccagtttcacagcagcacagaccagcccggcctccttcaggccaagaggagccagcagctggccagtgatgtgcactacaggcagcccctgccccagcccacctgcgacccggagcagctgggcctcaggcatgctcagaaggcccaccagctgcagagtgatgtcaagtataaatcagacttgaacctgaccagaggtgttggctggacccctcctggctcctacaaagtggaaatggctcggcgggctgcggaactggccaacgcaaggggcctgggtctccagggagcttaccggggggcagaagcagtggaggctggagatcatcagagtggggaggtgaacccagatgccactgagattctgcacgtcaaaaagaagaaggccctgctgttgtgagccatgtccaccctgattcctgagaggccagagaggaagtttgttcaccagagacaggcttcagatggctttgatttcggcaagctggaatggcccaccagcccatcccagatcttcctttattaaaataataactctgaaagcagatggagaatgttgtatttgtggtcctctctgatacctagacgtggatggctgattctgttgagtgcctcgagtgtctgggctgaggaataaagatgtgatggtggttcccgctgatgctggggattctggagtctgcatttgcaggatgcctgtggtggaggcagtctctgtgaacactgattttctagaaggtacaattgggtaaggaaagcaaacatactatgttgtgttgattccatcattccttgggttaccaagggaggcagaagaagcctggtgatattgtgcaaatgctggtctgggaaggcccaggctgggtggcagttgtctctgcttagagtagggatagtctactgtgtggtcccctggaggctctggaggtgtccattgttggccatgaggcctcccggtgtcagggtgccaaggagagtgggctctgaggtccagaagacagtaccttagaagccactttcacttttgatggtggctttgatccaattcaggaatttggt

SEQ ID NO: 358288 - DNA, 3510 bp, Homo sapiens
  misc_feature (2720)..(2720): n is a, c, g, or t
ctagaaggtcagcaaaggaaagtggaagttggattctgaaagatcgaggtgcccataggaattttatggtcgtcggattttgaagacttgaactagactgggggttctccttgcatttcttgcctgttgcctatctttgtcctctctcttccggcttcgagatgaatgtgcagccctgttctaggtgtgggtatggggtttatcctgccgagaagatcagctgtatagatcagatatggcataaagcctgttttcactgtgaagtttgcaagatgatgctgtctgttaataactttgtgagtcaccagaaaaagccgtactgtcacgcccataaccctaagaacaacactttcaccagtgtctatcacactccattaaatctaaatgtgaggacatttccagaggccatcagtgggatccatgaccaagaagatggtgaacagtgtaaatcagtttttcattgggacatgaaatccaaggataaggaaggtgcacctaacaggcagccactggcaaatgagagagcctattggactggatatggggaagggaatgcttggtgcccaggagctctgccagaccccgaaattgtaaggatggttgaggctcgaaagtctcttggtgaggaatatacagaagactatgagcaacccaggggcaaggggagctttccagccatgatcacacctgcttatcaaagggccaagaaagccaaccagctggccagccaagtggagtataagagagggcatgatgaacgcatctccaggttctccacggtggcggatactcctgagcttctacggagcaaggctggggcacagcttcaaagtgatgtgagatacacagaggactatgaacaacaaagagggaaaggcagtttccctgcgatgatcacacccgcctatcagatagccaaaagagccaatgagctggcaagtgatgtgaggtaccatcaacaatatcaaaaagaaatgaggggaatggctggtccagccattggaactgagggcatcttgacaagggaatgtgcagaccaatatggccagggttacccggaggagtatgaggagcacaggggaaagggcagcttcccagctatgatcactccagcatatcagaacgccaagaaagctcacgaactcgctagtgacataaaatacaggcaggacttcaataagatgaaaggcgctgcacattatcactcgcttccagctcaagacaacttggttctcaaacaggctcagagcgtaaacaaactcgtgagtgaggtggagtataagaaggatctggaaagtagtagaggtcacagtatcaactactgtgaaacacctcaattcaggaacgtgagcaagatctcaaaatttaccagtgataataaatataaagaaaactaccagaaccacatgagaggccgctatgaaggagttggtatggacagacgcactctgcatgctatgaaagttggcagcctggcaagcaacgttgcctacaaagctgattataaacatgatattgtcgactacaactacccagccactctcacgccttcctatcaaacagctatgaaactggtgcccttgaaagatgccaattataggcagagcatcgacaagttgaagtacagctcggtgactgacaccccacagattgttcaagccaaaatcaatgcccagcagctgagtcatgtgaattaccgtgctgactatgagaaaaataagttgaattacacattgccccaggatgttcctcagctggtgaaggccaaaaccaatgccaaactcttcagtgaggttaagtataaagaaggctgggagaagacaaaggggaaaggatttgagatgaagctggatgccatgtctctgctggccgccaaagcctctggggagcttgctagcaatattaaatataaagaagaatatgaaaagacaaaaggcaaagccatgggaacagccgactctaggcttctgcactccctgcagattgctaagatgagcagtgaggttgaatataagaaaggctttgaagagagtaagacccggtttcacctgcccatggatatggtaaacatcaggcatgctaagaaggcccaaactctcgccagtgacctggactacaggaagaaactgcatgaatacactgtgctgcctgaagatatgaagactcagtgggccaagaaggcctatgggctccagagcgagctgcagtacaaggctgacctggcatggatgaagggagttgggtggctgacagaggggagtctcaacttggaacaagccaagaaggctggacagctggtcagcgagaaaaactaccggcagagggtcgatgagctgaagttcaccagcgtgaccgacagctcccagatggagcacgccaagaagagccaggagctacagagcggggtggcctacaaggcaggaaatgagcagtctgtccatcagtataccatcagcaaagacgagcctctcttcctgcaggcccgagccaatgctgcaaatctcagcgagaaactgtataagagcagctgggaaaaccagaaagcaaaagggtttgagctgcgtcttgattccttgaccttcctggcagccaaagccaagagggacctggctagcgaggtgaagtacaaggaggattatgagagatccagagggaagctcattggggcaaaagatgtacagggagattcgcaaatgagccactcactgcaaatgtccaanctgcagagtgagctggagtacaagaagggattcgaggacaccaaatcccaatgccacgtctccctggacatggtccacctcgtgcatgcccgcaaagctcagcatttagccacagacgtaggctacaagacagcggaacatcactttacggctttgcccacagacatgaaggtggaatgggccaagaaggcttatggcttacagagtgataagaagtaccgtcagcatccagatgctttgaagtttaccagtattaaagacactccggagatggtccaggccagaattagttatacccaagcagtggatagattatacagggaacaaggagaaaacataaagcatcattacacaccgactgctgacctccctgaagtcctgctggccaagctgaatgccatgaatatcagtgagacgcgttataaggaatcctggagcaaacttcgagatggtggctataaactgaggttggatgcccttccattccaagcagcaaaggcttctggtgaaatcataagtgattacaaatacaaagaggcatttgagaaaatgaaaggacagatgcttggttcccggagcttggaagatgatatcagccttgcacattcagtgtatgcgacctcactgcagagtgatgtgaattacaagaaaggctttgaacactcaaaggcgcagttccatctgccgttggacatggccgccctggtgcatgccaagaaggctcagaccctggccagcaatcaggactacaaacatccactgccccagtacacttccttggcagaagacc

SEQ ID NO: 358289 - DNA, 1579 bp, Homo sapiens
ctatgtgagaatgggcacatttatcttcctgttggagtattaattacaatagtgacaataccagtagccaccactcagtgggccagagctgatgccagacatgaagctcagtccttatctggttgaatcctcgcaacctcctatggggtgtagatcattctccaattttatcagatggggaaactgaggctcatggagaaactcagtaacaggcccatgaccacacagataggtctatttgaatccaaagcctgtgcctctaacccactcttgagcctcctgctgagaatgccctgggatggccccatatgtgaggctggtcctgggggaggtaggcacccatgatctgcctctgctcctctgacttgcagttccggtacaaagaggctttcctgcgggaccgaggcctgcagatcgggtaccgcagtgtcgacgatgacccaaggatgaagcatttcctcaacgttggcaggctccagagtgacaatgagtacaagaaggactttgccaagagtcggtcccagtttcacagcagcacagaccagcccggcctccttcaggccaagaggagccagcagctggccagtgatgtgcactacaggcagcccctgccccagcccacctgcgacccggagcagctgggcctcaggcatgctcagaaggcccaccagctgcagagtgatgtcaagtataaatcagacttgaacctgaccagaggtgttggctggacccctcctggctcctacaaagtggaaatggctcggcgggctgcggaactggccaacgcaaggggcctgggtctccagggagcttaccggggggcagaagcagtggaggctggagatcatcagagtggggaggtgaacccagatgccactgagattctgcacgtcaaaaagaagaaggccctgctgttgtgagccatgtccaccctgattcctgagaggccagagaggaagtttgttcaccagagacaggcttcagatggctttgatttcggcaagctggaatggcccaccagcccatcccagatcttcctttattaaaataataactctgaaagcagatggagaatgttgtatttgtggtcctctctgatacctagacgtggatggctgattctgttgagtgcctcgagtgtctgggctgaggaataaagatgtgatggtggttcccgctgatgctggggattctggagtctgcatttgcaggatgcctgtggtggaggcagtctctgtgaacactgattttctagaaggtacaattgggtaaggaaagcaaacatactatgttgtgttgattccatcattccttgggttaccaagggaggcagaagaagcctggtgatattgtgcaaatgctggtctgggaaggcccaggctgggtggcagttgtctctgcttagagtagggatagtctactgtgtggtcccctggaggctctggaggtgtccattgttggccatgaggcctcccggtgtcagggtgccaaggagagtgggctctgaggtccagaagacagtaccttagaagccactttcacttttgatggtggctttgatccaattcaggaatttggt

SEQ ID NO: 358290 - DNA, 2493 bp, Homo sapiens
ctagaaggtcagcaaaggaaagtggaagttggattctgaaagatcgaggtgcccataggaattttatggtcgtcggattttgaagacttgaactagactgggggttctccttgcatttcttgcctgttgcctatctttgtcctctctcttccggcttcgagatgaatgtgcagccctgttctaggtgtgggtatggggtttatcctgccgagaagatcagctgtatagatcagatatggcataaagcctgttttcactgtgaagtttgcaagatgatgctgtctgttaataactttgtgagtcaccagaaaaagccgtactgtcacgcccataaccctaagaacaacactttcaccagtgtctatcacactccattaaatctaaatgtgaggacatttccagaggccatcagtgggatccatgaccaagaagatggtgaacagtgtaaatcagtttttcattgggacatgaaatccaaggataaggaaggtgcacctaacaggcagccactggcaaatgagagagcctattggactggatatggggaagggaatgcttggtgcccaggagctctgccagaccccgaaattgtaaggatggttgaggctcgaaagtctcttggtgaggaatatacagaagactatgagcaacccaggggcaaggggagctttccagccatgatcacacctgcttatcaaagggccaagaaagccaaccagctggccagccaagtggagtataagagagggcatgatgaacgcatctccaggttctccacggtggcggatactcctgagcttctacggagcaaggctggggcacagcttcaaagtgatgtgagatacacagaggactatgaacaacaaagagggaaaggcagtttccctgcgatgatcacacccgcctatcagatagccaaaagagccaatgagctggcaagtgatgtgaggtaccatcaacaatatcaaaaagaaatgaggggaatggctggtccagccattggaactgagggcatcttgacaagggaatgtgcagaccaatatggccagggttacccggaggagtatgaggagcacaggggaaagggcagcttcccagctatgatcactccagcatatcagaacgccaagaaagctcacgaactcgctagtgacataaaatacaggcaggacttcaataagatgaaaggcgctgcacattatcactcgcttccagctcaagacaacttggttctcaaacaggctcagagcgtaaacaaactcgtgagtgaggtggagtataagaaggatctggaaagtagtagaggtcacagtatcaactactgtgaaacacctcaattcaggaacgtgagcaagatctcaaaatttaccagtgataataaatataaagaaaactaccagaaccacatgagaggccgctatgaaggagttggtatggacagacgcactctgcatgctatgaaagttggcagcctggcaagcaacgttgcctacaaagctgattataaacatgatattgtcgactacaactacccagccactctcacgccttcctatcaaacagctatgaaactggtgcccttgaaagatgccaattataggcagagcatcgacaagttgaagtacagctcggtgactgacaccccacagattgttcaagccaaaatcaatgcccagcagctgagtcatgtgaattaccgtgctgactatgagaaaaataagttgaattacacattgccccaggatgttcctcagctggtgaaggccaaaaccaatgccaaactcttcagtgaggttaagtataaagaaggctgggagaagacaaaggggaaaggatttgagatgaagctggatgccatgtctctgctggccgccaaagcctctggggagcttgctagcaatattaaatataaagaagaatatgaaaagacaaaaggcaaagccatgggaacagccgactctaggcttctgcactccctgcagattgctaagatgagcagtgaggttgaatataagaaaggctttgaagagagtaagacccggtttcacctgcccatggatatggtaaacatcaggcatgctaagaaggcccaaactctcgccagtgacctggactacaggaagaaactgcatgaatacactgtgctgcctgaagatatgaagactcagtgggccaagaaggcctatgggctccagagcgagctgcagtacaaggctgacctggcatggatgaagggagttgggtggctgacagaggggagtctcaacttggaacaagccaagaaggctggacagctggtcagcgaggtaacctgcactggggcctctggcctccagtagtcctcagcccctgacacatgcagggtgatctttgcctctaattccctttctctatcctcagatttattttggctgtgattcaaagtgggagtacttcatttcacacctgtagcacattctcagctaactttccacacccttaaacttactgaga

SEQ ID NO: 358291 - DNA, 306 bp, Homo sapiens
cagtttttcattgggacatgaaatccaaggataaggaaggtgcacctaacaggcagccactggcaaatgaggtgagagaaaagtgacaagtgggtttggaaaaagaaagaatgacatactatgtcaattgagtgtattattattattacttctagagaaaaccaagtaggtttcctttcacccagtttgtaattccagctgtctatggaagacctcaatcagcgtgtcctaatatcacctgaactctatcttccccagaccaggttcattgtcttccccttccaaccactgtatttctatcaccca

SEQ ID NO: 358292 - DNA, 848 bp, Homo sapiens
gaaggagcgagggaaactcatagggccccagagtgtaagagacgacccccggatccagcactgccggcgcatgggccagctgcagagcgagcttcagtacaggaggggggcgaccagcagccaagcccagttccatctgcccatggacatggtgcacctggtccatgccaagaatgcccaggctctggccagcgaccacgactacaggacacagtatcacaagttcacagcactgcccgaggacctgaagatggcctgggccaagaaagcccatgccctgcagagtgagttgcgctacaagtcagacctgatcggcatgaagggcataggatggctggcgctgagatccccacagatggagagtgcaaagaaggctggagaactcatcagcgagaccaagtaccgtaaaaaaccagacagtatcaagttcaccacagtggttgactccccagacctggttcatgccaagaacagctatatgcactgcaatgagcgcatgtatagatctggagatgcagaatccctgcacagatacaccctgatccccgaccatcccgatttcacccgagctcgcctcaatgcgctgcatctgagtgacaaagtctacagaaactcctgggagcagacccgggctggcagttatgacttcaggctggatgccatccccttccagactgcccgggcatctagggagatcgccagtgatgtaagacccccatgttctctcctgcggtcactgatgagtttttctctggttttcccagttctgttgaaaggcaaaccaccaggacctgtcaagattatctctctctctgcaccaaaactgaacatgtactgtattttaaatg

SEQ ID NO: 358293 - DNA, 3614 bp, Homo sapiens
  misc_feature (2720)..(2720): n is a, c, g, or t
ctagaaggtcagcaaaggaaagtggaagttggattctgaaagatcgaggtgcccataggaattttatggtcgtcggattttgaagacttgaactagactgggggttctccttgcatttcttgcctgttgcctatctttgtcctctctcttccggcttcgagatgaatgtgcagccctgttctaggtgtgggtatggggtttatcctgccgagaagatcagctgtatagatcagatatggcataaagcctgttttcactgtgaagtttgcaagatgatgctgtctgttaataactttgtgagtcaccagaaaaagccgtactgtcacgcccataaccctaagaacaacactttcaccagtgtctatcacactccattaaatctaaatgtgaggacatttccagaggccatcagtgggatccatgaccaagaagatggtgaacagtgtaaatcagtttttcattgggacatgaaatccaaggataaggaaggtgcacctaacaggcagccactggcaaatgagagagcctattggactggatatggggaagggaatgcttggtgcccaggagctctgccagaccccgaaattgtaaggatggttgaggctcgaaagtctcttggtgaggaatatacagaagactatgagcaacccaggggcaaggggagctttccagccatgatcacacctgcttatcaaagggccaagaaagccaaccagctggccagccaagtggagtataagagagggcatgatgaacgcatctccaggttctccacggtggcggatactcctgagcttctacggagcaaggctggggcacagcttcaaagtgatgtgagatacacagaggactatgaacaacaaagagggaaaggcagtttccctgcgatgatcacacccgcctatcagatagccaaaagagccaatgagctggcaagtgatgtgaggtaccatcaacaatatcaaaaagaaatgaggggaatggctggtccagccattggaactgagggcatcttgacaagggaatgtgcagaccaatatggccagggttacccggaggagtatgaggagcacaggggaaagggcagcttcccagctatgatcactccagcatatcagaacgccaagaaagctcacgaactcgctagtgacataaaatacaggcaggacttcaataagatgaaaggcgctgcacattatcactcgcttccagctcaagacaacttggttctcaaacaggctcagagcgtaaacaaactcgtgagtgaggtggagtataagaaggatctggaaagtagtagaggtcacagtatcaactactgtgaaacacctcaattcaggaacgtgagcaagatctcaaaatttaccagtgataataaatataaagaaaactaccagaaccacatgagaggccgctatgaaggagttggtatggacagacgcactctgcatgctatgaaagttggcagcctggcaagcaacgttgcctacaaagctgattataaacatgatattgtcgactacaactacccagccactctcacgccttcctatcaaacagctatgaaactggtgcccttgaaagatgccaattataggcagagcatcgacaagttgaagtacagctcggtgactgacaccccacagattgttcaagccaaaatcaatgcccagcagctgagtcatgtgaattaccgtgctgactatgagaaaaataagttgaattacacattgccccaggatgttcctcagctggtgaaggccaaaaccaatgccaaactcttcagtgaggttaagtataaagaaggctgggagaagacaaaggggaaaggatttgagatgaagctggatgccatgtctctgctggccgccaaagcctctggggagcttgctagcaatattaaatataaagaagaatatgaaaagacaaaaggcaaagccatgggaacagccgactctaggcttctgcactccctgcagattgctaagatgagcagtgaggttgaatataagaaaggctttgaagagagtaagacccggtttcacctgcccatggatatggtaaacatcaggcatgctaagaaggcccaaactctcgccagtgacctggactacaggaagaaactgcatgaatacactgtgctgcctgaagatatgaagactcagtgggccaagaaggcctatgggctccagagcgagctgcagtacaaggctgacctggcatggatgaagggagttgggtggctgacagaggggagtctcaacttggaacaagccaagaaggctggacagctggtcagcgagaaaaactaccggcagagggtcgatgagctgaagttcaccagcgtgaccgacagctcccagatggagcacgccaagaagagccaggagctacagagcggggtggcctacaaggcaggaaatgagcagtctgtccatcagtataccatcagcaaagacgagcctctcttcctgcaggcccgagccaatgctgcaaatctcagcgagaaactgtataagagcagctgggaaaaccagaaagcaaaagggtttgagctgcgtcttgattccttgaccttcctggcagccaaagccaagagggacctggctagcgaggtgaagtacaaggaggattatgagagatccagagggaagctcattggggcaaaagatgtacagggagattcgcaaatgagccactcactgcaaatgtccaanctgcagagtgagctggagtacaagaagggattcgaggacaccaaatcccaatgccacgtctccctggacatggtccacctcgtgcatgcccgcaaagctcagcatttagccacagacgtaggctacaagacagcggaacatcactttacggctttgcccacagacatgaaggtggaatgggccaagaaggcttatggcttacagagtgataaccatacagggcagatgtgaagtggatgaaaggcatgggctgggtcgccaccgggtcattaaatgtggagcaggcgaagaaggcaggagaactcattagcgagaagaagtaccgtcagcatccagatgctttgaagtttaccagtattaaagacactccggagatggtccaggccagaattagttatacccaagcagtggatagattatacagggaacaaggagaaaacataaagcatcattacacaccgactgctgacctccctgaagtcctgctggccaagctgaatgccatgaatatcagtgagacgcgttataaggaatcctggagcaaacttcgagatggtggctataaactgaggttggatgcccttccattccaagcagcaaaggcttctggtgaaatcataagtgattacaaatacaaagaggcatttgagaaaatgaaaggacagatgcttggttcccggagcttggaagatgatatcagccttgcacattcagtgtatgcgacctcactgcagagtgatgtgaattacaagaaaggctttgaacactcaaaggcgcagttccatctgccgttggacatggccgccctggtgcatgccaagaaggctcagaccctggccagcaatcaggactacaaacatccactgccccagtacacttccttggcagaagacc

SEQ ID NO: 358294 - DNA, 1809 bp, Homo sapiens
gaaggagcgagggaaactcatagggccccagagtgtaagagacgacccccggatccagcactgccggcgcatgggccagctgcagagcgagcttcagtacaggaggggggcgaccagcagccaagcccagttccatctgcccatggacatggtgcacctggtccatgccaagaatgcccaggctctggccagcgaccacgactacaggacacagtatcacaagttcacagcactgcccgaggacctgaagatggcctgggccaagaaagcccatgccctgcagagtgagttgcgctacaagtcagacctgatcggcatgaagggcataggatggctggcgctgagatccccacagatggagagtgcaaagaaggctggagaactcatcagcgagaccaagtaccgtaaaaaaccagacagtatcaagttcaccacagtggttgactccccagacctggttcatgccaagaacagctatatgcactgcaatgagaaagtctacagaaactcctgggagcagacccgggctggcagttatgacttcaggctggatgccatccccttccagactgcccgggcatctagggagatcgccagtgatttccggtacaaagaggctttcctgcgggaccgaggcctgcagatcgggtaccgcagtgtcgacgatgacccaaggatgaagcatttcctcaacgttggcaggctccagagtgacaatgagtacaagaaggactttgccaagagtcggtcccagtttcacagcagcacagaccagcccggcctccttcaggccaagaggagccagcagctggccagtgatgtgcactacaggcagcccctgccccagcccacctgcgacccggagcagctgggcctcaggcatgctcagaaggcccaccagctgcagagtgatgtcaagtataaatcagacttgaacctgaccagaggtgttggctggacccctcctggctcctacaaagtggaaatggctcggcgggctgcggaactggccaacgcaaggggcctgggtctccagggagcttaccggggggcagaagcagtggaggctggagatcatcagagtggggaggtgaacccagatgccactgagattctgcacgtcaaaaagaagaaggccctgctgttgtgagccatgtccaccctgattcctgagaggccagagaggaagtttgttcaccagagacaggcttcagatggctttgatttcggcaagctggaatggcccaccagcccatcccagatcttcctttattaaaataataactctgaaagcagatggagaatgttgtatttgtggtcctctctgatacctagacgtggatggctgattctgttgagtgcctcgagtgtctgggctgaggaataaagatgtgatggtggttcccgctgatgctggggattctggagtctgcatttgcaggatgcctgtggtggaggcagtctctgtgaacactgattttctagaaggtacaattgggtaaggaaagcaaacatactatgttgtgttgattccatcattccttgggttaccaagggaggcagaagaagcctggtgatattgtgcaaatgctggtctgggaaggcccaggctgggtggcagttgtctctgcttagagtagggatagtctactgtgtggtcccctggaggctctggaggtgtccattgttggccatgaggcctcccggtgtcagggtgccaaggagagtgggctctgaggtccagaagacagtaccttagaagccactttcacttttgatggtggctttgatccaattcaggaatttggt

SEQ ID NO: 358295 - DNA, 3329 bp, Homo sapiens
ctagaaggtcagcaaaggaaagtggaagttggattctgaaagatcgaggtgcccataggaattttatggtcgtcggattttgaagacttgaactagactgggggttctccttgcatttcttgcctgttgcctatctttgtcctctctcttccggcttcgagatgaatgtgcagccctgttctaggtgtgggtatggggtttatcctgccgagaagatcagctgtatagatcagatatggcataaagcctgttttcactgtgaagtttgcaagatgatgctgtctgttaataactttgtgagtcaccagaaaaagccgtactgtcacgcccataaccctaagaacaacactttcaccagtgtctatcacactccattaaatctaaatgtgaggacatttccagaggccatcagtgggatccatgaccaagaagatggtgaacagtgtaaatcagtttttcattgggacatgaaatccaaggataaggaaggtgcacctaacaggcagccactggcaaatgagagagcctattggactggatatggggaagggaatgcttggtgcccaggagctctgccagaccccgaaattgtaaggatggttgaggctcgaaagtctcttggtgaggaatatacagaagactatgagcaacccaggggcaaggggagctttccagccatgatcacacctgcttatcaaagggccaagaaagccaaccagctggccagccaagtggagtataagagagggcatgatgaacgcatctccaggttctccacggtggcggatactcctgagcttctacggagcaaggctggggcacagcttcaaagtgatgtgagatacacagaggactatgaacaacaaagagggaaaggcagtttccctgcgatgatcacacccgcctatcagatagccaaaagagccaatgagctggcaagtgatgtgaggtaccatcaacaatatcaaaaagaaatgaggggaatggctggtccagccattggaactgagggcatcttgacaagggaatgtgcagaccaatatggccagggttacccggaggagtatgaggagcacaggggaaagggcagcttcccagctatgatcactccagcatatcagaacgccaagaaagctcacgaactcgctagtgacataaaatacaggcaggacttcaataagatgaaaggcgctgcacattatcactcgcttccagctcaagacaacttggttctcaaacaggctcagagcgtaaacaaactcgtgagtgaggtggagtataagaaggatctggaaagtagtagaggtcacagtatcaactactgtgaaacacctcaattcaggaacgtgagcaagatctcaaaatttaccagtgataataaatataaagaaaactaccagaaccacatgagaggccgctatgaaggagttggtatggacagacgcactctgcatgctatgaaagttggcagcctggcaagcaacgttgcctacaaagctgattataaacatgatattgtcgactacaactacccagccactctcacgccttcctatcaaacagctatgaaactggtgcccttgaaagatgccaattataggcagagcatcgacaagttgaagtacagctcggtgactgacaccccacagattgttcaagccaaaatcaatgcccagcagctgagtcatgtgaattaccgtgctgactatgagaaaaataagttgaattacacattgccccaggatgttcctcagctggtgaaggccaaaaccaatgccaaactcttcagtgaggttaagtataaagaaggctgggagaagacaaaggggaaaggatttgagatgaagctggatgccatgtctctgctggccgccaaagcctctggggagcttgctagcaatattaaatataaagaagaatatgaaaagacaaaaggcaaagccatgggaacagccgactctaggcttctgcactccctgcagattgctaagatgagcagtgaggttgaatataagaaaggctttgaagagagtaagacccggtttcacctgcccatggatatggtaaacatcaggcatgctaagaaggcccaaactctcgccagtgacctggactacaggaagaaactgcatgaatacactgtgctgcctgaagatatgaagactcagtgggccaagaaggcctatgggctccagagcgagctgcagtacaaggctgacctggcatggatgaagggagttgggtggctgacagaggggagtctcaacttggaacaagccaagaaggctggacagctggtcagcgagaaaaactaccggcagagggtcgatgagctgaagttcaccagcgtgaccgacagctcccagatggagcacgccaagaagagccaggagctacagagcggggtggcctacaaggcaggaaatgagcagtctgtccatcagtataccatcagcaaagacgagcctctcttcctgcaggcccgagccaatgctgcaaatctcagcgagaaactgtataagagcagctgggaaaaccagaaagcaaaagggtttgagctgcgtcttgattccttgaccttcctggcagccaaagccaagagggacctggctagcgaggtgaagtacaaggaggattatgagagatccagagggaagctcattggggcaaaagatgtccaccctgattcctgagaggccagagaggaagtttgttcaccagagacaggcttcagatggctttgatttcggcaagctggaatggcccaccagcccatcccagatcttcctttattaaaataataactctgaaagcagatggagaatgttgtatttgtggtcctctctgatacctagacgtggatggctgattctgttgagtgcctcgagtgtctgggctgaggaataaagatgtgatggtggttcccgctgatgctggggattctggagtctgcatttgcaggatgcctgtggtggaggcagtctctgtgaacactgattttctagaaggtacaattgggtaaggaaagcaaacatactatgttgtgttgattccatcattccttgggttaccaagggaggcagaagaagcctggtgatattgtgcaaatgctggtctgggaaggcccaggctgggtggcagttgtctctgcttagagtagggatagtctactgtgtggtcccctggaggctctggaggtgtccattgttggccatgaggcctcccggtgtcagggtgccaaggagagtgggctctgaggtccagaagacagtaccttagaagccactttcacttttgatggtggctttgatccaattcaggaatttggt

SEQ ID NO: 358296 - DNA, 2991 bp, Homo sapiens
  misc_feature (2097)..(2097): n is a, c, g, or t
actcagggcagagcctggctgctgggcagaagggcacttgggcgggctgcttcagagagggccattcggtgtcctggcccacagagagagtaaacagtgagagaccaagagagcaaaccagagagatagggagggggaatgcaaggggtccctgggggactcaggggtcccagtggagaatgagaggcaggccccccgtggtgggccggggacctggctgccagaggaccgggctggtgaggaggcgaggatgtggactttcgtcacccagctgttggtcacgctggtgctgctgagcttcttcctggtcagctgtcagaacgtgatgcacattgtcagggggtccctgtgctttgtgctaaagcacatccaccaggagctggacaaggagctgggggagagcgagggcctcagtgacgacgaggagaccatctcacccagggtggtccggcggcgggtcttcctgaaggggaatgagtttcagaatattccaggggagcaggtgacagaggagcaattcacggatgagcagggcaacattgtcaccaagaagatcattcgcaaggtggttcgacagatagacttgtccagcgccgatgccgcccaggagcacgaggaggtggagctgagagggagtggcctacagccggacctgatagagggcaggaagggggcgcagatagtgaagcgggccagcctgaaaagggggaaacagtgaccccgagccgctctccttggagtagcctctcgggaggatcacacctcgacacccaacccctgaaccccacacactctctgccatgcacacaggaggagagctggacctgagggccaccgcagcggtgcacacattcctctgggctgacggcatgacctctgtaagggactcctgctagtcccctcttggcatgaatgactgactgtagacgcatgacctccaggcttcaatcctgcctcttgcaatgacagctgatctgtcggaaccaggacacaaaagcagcaagaagcggggagagagagggatagaaaacaagcgcaggagagcctgcgaacgcaaaagtgaatgagggctttttgtggctggggatgggttttggttttggggttttttttttaaattgttttgacttcgtacagggtactttttcccaacctcatctgtcagaaatccatgtgggcttcctggaaagaaaaaaaaaaaaagagagtatgacccgtttcacctgcccatggatatggtaaacatcaggcatgctaagaaggcccaaactctcgccagtgacctggactacaggaagaaactgcatgaatacattaaatataaagaagaatatgaaaagacaaaaggcaaagccatgggaacagccgactctaggcttctgcactccctgcagattgctaagatgagcagtgaggttgaatataagaaaggctttgaagagagtaagacccggtttcacctgcccataaactctcgccagtgacctggactacaggaagaaactgcatgaatacactgtgctgcctgaagatatgaagactcagtgggccaagaaggcctatgggctccagagcgagctgcagtacaaggctgacctggcatggatgaagggagttgggtggctgacagaggggagtctcaacttggaacaagccaagaaggctggacagctggtcagcgagaaaaactaccggcagagggtcgatgagctgaagttcaccagcgtgaccgacagctcccagatggagcacgccaagaagagccaggagctacagagcggggtggcctacaaggcaggaaatgagcagtctgtccatcagtataccatcagcaaagacgagcctctcttcctgcaggcccgagccaatgctgcaaatctcagcgagaaactgtataagagcagctgggaaaaccagaaagcaaaagggtttgagctgcgtcttgattccttgaccttcctggcagccaaagccaagagggacctggctagcgaggtgaagtacaaggaggattatgagagatccagagggaagctcattggggcaaaagatgtacagggagattcgcaaatgagccactcactgcaaatgtccaanctgcagagtgagctggagtacaagaagggattcgaggacaccaaatcccaatgccacgtctccctggacatggtccacctcgtgcatgcccgcaaagctcagcatttagccacagacgtaggctacaagacagcggaacatcactttacggctttgcccacagacatgaaggtggaatgggccaagaaggcttatggcttacagagtgataaccatacagggcagatgtgaagtggatgaaaggcatgggctgggtcgccaccgggtcattaaatgtggagcaggcgaagaaggcaggagaactcattagcgagaagaagtaccgtcagcatccagatgctttgaagtttaccagtattaaagacactccggagatggtccaggccagaattagttatacccaagcagtggatagattatacagggaacaaggagaaaacataaagcatcattacacaccgactgctgacctccctgaagtcctgctggccaagctgaatgccatgaatatcagtgagacgcgttataaggaatcctggagcaaacttcgagatggtggctataaactgaggttggatgcccttccattccaagcagcaaaggcttctggtgaaatcataagtgattacaaatacaaagaggcatttgagaaaatgaaaggacagatgcttggttcccggagcttggaagatgatatcagccttgcacattcagtgtatgcgacctcactgcagagtgatgtgaattacaagaaaggctttgaacactcaaaggcgcagttccatctgccgttggacatggccgccctggtgcatgccaagaaggctcagaccctggccagcaatcaggactacaaacatccactgccccagtacacttccttggcagaagacc

SEQ ID NO: 358297 - DNA, 235 bp, Homo sapiens
aataatcataagtattcgttttatggaacaattggaccagtttcagaatgtttccatgagctgagcagacaacattaggggttctttttctttcttttttaaagtctgttaaaccttccattttttttttttcccgagacagagtctctctctgtcacccaggctggggggcagtggcgtggtcttggctgactgtaacctccgcctcctggattcaaatgattctcttgcctct

SEQ ID NO: 358298 - DNA, 314 bp, Homo sapiens
cagaaacgcattccccagaacctggtgtttcatgcccggtaacaacataattaccatcataaagataaatcgttaccggagatccagacagccacccattttcatagctgcgaaagccacagtgaaacatctaagtccagtcaccataatcgtaaagccaccaagaactactagcagacgacgtcaacagaatgattaataaacatcttatttggttattttcagagcatataactccagaactaacttgatcagcttctcttactaaaatgtgcaaaaattttttaaatttctttttccttagggttgtcgct

SEQ ID NO: 358299 - DNA, 385 bp, Homo sapiens
cagactagcagctcagaggcagtttggcactatttatacttacttttaactatatgcaaattaaggggcagtttatgcaggaatttctaggatgaaggtggtaacttctaggttgttgggttgttgccatggaaaggcatggtaacttccgggtgttgccctggcaaatggtaactgacatggtgccctggtgagtgagtcttatggggatgtgcttcgtcctaacctgttttagctagtcctcaatttggtccggtgtcaaccccaacctccagagtcaagtcccgcctcctacttcaaagtagtactataattttgactctttttaaaattcgtaattgctagaatacttataatttcccccttatttactatttgtaggtag

SEQ ID NO: 358300 - DNA, 605 bp, Homo sapiens
ttgatacagatttagattagggtgataatcacttgcttttggagtctagggtggaagattcagttccatgtgagttctgttcccagcaacagttcttaagtttccttttttttcctgccctatatcattgaatctggtgtatctcggtggttatctactgtgcgagttattgggaatttagaatactagtttctcacttgtaaattagatgttttctgtttatttaactatttggagttgggggagcacaggataacttatataaccaagggagtctagttcagctccagatcatcttttcagatacctgatgccattggtgagcaggtcgtggttccatcactgtgctcacagtttgcgttactctgctggttccattccagccacatcttatctgcattcagcctgtgttggatgtggaccatagtgttggtgcttgcccttagggaaagtgcctctgttggtgtttgacaatgatggtcagtggcatccttcatgccagtcctgggaagaaaaacagagtaaggaaagaaaaagaaaagatttagaagaggagagaacatcacaagtggaagacggaggtgggagaaggatctgacagggaa

SEQ ID NO: 358301 - DNA, 3155 bp, Homo sapiens
gccccctcttctcccctcccccaagccagcacctggtgccccggcgggtcgtgcggcgcggcgctccgcgagagctggcggtcaccatggcaatgcgggagctggtggaggccgaatgcgggggtgccaacccgctcatgaagctcgccgggcacttcacccaggacaaggcccttcggcaggagggattgaggcctggcccctggccccccggagccccggcctctgaggcagcctccaagcctttgggagtagcttctgaagatgagttggtggctgaattcctgcaggaccagaatgcaccccttgtgtcccgtgcccctcagaccttcaagatggatgacctcctggctgagatgcagcagattgagcagtcaaacttccgccaggctccccagagagcccctggtgtggcagacttggccttgtctgagaactgggcccaggagtttcttgcagctggagatgctgtggatgtaactcaggattataatgagactgactggtcccaagaattcatctctgaagttacagaccccttgtctgtgtcccctgcccgctgggctgaggaatatttggagcaatcagaggagaagctgtggctgggagaacctgagggaacagccaccgatcgctggtatgatgaatatcatcctgaggaggatctgcagcacacggccagtgactttgtggccaaagtggatgaccccaaattggctaattctgagggtacatcagatgcctgggttgaccagttcacaagaccagtaaacacatctgcccttgatatggagtttgaacgagccaagtcagctatagagtctgatgtcgatttctgggacaagttgcaggcagagttggaggagatggcaaaacgggatgctgaggcccacccctggctttctgactatgatgaccttacgtcagctacctatgataaggggtaccagtttgaggaggagaaccccttgcgtgatcaccctcagccttttgaagaagggctgcggcgccttcaggagggggacctgccaaatgctgtgctgctttttgaggcagctgtgcagcaggatcctaagcacatggaagcttggcagtatctgggtaccacccaggcagagaatgaacaagaactattagccatcagtgcattgcggaggtgtctggagctaaagccagataaccagacagcactgatggcgctggctgtgagcttcaccaacgagtccctgcagcgacaggcctgtgaaaccctacgagactggctgcggtacacaccagcctatgcccatctggtgacacctgctgaagaaggggctggtggggcaggactgggccccagcaagcgtatcctgggatctctcttgtctgactccctgtttcttgaagtgaaagagctcttcctggcagctgtgcggctggaccctacctccattgaccctgatgtgcagtgtggcttgggagtccttttcaacctgagtggggagtatgacaaggccgtggactgcttcacagctgccctcagcgttcgtcccaatgactatttgctgtggaataagctaggcgccaccctggccaatggaaaccagagtgaagaagcagtagctgcgtaccgccgggccctcgagctccagcctggctatatccggtcccgctataacctgggcatcagctgcatcaacctcggggctcaccgggaggctgtggagcactttctggaggccctgaacatgcagaggaaaagccggggcccccggggtgaaggaggtgccatgtcggagaacatctggagcaccctgcgtttggcattgtctatgttaggccagagcgatgcctatggggcagccgacgcgcgggatctgtccaccctcctaactatgtttggcctgccccagtgacagtgggacgggctgccctgtgagtgtccacctggagggatccccgctttggatgtgattccctctccccaaatgggcctaccaagggggcgggctgatgaccataagcggtacggcctttcaggagctgcctcaacgtaggggtgggtagtctgtgttctagttcctacataattgtaggaaaatgagctgtgtcatctctgagtcccttggtaattcaagggctgtacatccagctacagatctctctgctcatcatgccctttcttggtgctgctttttgggtaggaccccacgatttagggtaactgttatcatcagctgccatttctgatagggtctaccacatctgtaatgtctgtcctttcccccacttttactgggaattgatagtccagcttccttgggcagtgtaagtaggaggttcatctgctgtgcgcctctaatgtctgtctggatgggatgtgttaggagttggcctgttgggttgaattgttgatttggctgagcagagctgagttttggtaggagtgctcatggttctgtcattcttggacctctcctggctgagctctgattccctgtgagcacgatgctgatgcaatagtcctgtgtcatcactgcagcggtcctcaggagctgccagggccaattgctacagagtgtctgggtgtgtggcataggaggaaggtttgcttgtgaaatgaggctgggtgggagcggggagggactagatcagaagagatcaagggctgtattcaggaacgttggtgggaggacagagcaagtgggaagggggtatggtgagtgcggcaatccctcatcctcttagaagcacctgtgaatgggaattgagccaactgttatagaaaattggttcagaaagtgcaatcttgccagatttctagcaaataggttcagtgttaccataagcctttgctgtacttcttgaaatgtttctaggggagagcattggaaaatccccttcccccatctagatcgaaggaagatgagggagcagcttggattcttctcagttgtcccctgcatggggagatacactaacccccagaaatgactgctaagcctcttgccttgtctttagtagctaatgatcagagagattttttttttaaactaccatggtcccaggattccatcctgaaatttatttttctttgtatgaatatgtgtaaatgatttaaaaataaaactgtaaaatatttgtacgaagaataaatggaactgatgtgggtatga

SEQ ID NO: 358302 - DNA, 613 bp, Homo sapiens
ggctgttttcccactgtcccttcttcgggcagtgtcgccgtccagcctggttgttgaagcgtccccgtggtcccccggggtccaggcccctttgtggaggcagctgctggcccccagcccatgggaccgtagtcgcggaggcctctgcagaggcgcaggctggaagcggtggcctttgaggggggcggcaggagagagtaccgacctccctcgaactcctggcagagagagctggcggtcaccatggcaatgcgggagctggtggaggccgaatgcgggggtgccaacccgctcatgaagctcgccgggcacttcacccaggacaaggcccttcggcaggagggattgaggcctggcccctggccccccggagccccggcctctgaggcattcttgaggtggaaagcccaggtgcagcctctgaggcagtgagtgttcttgaggtggaaagcccaggtggtggtggtctgaggtggaggggctgtttgcacatcttggtataactgctttctctattgtgttgcaaatcatagtagttaccacttactgagcgtttataaacactagaaaaccctgtgcacctttaaataaatgcaaccattttatagatgaa

SEQ ID NO: 358303 - DNA, 459 bp, Homo sapiens
gctgccatccctgggagctggaaccaggcaatgttcgggggaggcaggggacaggctggaaccgggaggctgtggagcactttctggaggccctgaacatgcagaggaaaagccggggcccccggggtgaaggaggtgccatgtcggagaacatctggagcaccctgcgtttggcattgtctatgttaggccagagcgatgcctatggggcagccgacgcgcgggatctgtccaccctcctaactatgtttggcctgccccagtgacagtgggacgggctgccctaaatatacagcctctgcagacactgcttctgaatgaacgggctggagtttccttgggatcctgaactcatattggattctctacctaccatcttggacaattcatgtaggaaaacaaatcctcatttgttcaaacaatagatgaaaattattaaagttttgacacatattaaat

SEQ ID NO: 358304 - DNA, 3135 bp, Homo sapiens
gccccctcttctcccctcccccaagccagcacctggtgccccggcgggtcgtgcggcgcggcgctccgcgagagctggcggtcaccatggcaatgcgggagctggtggaggccgaatgcgggggtgccaacccgctcatgaagctcgccgggcacttcacccaggacaaggcccttcggcaggagggattgaggcctggcccctggccccccggagccccggcctctgaggcagcctccaagcctttgggagtagcttctgaagatgagttggtggctgaattcctgcaggaccagaatgcaccccttgtgtcccgtgcccctcagaccttcaagatggatgacctcctggctgagatgcagcagattgagcagtcaaacttccgccaggctccccagagagcccctggtgtggcagacttggccttgtctgagaactgggcccaggagtttcttgcagctggagatgctgtggatgtaactcaggattataatgagactgactggtcccaagaattcatctctgaagttacagaccccttgtctgtgtcccctgcccgctgggctgaggaatatttggagcaatcagaggagaagctgtggctgggagaacctgagggaacagccaccgatcgctggtatgatgaatatcatcctgaggaggatctgcagcacacggccagtgactttgtggccaaagtggatgaccccaaattggctaattctgagggtacatcagatgcctgggttgaccagttcacaagaccagtaaacacatctgcccttgatatggagtttgaacgagccaagtcagctatagagtctgatgtcgatttctgggacaagttgcaggcagagttggaggagatggcaaaacgggatgctgaggcccacccctggctttctgactatgatgaccttacgtcagctacctatgataaggggtaccagtttgaggaggagaaccccttgcgtgatcaccctcagccttttgaagaagggctgcggcgccttcaggagggggacctgccaaatgctgtgctgctttttgaggcagctgtgcagcaggatcctaagcacatggaagcttggcagtatctgggtaccacccaggcagagaatgaacaagaactattagccatcagtgcattgcggaggtgtctggagctaaagccagataaccagacagcactgatggcgctggctgtgagcttcaccaacgagtccctgcagcgacaggcctgtgaaaccctacgagactggctgcggtacacaccagcctatgcccatctggtgacacctgctgaagaaggggctggtggggcaggactgggccccagcaagcgtatcctgggatctctcttgtctgactccctgtttcttgaagtgaaagagctcttcctggcagctgtgcggctggaccctacctccattgaccctgatgtgcagtgtggcttgggagtccttttcaacctgagtggggagtatgacaaggccgtggactgcttcacagctgccctcagcgttcgtcccaatgactatttgctgtggaataagctaggcgccaccctggccaatggaaaccagagtgaagaagcagtagctgcgtaccgccgggccctcgagctccagcctggctatatccggtcccgctataacctgggcatcagctgcatcaacctcggggctcaccgggaggctgtggagcactttctggaggccctgaacatgcagaggaaaagccggggcccccggggtgaaggaggtgccatgtcggagaacatctggagcaccctgcgtttggcattgtctatgttaggccagagcgatgcctatggggcagccgacgcgcgggatctgtccaccctcctaactatgtttggcctgccccagtgacagtgggacgggctgccctgtgagtgtccacctggagggatccccgctttggatgtgattccctctccccaaatgggcctaccaagggggcgggctgatgaccataagcggtacggcctttcaggagctgcctcaacgtaggggtgggtagtctgtgttctagttcctacataattgtaggaaaatgagctgtgtcatctctgagtcccttggtaattcaagggctgtacatccagctacagatctctctgctcatcatgccctttcttggtgctgctttttgggtaggaccccacgatttagggtaactgttatcatcagctgccatttctgatagggtctaccacatctgtaatgtctgtcctttcccccacttttactgggaattgatagtccagcttccttgggcagtgtaagtaggaggttcatctgctgtgcgcctctaatgtctgtctggatgggatgtgttaggagttggcctgttgggttgaattgttgatttggctgagcagagctgagttttggtaggagtgctcatggttctgtcattcttggacctctcctggctgagctctgattccctgtgagcacgatgctgatgcaatagtcctgtgtcatcactgcagcggtcctcaggagctgccagggccaattgctacagagtgtctgggtgtgtggcataggaggaaggtttgcttgtgaaatgaggctgggtgggagcggggagggactagatcagaagagatcaagggctgtattcaggaacgttggtgggaggacagagcaagtgggaagggggtatggtgagtgcggcaatccctcatcctcttagaagcacctgtgaatgggaattgagccaactgttatagaaaattggttcagaaagtgcaatcttgccagatttctagcaaataggttcagtgttaccataagcctttgctgtacttcttgaaatgtttctaggggagagcattggaaaatccccttcccccatctagatcgaaggaagatgagggagcagcttggattcttctcagttgtcccctgcatggggagatacactaacccccagaaatgactgctaagcctcttgccttgtctttagtagctaatgatcagagagattttttttttaaactaccatggtcccaggattccatcctgaaatttatttttctttgtatgaatatgtgtaaatgatttaaaaataaaactgtaaaatatttgtacgaagaataaa

SEQ ID NO: 358305 - DNA, 3401 bp, Homo sapiens
  misc_feature (36)..(36): n is a, c, g, or t
  misc_feature (101)..(101): n is a, c, g, or t
  misc_feature (169)..(169): n is a, c, g, or t
acagatgaatgggagagccagccgagaaatctaaantgcctcgcatccccagcagtttgctaaaggaggtagtggctggacaggttaagacaccctcccanccccccagcctcctgcagtactcagggtaaccattaggcaccttattctgcagccaccagtggggcantgttgccaagagggtaccaagaggagaatcctgcagccttgagctgtgcaactgataacgaactacagatgggatggacgccatcttacctgatgctggccagtatatcatgacatggagaactccccgctattcctgagaaacttggactttgactcaacagaaagagagctggcggtcaccatggcaatgcgggagctggtggaggccgaatgcgggggtgccaacccgctcatgaagctcgccgggcacttcacccaggacaaggcccttcggcaggagggattgaggcctggcccctggccccccggagccccggcctctgaggcagcctccaagcctttgggagtagcttctgaagatgagttggtggctgaattcctgcaggaccagaatgcaccccttgtgtcccgtgcccctcagaccttcaagatggatgacctcctggctgagatgcagcagattgagcagtcaaacttccgccaggctccccagagagcccctggtgtggcagacttggccttgtctgagaactgggcccaggagtttcttgcagctggagatgctgtggatgtaactcaggattataatgagactgactggtcccaagaattcatctctgaagttacagaccccttgtctgtgtcccctgcccgctgggctgaggaatatttggagcaatcagaggagaagctgtggctgggagaacctgagggaacagccaccgatcgctggtatgatgaatatcatcctgaggaggatctgcagcacacggccagtgactttgtggccaaagtggatgaccccaaattggctaattctgagggtacatcagatgcctgggttgaccagttcacaagaccagtaaacacatctgcccttgatatggagtttgaacgagccaagtcagctatagagtctgatgtcgatttctgggacaagttgcaggcagagttggaggagatggcaaaacgggatgctgaggcccacccctggctttctgactatgatgaccttacgtcagctacctatgataaggggtaccagtttgaggaggagaaccccttgcgtgatcaccctcagccttttgaagaagggctgcggcgccttcaggagggggacctgccaaatgctgtgctgctttttgaggcagctgtgcagcaggatcctaagcacatggaagcttggcagtatctgggtaccacccaggcagagaatgaacaagaactattagccatcagtgcattgcggaggtgtctggagctaaagccagataaccagacagcactgatggcgctggctgtgagcttcaccaacgagtccctgcagcgacaggcctgtgaaaccctacgagactggctgcggtacacaccagcctatgcccatctggtgacacctgctgaagaaggggctggtggggcaggactgggccccagcaagcgtatcctgggatctctcttgtctgactccctgtttcttgaagtgaaagagctcttcctggcagctgtgcggctggaccctacctccattgaccctgatgtgcagtgtggcttgggagtccttttcaacctgagtggggagtatgacaaggccgtggactgcttcacagctgccctcagcgttcgtcccaatgactatttgctgtggaataagctaggcgccaccctggccaatggaaaccagagtgaagaagcagtagctgcgtaccgccgggccctcgagctccagcctggctatatccggtcccgctataacctgggcatcagctgcatcaacctcggggctcaccgggaggctgtggagcactttctggaggccctgaacatgcagaggaaaagccggggcccccggggtgaaggaggtgccatgtcggagaacatctggagcaccctgcgtttggcattgtctatgttaggccagagcgatgcctatggggcagccgacgcgcgggatctgtccaccctcctaactatgtttggcctgccccagtgacagtgggacgggctgccctgtgagtgtccacctggagggatccccgctttggatgtgattccctctccccaaatgggcctaccaagggggcgggctgatgaccataagcggtacggcctttcaggagctgcctcaacgtaggggtgggtagtctgtgttctagttcctacataattgtaggaaaatgagctgtgtcatctctgagtcccttggtaattcaagggctgtacatccagctacagatctctctgctcatcatgccctttcttggtgctgctttttgggtaggaccccacgatttagggtaactgttatcatcagctgccatttctgatagggtctaccacatctgtaatgtctgtcctttcccccacttttactgggaattgatagtccagcttccttgggcagtgtaagtaggaggttcatctgctgtgcgcctctaatgtctgtctggatgggatgtgttaggagttggcctgttgggttgaattgttgatttggctgagcagagctgagttttggtaggagtgctcatggttctgtcattcttggacctctcctggctgagctctgattccctgtgagcacgatgctgatgcaatagtcctgtgtcatcactgcagcggtcctcaggagctgccagggccaattgctacagagtgtctgggtgtgtggcataggaggaaggtttgcttgtgaaatgaggctgggtgggagcggggagggactagatcagaagagatcaagggctgtattcaggaacgttggtgggaggacagagcaagtgggaagggggtatggtgagtgcggcaatccctcatcctcttagaagcacctgtgaatgggaattgagccaactgttatagaaaattggttcagaaagtgcaatcttgccagatttctagcaaataggttcagtgttaccataagcctttgctgtacttcttgaaatgtttctaggggagagcattggaaaatccccttcccccatctagatcgaaggaagatgagggagcagcttggattcttctcagttgtcccctgcatggggagatacactaacccccagaaatgactgctaagcctcttgccttgtctttagtagctaatgatcagagagattttttttttaaactaccatggtcccaggattccatcctgaaatttatttttctttgtatgaatatgtgtaaatgatttaaaaataaaactgtaaaatatttgtacgaagaataaa

SEQ ID NO: 358306 - DNA, 3292 bp, Homo sapiens
ggctgttttcccactgtcccttcttcgggcagtgtcgccgtccagcctggttgttgaagcgtccccgtggtcccccggggtccaggcccctttgtggaggcagctgctggcccccagcccatgggaccgtagtcgcggaggcctctgcagaggcgcaggctggaagcggtggcctttgaggggggcggcaggagagagtaccgacctccctcgaactcctggcagagagagctggcggtcaccatggcaatgcgggagctggtggaggccgaatgcgggggtgccaacccgctcatgaagctcgccgggcacttcacccaggacaaggcccttcggcaggagggattgaggcctggcccctggccccccggagccccggcctctgaggcagcctccaagcctttgggagtagcttctgaagatgagttggtggctgaattcctgcaggaccagaatgcaccccttgtgtcccgtgcccctcagaccttcaagatggatgacctcctggctgagatgcagcagattgagcagtcaaacttccgccaggctccccagagagcccctggtgtggcagacttggccttgtctgagaactgggcccaggagtttcttgcagctggagatgctgtggatgtaactcaggattataatgagactgactggtcccaagaattcatctctgaagttacagaccccttgtctgtgtcccctgcccgctgggctgaggaatatttggagcaatcagaggagaagctgtggctgggagaacctgagggaacagccaccgatcgctggtatgatgaatatcatcctgaggaggatctgcagcacacggccagtgactttgtggccaaagtggatgaccccaaattggctaattctgagggtacatcagatgcctgggttgaccagttcacaagaccagtaaacacatctgcccttgatatggagtttgaacgagccaagtcagctatagagtctgatgtcgatttctgggacaagttgcaggcagagttggaggagatggcaaaacgggatgctgaggcccacccctggctttctgactatgatgaccttacgtcagctacctatgataaggggtaccagtttgaggaggagaaccccttgcgtgatcaccctcagccttttgaagaagggctgcggcgccttcaggagggggacctgccaaatgctgtgctgctttttgaggcagctgtgcagcaggatcctaagcacatggaagcttggcagtatctgggtaccacccaggcagagaatgaacaagaactattagccatcagtgcattgcggaggtgtctggagctaaagccagataaccagacagcactgatggcgctggctgtgagcttcaccaacgagtccctgcagcgacaggcctgtgaaaccctacgagactggctgcggtacacaccagcctatgcccatctggtgacacctgctgaagaaggggctggtggggcaggactgggccccagcaagcgtatcctgggatctctcttgtctgactccctgtttcttgaagtgaaagagctcttcctggcagctgtgcggctggaccctacctccattgaccctgatgtgcagtgtggcttgggagtccttttcaacctgagtggggagtatgacaaggccgtggactgcttcacagctgccctcagcgttcgtcccaatgactatttgctgtggaataagctaggcgccaccctggccaatggaaaccagagtgaagaagcagtagctgcgtaccgccgggccctcgagctccagcctggctatatccggtcccgctataacctgggcatcagctgcatcaacctcggggctcaccgggaggctgtggagcactttctggaggccctgaacatgcagaggaaaagccggggcccccggggtgaaggaggtgccatgtcggagaacatctggagcaccctgcgtttggcattgtctatgttaggccagagcgatgcctatggggcagccgacgcgcgggatctgtccaccctcctaactatgtttggcctgccccagtgacagtgggacgggctgccctgtgagtgtccacctggagggatccccgctttggatgtgattccctctccccaaatgggcctaccaagggggcgggctgatgaccataagcggtacggcctttcaggagctgcctcaacgtaggggtgggtagtctgtgttctagttcctacataattgtaggaaaatgagctgtgtcatctctgagtcccttggtaattcaagggctgtacatccagctacagatctctctgctcatcatgccctttcttggtgctgctttttgggtaggaccccacgatttagggtaactgttatcatcagctgccatttctgatagggtctaccacatctgtaatgtctgtcctttcccccacttttactgggaattgatagtccagcttccttgggcagtgtaagtaggaggttcatctgctgtgcgcctctaatgtctgtctggatgggatgtgttaggagttggcctgttgggttgaattgttgatttggctgagcagagctgagttttggtaggagtgctcatggttctgtcattcttggacctctcctggctgagctctgattccctgtgagcacgatgctgatgcaatagtcctgtgtcatcactgcagcggtcctcaggagctgccagggccaattgctacagagtgtctgggtgtgtggcataggaggaaggtttgcttgtgaaatgaggctgggtgggagcggggagggactagatcagaagagatcaagggctgtattcaggaacgttggtgggaggacagagcaagtgggaagggggtatggtgagtgcggcaatccctcatcctcttagaagcacctgtgaatgggaattgagccaactgttatagaaaattggttcagaaagtgcaatcttgccagatttctagcaaataggttcagtgttaccataagcctttgctgtacttcttgaaatgtttctaggggagagcattggaaaatccccttcccccatctagatcgaaggaagatgagggagcagcttggattcttctcagttgtcccctgcatggggagatacactaacccccagaaatgactgctaagcctcttgccttgtctttagtagctaatgatcagagagattttttttttaaactaccatggtcccaggattccatcctgaaatttatttttctttgtatgaatatgtgtaaatgatttaaaaataaaactgtaaaatatttgtacgaagaataaa

SEQ ID NO: 358307 - DNA, 3645 bp, Homo sapiens
gccccctcttctcccctcccccaagccagcacctggtgccccggcgggtcgtgcggcgcggcgctccgcgagagctggcggtcaccatggcaatgcgggagctggtggaggccgaatgcgggggtgccaacccgctcatgaagctcgccgggcacttcacccaggacaaggcccttcggcaggagggattgaggcctggcccctggccccccggagccccggcctctgaggcagcctccaagcctttgggagtagcttctgaagatgagttggtggctgaattcctgcaggaccagaatgcaccccttgtgtcccgtgcccctcagaccttcaagatggatgacctcctggctgagatgcagcagattgagcagtcaaacttccgccaggctccccagagagcccctggtgtggcagacttggccttgtctgagaactgggcccaggagtttcttgcagctggagatgctgtggatgtaactcaggattataatgagactgactggtcccaagaattcatctctgaagttacagaccccttgtctgtgtcccctgcccgctgggctgaggaatatttggagcaatcagaggagaagctgtggctgggagaacctgagggaacagccaccgatcgctggtatgatgaatatcatcctgaggaggatctgcagcacacggccagtgactttgtggccaaagtggatgaccccaaattggctaattctgaggtgagccacatccctctgctgctttgcccagcagagctggttttggaaggcaagaatcttgcttttcttaccccagtttagtttaaagagaaggagaagagatcttaggtctcttcgttcctgtctatagaacagagacttaagatcctgcctcttccttctagtgttcattccctcatctccttgcctactaactcttttttctgatgcctttgcaagtctttagagccagaaatccctttctttttgctctctacctcttttagggtctttagcatatcttgtctgcagctagagatggtcaggggaggggtgagtacagggtcctcttgggcatggttgagagtgcacacctggaagtcctttcccaagtggcctgtgtgtgtctctgtgccccagttcctgaaattcgtgcggcagattggcgaagggcaggtgtccctggagtccggtgcagggtcgggccgagctcaggcagaacagtgggcagcagagtttatacagcagcagggtacatcagatgcctgggttgaccagttcacaagaccagtaaacacatctgcccttgatatggagtttgaacgagccaagtcagctatagagtctgatgtcgatttctgggacaagttgcaggcagagttggaggagatggcaaaacgggatgctgaggcccacccctggctttctgactatgatgaccttacgtcagctacctatgataaggggtaccagtttgaggaggagaaccccttgcgtgatcaccctcagccttttgaagaagggctgcggcgccttcaggagggggacctgccaaatgctgtgctgctttttgaggcagctgtgcagcaggatcctaagcacatggaagcttggcagtatctgggtaccacccaggcagagaatgaacaagaactattagccatcagtgcattgcggaggtgtctggagctaaagccagataaccagacagcactgatggcgctggctgtgagcttcaccaacgagtccctgcagcgacaggcctgtgaaaccctacgagactggctgcggtacacaccagcctatgcccatctggtgacacctgctgaagaaggggctggtggggcaggactgggccccagcaagcgtatcctgggatctctcttgtctgactccctgtttcttgaagtgaaagagctcttcctggcagctgtgcggctggaccctacctccattgaccctgatgtgcagtgtggcttgggagtccttttcaacctgagtggggagtatgacaaggccgtggactgcttcacagctgccctcagcgttcgtcccaatgactatttgctgtggaataagctaggcgccaccctggccaatggaaaccagagtgaagaagcagtagctgcgtaccgccgggccctcgagctccagcctggctatatccggtcccgctataacctgggcatcagctgcatcaacctcggggctcaccgggaggctgtggagcactttctggaggccctgaacatgcagaggaaaagccggggcccccggggtgaaggaggtgccatgtcggagaacatctggagcaccctgcgtttggcattgtctatgttaggccagagcgatgcctatggggcagccgacgcgcgggatctgtccaccctcctaactatgtttggcctgccccagtgacagtgggacgggctgccctgtgagtgtccacctggagggatccccgctttggatgtgattccctctccccaaatgggcctaccaagggggcgggctgatgaccataagcggtacggcctttcaggagctgcctcaacgtaggggtgggtagtctgtgttctagttcctacataattgtaggaaaatgagctgtgtcatctctgagtcccttggtaattcaagggctgtacatccagctacagatctctctgctcatcatgccctttcttggtgctgctttttgggtaggaccccacgatttagggtaactgttatcatcagctgccatttctgatagggtctaccacatctgtaatgtctgtcctttcccccacttttactgggaattgatagtccagcttccttgggcagtgtaagtaggaggttcatctgctgtgcgcctctaatgtctgtctggatgggatgtgttaggagttggcctgttgggttgaattgttgatttggctgagcagagctgagttttggtaggagtgctcatggttctgtcattcttggacctctcctggctgagctctgattccctgtgagcacgatgctgatgcaatagtcctgtgtcatcactgcagcggtcctcaggagctgccagggccaattgctacagagtgtctgggtgtgtggcataggaggaaggtttgcttgtgaaatgaggctgggtgggagcggggagggactagatcagaagagatcaagggctgtattcaggaacgttggtgggaggacagagcaagtgggaagggggtatggtgagtgcggcaatccctcatcctcttagaagcacctgtgaatgggaattgagccaactgttatagaaaattggttcagaaagtgcaatcttgccagatttctagcaaataggttcagtgttaccataagcctttgctgtacttcttgaaatgtttctaggggagagcattggaaaatccccttcccccatctagatcgaaggaagatgagggagcagcttggattcttctcagttgtcccctgcatggggagatacactaacccccagaaatgactgctaagcctcttgccttgtctttagtagctaatgatcagagagattttttttttaaactaccatggtcccaggattccatcctgaaatttatttttctttgtatgaatatgtgtaaatgatttaaaaataaaactgtaaaatatttgtacgaagaataaa

SEQ ID NO: 358308 - DNA, 3843 bp, Homo sapiens
ggctgttttcccactgtcccttcttcgggcagtgtcgccgtccagcctggttgttgaagcgtccccgtggtcccccggggtccaggcccctttgtggaggcagctgctggcccccagcccatgggaccgtagtcgcggaggcctctgcagaggcgcaggctggaagcggtggcctttgaggggggcggcaggagagagtaccgacctccctcgaactcctggcagagagagctggcggtcaccatggcaatgcgggagctggtggaggccgaatgcgggggtgccaacccgctcatgaagctcgccgggcacttcacccaggacaaggcccttcggcaggagggattgaggcctggcccctggccccccggagccccggcctctgaggcagcctccaagcctttgggagtagcttctgaagatgagttggtggctgaattcctgcaggaccagaatgcaccccttgtgtcccgtgcccctcagaccttcaagatggatgacctcctggctgagatgcagcagattgagcagtcaaacttccgccaggctccccagagagcccctggtgtggcagacttggccttgtctgagaactgggcccaggagtttcttgcagctggagatgctgtggatgtaactcaggattataatgagactgactggtcccaagaattcatctctgaagttacagaccccttgtctgtgtcccctgcccgctgggctgaggaatatttggagcaatcagaggagaagctgtggctgggagaacctgagggaacagccaccgatcgctggtatgatgaatatcatcctgaggaggatctgcagcacacggccagtgactttgtggccaaagtggatgaccccaaattggctaattctgagttcctgaaattcgtgcggcagattggcgaagggcaggtgtccctggagtccggtgcagggtcgggccgagctcaggcagaacagtgggcagcagagtttatacagcagcagggtacatcagatgcctgggttgaccagttcacaagaccagtaaacacatctgcccttgatatggagtttgaacgagccaagtcagctatagagtctgatgtcgatttctgggacaagttgcaggcagagttggaggagatggcaaaacgggatgctgaggcccacccctggctttctgactatgatgaccttacgtcagctacctatgataaggggtaccagtttgaggaggagaaccccttgcgtgatcaccctcagccttttgaagaagggctgcggcgccttcaggagggggacctgccaaatgctgtgctgctttttgaggcagctgtgcagcaggatcctaagcacatggaagcttggcagtatctgggtaccacccaggcagagaatgaacaagaactattagccatcagtgcattgcggaggtgtctggagctaaagccagataaccagacagcactgatggcgctggctgtgagcttcaccaacgagtccctgcagcgacaggcctgtgaaaccctacgagactggctgcggtacacaccagcctatgcccatctggtgacacctgctgaagaaggggctggtggggcaggactgggccccagcaagcgtatcctgggatctctcttgtctgactccctgtttcttgaagtgaaagagctcttcctggcagctgtgcggctggaccctacctccattgaccctgatgtgcagtgtggcttgggagtccttttcaacctgagtggggagtatgacaaggccgtggactgcttcacagctgccctcagcgttcgtcccaatgactatttgctgtggaataagctaggcgccaccctggccaatggaaaccagagtgaagaagcagtagctgcgtaccgccgggccctcgagctccagcctggctatatccggtcccgctataacctgggcatcagctgcatcaacctcggggctcaccgggaggctgtggagcactttctggaggccctgaacatgcagaggaaaagccggggcccccggggtgaaggaggtgccatgtcggagaacatctggagcaccctgcgtttggcattgtctatgttaggccagagcgatgcctatggggcagccgacgcgcgggatctgtccaccctcctaactatgtttggcctgccccagtgacagtgggacgggctgccctgtgagtgtccacctggagggatccccgctttggatgtgattccctctccccaaatgggcctaccaagggggcgggctgatgaccataagcggtacggcctttcaggagctgcctcaacgtaggggtgggtagtctgtgttctagttcctacataattgtaggaaaatgagctgtgtcatctctgagtcccttggtaattcaagggctgtacatccagctacagatctctctgctcatcatgccctttcttggtgctgctttttgggtaggaccccacgatttagggtaactgttatcatcagctgccatttctgatagggtctaccacatctgtaatgtctgtcctttcccccacttttactgggaattgatagtccagcttccttgggcagtgtaagtaggaggttcatctgctgtgcgcctctaatgtctgtctggatgggatgtgttaggagttggcctgttgggttgaattgttgatttggctgagcagagctgagttttggtaggagtgctcatggttctgtcattcttggacctctcctggctgagctctgattccctgtgagcacgatgctgatgcaatagtcctgtgtcatcactgcagcggtcctcaggagctgccagggccaattgctacagagtgtctgggtgtgtggcataggaggaaggtttgcttgtgaaatgaggctgggtgggagcggggagggactagatcagaagagatcaagggctgtattcaggaacgttggtgggaggacagagcaagtgggaagggggtatggtgagtgcggcaatccctcatcctcttagaagcacctgtgaatgggaattgagccaactgttatagaaaattggttcagaaagtgcaatcttgccagatttctagcaaataggttcagtgttaccataagcctttgctgtacttcttgaaatgtttctaggggagagcattggaaaatccccttcccccatctagatcgaaggaagatgagggagcagcttggattcttctcagttgtcccctgcatggggagatacactaacccccagaaatgactgctaagcctcttgccttgtctttagtagctaatgatcagagagattttttttttaaactaccatggtcccaggattccatcctgaaatttatttttctttgtatgaatatgtgtaaatgatttaaaaataaaactgtaaaatatttgtacgaagaataaaaaaaaaaaaaaaaaaaaaaaaaaaaaaaaaaaaaaaaaaaaaaaaaaaaaaaaaaaaaaaaaaaagaggggggggggggaaaaagaataaccccgcgagaggggggacgccaaagagagagagagagcgcgcgcacacccaagtgtgtgtgtgtgtgtgaaaagagggggggcccacaaagagagagggagggcgtataataaaacgagagagagagagaggggcgggcgggtataacaaacacagcggaggaggaggggagaaaaaagcggagaaaggcggggacatatctggggagaagagggaccactattattattgggggggggagggaaacaaattgtgggggagaaaacttccctataggagaataatattaaagacgacttgagggggaatatattataaaaattttagcgaagctgattattagggggaaa

SEQ ID NO: 358309 - DNA, 3668 bp, Homo sapiens
ggctgttttcccactgtcccttcttcgggcagtgtcgccgtccagcctggttgttgaagcgtccccgtggtcccccggggtccaggcccctttgtggaggcagctgctggcccccagcccatgggaccgtagtcgcggaggcctctgcagaggcgcaggctggaagcggtggcctttgaggggggcggcaggagagagtaccgacctccctcgaactcctggcagagagagctggcggtcaccatggcaatgcgggagctggtggaggccgaatgcgggggtgccaacccgctcatgaagctcgccgggcacttcacccaggacaaggcccttcggcaggagggattgaggcctggcccctggccccccggagccccggcctctgaggcagcctccaagcctttgggagtagcttctgaagatgagttggtggctgaattcctgcaggaccagaatgcaccccttgtgtcccgtgcccctcagaccttcaagatggatgacctcctggctgagatgcagcagattgagcagtcaaacttccgccaggctccccagagagcccctggtgtggcagacttggccttgtctgagaactgggcccaggagtttcttgcagctggagatgctgtggatgtaactcaggattataatgagactgactggtcccaagaattcatctctgaagttacagaccccttgtctgtgtcccctgcccgctgggctgaggaatatttggagcaatcagaggagaagctgtggctgggagaacctgagggaacagccaccgatcgctggtatgatgaatatcatcctgaggaggatctgcagcacacggccagtgactttgtggccaaagtggatgaccccaaattggctaattctgagttcctgaaattcgtgcggcagattggcgaagggcaggtgtccctggagtccggtgcagggtcgggccgagctcaggcagaacagtgggcagcagagtttatacagcagcagggtacatcagatgcctgggttgaccagttcacaagaccagtaaacacatctgcccttgatatggagtttgaacgagccaagtcagctatagagtctgatgtcgatttctgggacaagttgcaggcagagttggaggagatggcaaaacgggatgctgaggcccacccctggctttctgactatgatgaccttacgtcagctacctatgataaggggtaccagtttgaggaggagaaccccttgcgtgatcaccctcagccttttgaagaagggctgcggcgccttcaggagggggacctgccaaatgctgtgctgctttttgaggcagctgtgcagcaggatcctaagcacatggaagcttggcagtatctgggtaccacccaggcagagaatgaacaagaactattagccatcagtgcattgcggaggtgtctggagctaaagccagataaccagacagcactgatggcgctggctgtgagcttcaccaacgagtccctgcagcgacaggcctgtgaaaccctacgagactggctgcggtacacaccagcctatgcccatctggtgacacctgctgaagaaggggctggtggggcaggactgggccccagcaagcgtatcctgggatctctcttgtctgactccctgtttcttgaagtgaaagagctcttcctggcagctgtgcggctggaccctacctccattgaccctgatgtgcagtgtggcttgggagtccttttcaacctgagtggggagtatgacaaggccgtggactgcttcacagctgccctcagcgttcgtcccaatgactatttgctgtggaataagctaggcgccaccctggccaatggaaaccagagtgaagaagcagtagctgcgtaccgccgggccctcgagctccagcctggctatatccggtcccgctataacctgggcatcagctgcatcaacctcggggctcaccgggaggctgtggagcactttctggaggccctgaacatgcagaggaaaagccggggcccccggggtgaaggaggtgccatgtcggagaacatctggagcaccctgcgtttggcattgtctatgttaggccagagcgatgcctatggggcagccgacgcgcgggatctgtccaccctcctaactatgtttggcctgccccagtgacagtgggacgggctgccctgtgagtgtccacctggagggatccccgctttggatgtgattccctctccccaaatgggcctaccaagggggcgggctgatgaccataagcggtacggcctttcaggagctgcctcaacgtaggggtgggtagtctgtgttctagttcctacataattgtaggaaaatgagctgtgtcatctctgagtcccttggtaattcaagggctgtacatccagctacagatctctctgctcatcatgccctttcttggtgctgctttttgggtaggaccccacgatttagggtaactgttatcatcagctgccatttctgatagggtctaccacatctgtaatgtctgtcctttcccccacttttactgggaattgatagtccagcttccttgggcagtgtaagtaggaggttcatctgctgtgcgcctctaatgtctgtctggatgggatgtgttaggagttggcctgttgggttgaattgttgatttggctgagcagagctgagttttggtaggagtgctcatggttctgtcattcttggacctctcctggctgagctctgattccctgtgagcacgatgctgatgcaatagtcctgtgtcatcactgcagcggtcctcaggagctgccagggccaattgctacagagtgtctgggtgtgtggcataggaggaaggtttgcttgtgaaatgaggctgggtgggagcggggagggactagatcagaagagatcaagggctgtattcaggaacgttggtgggaggacagagcaagtgggaagggggtatggtgagtgcggcaatccctcatcctcttagaagcacctgtgaatgggaattgagccaactgttatagaaaattggttcagaaagtgcaatcttgccagatttctagcaaataggttcagtgttaccataagcctttgctgtacttcttgaaatgtttctaggggagagcattggaaaatccccttcccccatctagatcgaaggaagatgagggagcagcttggattcttctcagttgtcccctgcatggggagatacactaacccccagaaatgactgctaagcctcttgccttgtctttagtagctaatgatcagagagattttttttttaaactaccatggtcccaggattccatcctgaaatttatttttctttgtatgaatatgtgtaaatgatttaaaaataaaactgtaaaatatttgtacgaagaataaaaaaaaaaaaaaaaaaaaaaaaaaaaaaaaaaaaaaaaaaaaaaaaaaaaaaaaaaaaaaaaaaaagaaaaaaaaaaaaaaaaacaacacagaagaagagagaaggacaaaacagagcgtaagcagaagaggaggagctggcagtcgcgaaggagcgagccacatctcgtgaaccagcggccgggcgaccaccgcgccacacccgcacaccagcgcgcgattacgctcaccccccacgcagcggcggacagccgccaacgcgcgcc

SEQ ID NO: 358310 - DNA, 2188 bp, Homo sapiens
gccccctcttctcccctcccccaagccagcacctggtgccccggcgggtcgtgcggcgcggcgctccgcgagagctggcggtcaccatggcaatgcgggagctggtggaggccgaatgcgggggtgccaacccgctcatgaagctcgccgggcacttcacccaggacaaggcccttcggcaggagggattgaggcctggcccctggccccccggagccccggcctctgaggcagcctccaagcctttgggagtagcttctgaagatgagttggtggctgaattcctgcaggaccagaatgcaccccttgtgtcccgtgcccctcagaccttcaagatggatgacctcctggctgagatgcagcagattgagcagtcaaacttccgccaggctccccagagagcccctggtgtggcagacttggccttgtctgagaactgggcccaggagtttcttgcagctggagatgctgtggatgtaactcaggattataatgagactgactggtcccaagaattcatctctgaagttacagaccccttgtctgtgtcccctgcccgctgggctgaggaatatttggagcaatcagaggagaagctgtggctgggagaacctgagggaacagccaccgatcgctggtatgatgaatatcatcctgaggaggatctgcagcacacggccagtgactttgtggccaaagtggatgaccccaaattggctaattctgagggtacatcagatgcctgggttgaccagttcacaagaccagtaaacacatctgcccttgatatggagtttgaacgagccaagtcagctatagagtctgatgtcgatttctgggacaagttgcaggcagagttggaggagatggcaaaacgggatgctgaggcccacccctggctttctgactatgatgaccttacgtcagctacctatgataaggggtaccagtttgaggaggagaaccccttgcgtgatcaccctcagccttttgaagaagggctgcggcgccttcaggagggggacctgccaaatgctgtgctgctttttgaggcagctgtgcagcaggatcctaagcacatggaagcttggcagtatctgggtaccacccaggcagagaatgaacaagaactattagccatcagtgcattgcggaggtgtctggagctaaagccagataaccagacagcactgatggcgctggctgtgagcttcaccaacgagtccctgcagcgacaggcctgtgaaaccctacgagactggctgcggtacacaccagcctatgcccatctggtgacacctgctgaagaaggggctggtggggcaggactgggccccagcaagcgtatcctgggatctctcttgtctgactccctgtttcttgaagtgaaagagctcttcctggcagctgtgcggctggaccctacctccattgaccctgatgtgcagtgtggcttgggagtccttttcaacctgagtggggagtatgacaaggccgtggactgcttcacagctgccctcagcgttcgtcccaatgactatttgctgtggaataagctaggcgccaccctggccaatggaaaccagagtgaagaagcagtagctgcgtaccgccgggccctcgagctccagcctggctatatccggtcccgctataacctgggcatcagctgcatcaacctcggggctcaccgggaggctgtggagcactttctggaggccctgaacatgcagaggaaaagccggggcccccggggtgaaggaggtgccatgtcggagaacatctggagcaccctgcgtttggcattgtctatgttaggccagagcgatgcctatggggcagccgacgcgcgggatctgtccaccctcctaactatgtttggcctgccccagtgacagtgggacgggctgccctaggagaaaattaaacacctgggggaggaaaacaggaagctgttgtggcacctgtcaccacctgggggatcacgaggcagctggtgtcttgggctctgcagaaatatacagcctctgcagacactgcttctgaatgaacgggctggagtttccttgggatcctgaactcatattggattctctacctaccatcttggacaattcatgtaggaaaacaaatcctcatttgttcaaacaatagatgaaaattattaaagttttgacacatattaaat

SEQ ID NO: 358311 - DNA, 3508 bp, Homo sapiens
  misc_feature (36)..(36): n is a, c, g, or t
  misc_feature (101)..(101): n is a, c, g, or t
  misc_feature (169)..(169): n is a, c, g, or t
acagatgaatgggagagccagccgagaaatctaaantgcctcgcatccccagcagtttgctaaaggaggtagtggctggacaggttaagacaccctcccanccccccagcctcctgcagtactcagggtaaccattaggcaccttattctgcagccaccagtggggcantgttgccaagagggtaccaagaggagaatcctgcagccttgagctgtgcaactgataacgaactacagatgggatggacgccatcttacctgatgctggccagtatatcatgacatggagaactccccgctattcctgagaaacttggactttgactcaacagaaagagagctggcggtcaccatggcaatgcgggagctggtggaggccgaatgcgggggtgccaacccgctcatgaagctcgccgggcacttcacccaggacaaggcccttcggcaggagggattgaggcctggcccctggccccccggagccccggcctctgaggcagcctccaagcctttgggagtagcttctgaagatgagttggtggctgaattcctgcaggaccagaatgcaccccttgtgtcccgtgcccctcagaccttcaagatggatgacctcctggctgagatgcagcagattgagcagtcaaacttccgccaggctccccagagagcccctggtgtggcagacttggccttgtctgagaactgggcccaggagtttcttgcagctggagatgctgtggatgtaactcaggattataatgagactgactggtcccaagaattcatctctgaagttacagaccccttgtctgtgtcccctgcccgctgggctgaggaatatttggagcaatcagaggagaagctgtggctgggagaacctgagggaacagccaccgatcgctggtatgatgaatatcatcctgaggaggatctgcagcacacggccagtgactttgtggccaaagtggatgaccccaaattggctaattctgagttcctgaaattcgtgcggcagattggcgaagggcaggtgtccctggagtccggtgcagggtcgggccgagctcaggcagaacagtgggcagcagagtttatacagcagcagggtacatcagatgcctgggttgaccagttcacaagaccagtaaacacatctgcccttgatatggagtttgaacgagccaagtcagctatagagttgcaggcagagttggaggagatggcaaaacgggatgctgaggcccacccctggctttctgactatgatgaccttacgtcagctacctatgataaggggtaccagtttgaggaggagaaccccttgcgtgatcaccctcagccttttgaagaagggctgcggcgccttcaggagggggacctgccaaatgctgtgctgctttttgaggcagctgtgcagcaggatcctaagcacatggaagcttggcagtatctgggtaccacccaggcagagaatgaacaagaactattagccatcagtgcattgcggaggtgtctggagctaaagccagataaccagacagcactgatggcgctggctgtgagcttcaccaacgagtccctgcagcgacaggcctgtgaaaccctacgagactggctgcggtacacaccagcctatgcccatctggtgacacctgctgaagaaggggctggtggggcaggactgggccccagcaagcgtatcctgggatctctcttgtctgactccctgtttcttgaagtgaaagagctcttcctggcagctgtgcggctggaccctacctccattgaccctgatgtgcagtgtggcttgggagtccttttcaacctgagtggggagtatgacaaggccgtggactgcttcacagctgccctcagcgttcgtcccaatgactatttgctgtggaataagctaggcgccaccctggccaatggaaaccagagtgaagaagcagtagctgcgtaccgccgggccctcgagctccagcctggctatatccggtcccgctataacctgggcatcagctgcatcaacctcggggctcaccgggaggctgtggagcactttctggaggccctgaacatgcagaggaaaagccggggcccccggggtgaaggaggtgccatgtcggagaacatctggagcaccctgcgtttggcattgtctatgttaggccagagcgatgcctatggggcagccgacgcgcgggatctgtccaccctcctaactatgtttggcctgccccagtgacagtgggacgggctgccctgtgagtgtccacctggagggatccccgctttggatgtgattccctctccccaaatgggcctaccaagggggcgggctgatgaccataagcggtacggcctttcaggagctgcctcaacgtaggggtgggtagtctgtgttctagttcctacataattgtaggaaaatgagctgtgtcatctctgagtcccttggtaattcaagggctgtacatccagctacagatctctctgctcatcatgccctttcttggtgctgctttttgggtaggaccccacgatttagggtaactgttatcatcagctgccatttctgatagggtctaccacatctgtaatgtctgtcctttcccccacttttactgggaattgatagtccagcttccttgggcagtgtaagtaggaggttcatctgctgtgcgcctctaatgtctgtctggatgggatgtgttaggagttggcctgttgggttgaattgttgatttggctgagcagagctgagttttggtaggagtgctcatggttctgtcattcttggacctctcctggctgagctctgattccctgtgagcacgatgctgatgcaatagtcctgtgtcatcactgcagcggtcctcaggagctgccagggccaattgctacagagtgtctgggtgtgtggcataggaggaaggtttgcttgtgaaatgaggctgggtgggagcggggagggactagatcagaagagatcaagggctgtattcaggaacgttggtgggaggacagagcaagtgggaagggggtatggtgagtgcggcaatccctcatcctcttagaagcacctgtgaatgggaattgagccaactgttatagaaaattggttcagaaagtgcaatcttgccagatttctagcaaataggttcagtgttaccataagcctttgctgtacttcttgaaatgtttctaggggagagcattggaaaatccccttcccccatctagatcgaaggaagatgagggagcagcttggattcttctcagttgtcccctgcatggggagatacactaacccccagaaatgactgctaagcctcttgccttgtctttagtagctaatgatcagagagattttttttttaaactaccatggtcccaggattccatcctgaaatttatttttctttgtatgaatatgtgtaaatgatttaaaaataaaactgtaaaatatttgtacgaagaataaatggaactgatgtgggtatga

SEQ ID NO: 358312 - DNA, 463 bp, Homo sapiens
gggttttgctcagtgcagagagcccagcattacatcaacatgcccgtgcagttcaaaccgaagtccgcaggcaaatttgaagctttgcttgtcattcaaacagatgaaggtacccagttacagatggcagaaactgttcttagcgtacagaaaatgtaatattagtatatggctgcttttaaaagtttgtgtttggttgtaaagcagccctaagattgtaaatcaatgtgtcctgccagctgagattactggagtccacaagagtgaggatgcttctcttgtcaagcagaaatatacagcctctgcagacactgcttctgaatgaacgggctggagtttccttgggatcctgaactcatattggattctctacctaccatcttggacaattcatgtaggaaaacaaatcctcatttgttcaaacaatagatgaaaattattaaagttttgacacatattaaat

SEQ ID NO: 358313 - DNA, 3113 bp, Homo sapiens
tccttgctcttctccatgacactaggactcccttggtcttgaagctggagagctggcggtcaccatggcaatgcgggagctggtggaggccgaatgcgggggtgccaacccgctcatgaagctcgccgggcacttcacccaggacaaggcccttcggcaggagggattgaggcctggcccctggccccccggagccccggcctctgaggcagcctccaagcctttgggagtagcttctgaagatgagttggtggctgaattcctgcaggaccagaatgcaccccttgtgtcccgtgcccctcagaccttcaagatggatgacctcctggctgagatgcagcagattgagcagtcaaacttccgccaggctccccagagagcccctggtgtggcagacttggccttgtctgagaactgggcccaggagtttcttgcagctggagatgctgtggatgtaactcaggattataatgagactgactggtcccaagaattcatctctgaagttacagaccccttgtctgtgtcccctgcccgctgggctgaggaatatttggagcaatcagaggagaagctgtggctgggagaacctgagggaacagccaccgatcgctggtatgatgaatatcatcctgaggaggatctgcagcacacggccagtgactttgtggccaaagtggatgaccccaaattggctaattctgagggtacatcagatgcctgggttgaccagttcacaagaccagtaaacacatctgcccttgatatggagtttgaacgagccaagtcagctatagagtctgatgtcgatttctgggacaagttgcaggcagagttggaggagatggcaaaacgggatgctgaggcccacccctggctttctgactatgatgaccttacgtcagctacctatgataaggggtaccagtttgaggaggagaaccccttgcgtgatcaccctcagccttttgaagaagggctgcggcgccttcaggagggggacctgccaaatgctgtgctgctttttgaggcagctgtgcagcaggatcctaagcacatggaagcttggcagtatctgggtaccacccaggcagagaatgaacaagaactattagccatcagtgcattgcggaggtgtctggagctaaagccagataaccagacagcactgatggcgctggctgtgagcttcaccaacgagtccctgcagcgacaggcctgtgaaaccctacgagactggctgcggtacacaccagcctatgcccatctggtgacacctgctgaagaaggggctggtggggcaggactgggccccagcaagcgtatcctgggatctctcttgtctgactccctgtttcttgaagtgaaagagctcttcctggcagctgtgcggctggaccctacctccattgaccctgatgtgcagtgtggcttgggagtccttttcaacctgagtggggagtatgacaaggccgtggactgcttcacagctgccctcagcgttcgtcccaatgactatttgctgtggaataagctaggcgccaccctggccaatggaaaccagagtgaagaagcagtagctgcgtaccgccgggccctcgagctccagcctggctatatccggtcccgctataacctgggcatcagctgcatcaacctcggggctcaccgggaggctgtggagcactttctggaggccctgaacatgcagaggaaaagccggggcccccggggtgaaggaggtgccatgtcggagaacatctggagcaccctgcgtttggcattgtctatgttaggccagagcgatgcctatggggcagccgacgcgcgggatctgtccaccctcctaactatgtttggcctgccccagtgacagtgggacgggctgccctgtgagtgtccacctggagggatccccgctttggatgtgattccctctccccaaatgggcctaccaagggggcgggctgatgaccataagcggtacggcctttcaggagctgcctcaacgtaggggtgggtagtctgtgttctagttcctacataattgtaggaaaatgagctgtgtcatctctgagtcccttggtaattcaagggctgtacatccagctacagatctctctgctcatcatgccctttcttggtgctgctttttgggtaggaccccacgatttagggtaactgttatcatcagctgccatttctgatagggtctaccacatctgtaatgtctgtcctttcccccacttttactgggaattgatagtccagcttccttgggcagtgtaagtaggaggttcatctgctgtgcgcctctaatgtctgtctggatgggatgtgttaggagttggcctgttgggttgaattgttgatttggctgagcagagctgagttttggtaggagtgctcatggttctgtcattcttggacctctcctggctgagctctgattccctgtgagcacgatgctgatgcaatagtcctgtgtcatcactgcagcggtcctcaggagctgccagggccaattgctacagagtgtctgggtgtgtggcataggaggaaggtttgcttgtgaaatgaggctgggtgggagcggggagggactagatcagaagagatcaagggctgtattcaggaacgttggtgggaggacagagcaagtgggaagggggtatggtgagtgcggcaatccctcatcctcttagaagcacctgtgaatgggaattgagccaactgttatagaaaattggttcagaaagtgcaatcttgccagatttctagcaaataggttcagtgttaccataagcctttgctgtacttcttgaaatgtttctaggggagagcattggaaaatccccttcccccatctagatcgaaggaagatgagggagcagcttggattcttctcagttgtcccctgcatggggagatacactaacccccagaaatgactgctaagcctcttgccttgtctttagtagctaatgatcagagagattttttttttaaactaccatggtcccaggattccatcctgaaatttatttttctttgtatgaatatgtgtaaatgatttaaaaataaaactgtaaaatatttgtacgaagaataaa

SEQ ID NO: 358314 - DNA, 3403 bp, Homo sapiens
ggctgttttcccactgtcccttcttcgggcagtgtcgccgtccagcctggttgttgaagcgtccccgtggtcccccggggtccaggcccctttgtggaggcagctgctggcccccagcccatgggaccgtagtcgcggaggcctctgcagaggcgcaggctggaagcggtggcctttgaggggggcggcaggagagagtaccgacctccctcgaactcctggcagagagagctggcggtcaccatggcaatgcgggagctggtggaggccgaatgcgggggtgccaacccgctcatgaagctcgccgggcacttcacccaggacaaggcccttcggcaggagggattgaggcctggcccctggccccccggagccccggcctctgaggcagcctccaagcctttgggagtagcttctgaagatgagttggtggctgaattcctgcaggaccagaatgcaccccttgtgtcccgtgcccctcagaccttcaagatggatgacctcctggctgagatgcagcagattgagcagtcaaacttccgccaggctccccagagagcccctggtgtggcagacttggccttgtctgagaactgggcccaggagtttcttgcagctggagatgctgtggatgtaactcaggattataatgagactgactggtcccaagaattcatctctgaagttacagaccccttgtctgtgtcccctgcccgctgggctgaggaatatttggagcaatcagaggagaagctgtggctgggagaacctgagggaacagccaccgatcgctggtatgatgaatatcatcctgaggaggatctgcagcacacggccagtgactttgtggccaaagtggatgaccccaaattggctaattctgagttcctgaaattcgtgcggcagattggcgaagggcaggtgtccctggagtccggtgcagggtcgggccgagctcaggcagaacagtgggcagcagagtttatacagcagcagggtacatcagatgcctgggttgaccagttcacaagaccagtaaacacatctgcccttgatatggagtttgaacgagccaagtcagctatagagtctgatgtcgatttctgggacaagttgcaggcagagttggaggagatggcaaaacgggatgctgaggcccacccctggctttctgactatgatgaccttacgtcagctacctatgataaggggtaccagtttgaggaggagaaccccttgcgtgatcaccctcagccttttgaagaagggctgcggcgccttcaggagggggacctgccaaatgctgtgctgctttttgaggcagctgtgcagcaggatcctaagcacatggaagcttggcagtatctgggtaccacccaggcagagaatgaacaagaactattagccatcagtgcattgcggaggtgtctggagctaaagccagataaccagacagcactgatggcgctggctgtgagcttcaccaacgagtccctgcagcgacaggcctgtgaaaccctacgagactggctgcggtacacaccagcctatgcccatctggtgacacctgctgaagaaggggctggtggggcaggactgggccccagcaagcgtatcctgggatctctcttgtctgactccctgtttcttgaagtgaaagagctcttcctggcagctgtgcggctggaccctacctccattgaccctgatgtgcagtgtggcttgggagtccttttcaacctgagtggggagtatgacaaggccgtggactgcttcacagctgccctcagcgttcgtcccaatgactatttgctgtggaataagctaggcgccaccctggccaatggaaaccagagtgaagaagcagtagctgcgtaccgccgggccctcgagctccagcctggctatatccggtcccgctataacctgggcatcagctgcatcaacctcggggctcaccgggaggctgtggagcactttctggaggccctgaacatgcagaggaaaagccggggcccccggggtgaaggaggtgccatgtcggagaacatctggagcaccctgcgtttggcattgtctatgttaggccagagcgatgcctatggggcagccgacgcgcgggatctgtccaccctcctaactatgtttggcctgccccagtgacagtgggacgggctgccctgtgagtgtccacctggagggatccccgctttggatgtgattccctctccccaaatgggcctaccaagggggcgggctgatgaccataagcggtacggcctttcaggagctgcctcaacgtaggggtgggtagtctgtgttctagttcctacataattgtaggaaaatgagctgtgtcatctctgagtcccttggtaattcaagggctgtacatccagctacagatctctctgctcatcatgccctttcttggtgctgctttttgggtaggaccccacgatttagggtaactgttatcatcagctgccatttctgatagggtctaccacatctgtaatgtctgtcctttcccccacttttactgggaattgatagtccagcttccttgggcagtgtaagtaggaggttcatctgctgtgcgcctctaatgtctgtctggatgggatgtgttaggagttggcctgttgggttgaattgttgatttggctgagcagagctgagttttggtaggagtgctcatggttctgtcattcttggacctctcctggctgagctctgattccctgtgagcacgatgctgatgcaatagtcctgtgtcatcactgcagcggtcctcaggagctgccagggccaattgctacagagtgtctgggtgtgtggcataggaggaaggtttgcttgtgaaatgaggctgggtgggagcggggagggactagatcagaagagatcaagggctgtattcaggaacgttggtgggaggacagagcaagtgggaagggggtatggtgagtgcggcaatccctcatcctcttagaagcacctgtgaatgggaattgagccaactgttatagaaaattggttcagaaagtgcaatcttgccagatttctagcaaataggttcagtgttaccataagcctttgctgtacttcttgaaatgtttctaggggagagcattggaaaatccccttcccccatctagatcgaaggaagatgagggagcagcttggattcttctcagttgtcccctgcatggggagatacactaacccccagaaatgactgctaagcctcttgccttgtctttagtagctaatgatcagagagattttttttttaaactaccatggtcccaggattccatcctgaaatttatttttctttgtatgaatatgtgtaaatgatttaaaaataaaactgtaaaatatttgtacgaagaataaa

SEQ ID NO: 358315 - DNA, 3450 bp, Homo sapiens
  misc_feature (36)..(36): n is a, c, g, or t
  misc_feature (101)..(101): n is a, c, g, or t
  misc_feature (169)..(169): n is a, c, g, or t
acagatgaatgggagagccagccgagaaatctaaantgcctcgcatccccagcagtttgctaaaggaggtagtggctggacaggttaagacaccctcccanccccccagcctcctgcagtactcagggtaaccattaggcaccttattctgcagccaccagtggggcantgttgccaagagggtaccaagaggagaatcctgcagccttgagctgtgcaactgataacgaactacagatgggatggacgccatcttacctgatgctggccagtatatcatgacatggagaactccccgctattcctgagaaacttggactttgactcaacagaaagagagctggcggtcaccatggcaatgcgggagctggtggaggccgaatgcgggggtgccaacccgctcatgaagctcgccgggcacttcacccaggacaaggcccttcggcaggagggattgaggcctggcccctggccccccggagccccggcctctgaggcaagtgttcttgaggtggaaagcccaggtgcagcctctgaggcagtgagtggcctccaagcctttgggagtagcttctgaagatgagttggtggctgaattcctgcaggaccagaatgcaccccttgtgtcccgtgcccctcagaccttcaagatggatgacctcctggctgagatgcagcagattgagcagtcaaacttccgccaggctccccagagagcccctggtgtggcagacttggccttgtctgagaactgggcccaggagtttcttgcagctggagatgctgtggatgtaactcaggattataatgagactgactggtcccaagaattcatctctgaagttacagaccccttgtctgtgtcccctgcccgctgggctgaggaatatttggagcaatcagaggagaagctgtggctgggagaacctgagggaacagccaccgatcgctggtatgatgaatatcatcctgaggaggatctgcagcacacggccagtgactttgtggccaaagtggatgaccccaaattggctaattctgagggtacatcagatgcctgggttgaccagttcacaagaccagtaaacacatctgcccttgatatggagtttgaacgagccaagtcagctatagagtctgatgtcgatttctgggacaagttgcaggcagagttggaggagatggcaaaacgggatgctgaggcccacccctggctttctgactatgatgaccttacgtcagctacctatgataaggggtaccagtttgaggaggagaaccccttgcgtgatcaccctcagccttttgaagaagggctgcggcgccttcaggagggggacctgccaaatgctgtgctgctttttgaggcagctgtgcagcaggatcctaagcacatggaagcttggcagtatctgggtaccacccaggcagagaatgaacaagaactattagccatcagtgcattgcggaggtgtctggagctaaagccagataaccagacagcactgatggcgctggctgtgagcttcaccaacgagtccctgcagcgacaggcctgtgaaaccctacgagactggctgcggtacacaccagcctatgcccatctggtgacacctgctgaagaaggggctggtggggcaggactgggccccagcaagcgtatcctgggatctctcttgtctgactccctgtttcttgaagtgaaagagctcttcctggcagctgtgcggctggaccctacctccattgaccctgatgtgcagtgtggcttgggagtccttttcaacctgagtggggagtatgacaaggccgtggactgcttcacagctgccctcagcgttcgtcccaatgactatttgctgtggaataagctaggcgccaccctggccaatggaaaccagagtgaagaagcagtagctgcgtaccgccgggccctcgagctccagcctggctatatccggtcccgctataacctgggcatcagctgcatcaacctcggggctcaccgggaggctgtggagcactttctggaggccctgaacatgcagaggaaaagccggggcccccggggtgaaggaggtgccatgtcggagaacatctggagcaccctgcgtttggcattgtctatgttaggccagagcgatgcctatggggcagccgacgcgcgggatctgtccaccctcctaactatgtttggcctgccccagtgacagtgggacgggctgccctgtgagtgtccacctggagggatccccgctttggatgtgattccctctccccaaatgggcctaccaagggggcgggctgatgaccataagcggtacggcctttcaggagctgcctcaacgtaggggtgggtagtctgtgttctagttcctacataattgtaggaaaatgagctgtgtcatctctgagtcccttggtaattcaagggctgtacatccagctacagatctctctgctcatcatgccctttcttggtgctgctttttgggtaggaccccacgatttagggtaactgttatcatcagctgccatttctgatagggtctaccacatctgtaatgtctgtcctttcccccacttttactgggaattgatagtccagcttccttgggcagtgtaagtaggaggttcatctgctgtgcgcctctaatgtctgtctggatgggatgtgttaggagttggcctgttgggttgaattgttgatttggctgagcagagctgagttttggtaggagtgctcatggttctgtcattcttggacctctcctggctgagctctgattccctgtgagcacgatgctgatgcaatagtcctgtgtcatcactgcagcggtcctcaggagctgccagggccaattgctacagagtgtctgggtgtgtggcataggaggaaggtttgcttgtgaaatgaggctgggtgggagcggggagggactagatcagaagagatcaagggctgtattcaggaacgttggtgggaggacagagcaagtgggaagggggtatggtgagtgcggcaatccctcatcctcttagaagcacctgtgaatgggaattgagccaactgttatagaaaattggttcagaaagtgcaatcttgccagatttctagcaaataggttcagtgttaccataagcctttgctgtacttcttgaaatgtttctaggggagagcattggaaaatccccttcccccatctagatcgaaggaagatgagggagcagcttggattcttctcagttgtcccctgcatggggagatacactaacccccagaaatgactgctaagcctcttgccttgtctttagtagctaatgatcagagagattttttttttaaactaccatggtcccaggattccatcctgaaatttatttttctttgtatgaatatgtgtaaatgatttaaaaataaaactgtaaaatatttgtacgaagaataaa

SEQ ID NO: 358316 - DNA, 2088 bp, Homo sapiens
gccccctcttctcccctcccccaagccagcacctggtgccccggcgggtcgtgcggcgcggcgctccgcgagagctggcggtcaccatggcaatgcgggagctggtggaggccgaatgcgggggtgccaacccgctcatgaagctcgccgggcacttcacccaggacaaggcccttcggcaggagggattgaggcctggcccctggccccccggagccccggcctctgaggcagcctccaagcctttgggagtagcttctgaagatgagttggtggctgaattcctgcaggaccagaatgcaccccttgtgtcccgtgcccctcagaccttcaagatggatgacctcctggctgagatgcagcagattgagcagtcaaacttccgccaggctccccagagagcccctggtgtggcagacttggccttgtctgagaactgggcccaggagtttcttgcagctggagatgctgtggatgtaactcaggattataatgagactgactggtcccaagaattcatctctgaagttacagaccccttgtctgtgtcccctgcccgctgggctgaggaatatttggagcaatcagaggagaagctgtggctgggagaacctgagggaacagccaccgatcgctggtatgatgaatatcatcctgaggaggatctgcagcacacggccagtgactttgtggccaaagtggatgaccccaaattggctaattctgagggtacatcagatgcctgggttgaccagttcacaagaccagtaaacacatctgcccttgatatggagtttgaacgagccaagtcagctatagagtctgatgtcgatttctgggacaagttgcaggcagagttggaggagatggcaaaacgggatgctgaggcccacccctggctttctgactatgatgaccttacgtcagctacctatgataaggggtaccagtttgaggaggagaaccccttgcgtgatcaccctcagccttttgaagaagggctgcggcgccttcaggagggggacctgccaaatgctgtgctgctttttgaggcagctgtgcagcaggatcctaagcacatggaagcttggcagtatctgggtaccacccaggcagagaatgaacaagaactattagccatcagtgcattgcggaggtgtctggagctaaagccagataaccagacagcactgatggcgctggctgtgagcttcaccaacgagtccctgcagcgacaggcctgtgaaaccctacgagactggctgcggtacacaccagcctatgcccatctggtgacacctgctgaagaaggggctggtggggcaggactgggccccagcaagcgtatcctgggatctctcttgtctgactccctgtttcttgaagtgaaagagctcttcctggcagctgtgcggctggaccctacctccattgaccctgatgtgcagtgtggcttgggagtccttttcaacctgagtggggagtatgacaaggccgtggactgcttcacagctgccctcagcgttcgtcccaatgactatttgctgtggaataagctaggcgccaccctggccaatggaaaccagagtgaagaagcagtagctgcgtaccgccgggccctcgagctccagcctggctatatccggtcccgctataacctgggcatcagctgcatcaacctcggggctcaccgggaggctgtggagcactttctggaggccctgaacatgcagaggaaaagccggggcccccggggtgaaggaggtgccatgtcggagaacatctggagcaccctgcgtttggcattgtctatgttaggccagagcgatgcctatggggcagccgacgcgcgggatctgtccaccctcctaactatgtttggcctgccccagtgacagtgggacgggctgccctaaatatacagcctctgcagacactgcttctgaatgaacgggctggagtttccttgggatcctgaactcatattggattctctacctaccatcttggacaattcatgtaggaaaacaaatcctcatttgttcaaacaatagatgaaaattattaaagttttgacacatattaaat

SEQ ID NO: 358317 - DNA, 2083 bp, Homo sapiens
gccccctcttctcccctcccccaagccagcacctggtgccccggcgggtcgtgcggcgcggcgctccgcgagagctggcggtcaccatggcaatgcgggagctggtggaggccgaatgcgggggtgccaacccgctcatgaagctcgccgggcacttcacccaggacaaggcccttcggcaggagggattgaggcctggcccctggccccccggagccccggcctctgaggcagcctccaagcctttgggagtagcttctgaagatgagttggtggctgaattcctgcaggaccagaatgcaccccttgtgtcccgtgcccctcagaccttcaagatggatgacctcctggctgagatgcagcagattgagcagtcaaacttccgccaggctccccagagagcccctggtgtggcagacttggccttgtctgagaactgggcccaggagtttcttgcagctggagatgctgtggatgtaactcaggattataatgagactgactggtcccaagaattcatctctgaagttacagaccccttgtctgtgtcccctgcccgctgggctgaggaatatttggagcaatcagaggagaagctgtggctgggagaacctgagggaacagccaccgatcgctggtatgatgaatatcatcctgaggaggatctgcagcacacggccagtgactttgtggccaaagtggatgaccccaaattggctaattctgagggtacatcagatgcctgggttgaccagttcacaagaccagtaaacacatctgcccttgatatggagtttgaacgagccaagtcagctatagagtctgatgtcgatttctgggacaagttgcaggcagagttggaggagatggcaaaacgggatgctgaggcccacccctggctttctgactatgatgaccttacgtcagctacctatgataaggggtaccagtttgaggaggagaaccccttgcgtgatcaccctcagccttttgaagaagggctgcggcgccttcaggagggggacctgccaaatgctgtgctgctttttgaggcagctgtgcagcaggatcctaagcacatggaagcttggcagtatctgggtaccacccaggcagagaatgaacaagaactattagccatcagtgcattgcggaggtgtctggagctaaagccagataaccagacagcactgatggcgctggctgtgagcttcaccaacgagtccctgcagcgacaggcctgtgaaaccctacgagactggctgcggtacacaccagcctatgcccatctggtgacacctgctgaagaaggggctggtggggcaggactgggccccagcaagcgtatcctgggatctctcttgtctgactccctgtttcttgaagtgaaagagctcttcctggcagctgtgcggctggaccctacctccattgaccctgatgtgcagtgtggcttgggagtccttttcaacctgagtggggagtatgacaaggccgtggactgcttcacagctgccctcagcgttcgtcccaatgactatttgctgtggaataagctaggcgccaccctggccaatggaaaccagagtgaagaagcagtagctgcgtaccgccgggccctcgagctccagcctggctatatccggtcccgctataacctgggcatcagctgcatcaacctcggggctcaccgtgctcatttaaaactgttaagtccagtataattttccctgatatgaaaaaatgtgcatttttttcacttagcaacaaagtaccttctaatttccaatagtccgtgaaagttggggctgaagtacctaagtgtgaatgtctctcccgttaaactgagtgtagaaatctgaatttttaaaagagctgtaactagttgtaagtgcttaggaagaaactttgcaaacatttaatgaggatacactgatcatttttaaaattccttcacactgtaatataatgtgttttatattcttatgtagtaaaacaacataactcagatttctacaggagacagtggtaatattaagattgtcatctgtaatagataacaataaaactggatgaacataaa

SEQ ID NO: 358318 - DNA, 564 bp, Homo sapiens
gggaagtgcgcaggcgcgggtcggggtgggtgtggaggtggcaacgactccccgggtaggtcgcccccagtcaggggtcatactgctcactgtcccgggtcgcttagggagttcgtggagcgggaggtgatcgacttcgcccgacggaatccaggggtcgtaatatatgtaaactcgcgtccgtgctgcgtgcccagagtagtggccgaataccgatgcggctgagttcctcggcgaaggagcagggccctgctggtactccattgttgctctgcctcagaagcacatagctattgccattcatcctccgcagccggctgggcagtgccaccaagccattggacactggcctgagactgtctgcagttgcaccgcagatcctcctgcccggctggcccgacccaatatcagttcagtcatccgatcttccttggggaaatacccattaccgtcctgaacccttgtcatccactacttggctataagctccagaagtgacaagacacttcacatcttaaatatgtttcctagtttataattcatttgggcagtaaatgtttgttg

SEQ ID NO: 358319 - DNA, 1012 bp, Homo sapiens
ccggaagcctcgaggtttagtcccgcccccctctcctcgctgcttaggctccgcggcctccaagctgtagctatgacggcgcgcgggactccgagccgcttcttggccagcgttctccacaacggactgggtcgctatgtgcagcagctgcagcgtctgagcttcagcgtcagccgcgacggcgcctcgtctcgcggcgccagggagttcgtggagcgggaggtgatcgacttcgcccgacggaatccaggggtcgtaatatatgtaaactcgcgtccgtgctgcgtgcccagagtagtggccgaataccttaacggggctgtgcgcgaggagagcatccactgcaagtcggtcgaggagatctcgacgctggtgcagaagctggccgaccagtcgggcttggacgtgatccgcatccgcaagcccttccacaccgacaaccctagcatccagggccagtggcaccccttcaccaacaagccgaccacgttccgcgggctacgcccccgagaggttcaggatcctgccccagcccaggtgcaagcacagtgaagagttgccccaccaactgcagccccaggctttggactgttactccggtaaaggtggttcttcccctttgggattccaagcccaggcaaatggaacccatcaatgggcaagttgacagaggttctgcttgggataatgaagagctgcctgtttctttccagtgcctgcttctgggggcagtgaccttgtgaaccactcatttttatgcaagtggcatccctaaaacctgagatgaggaagacttcaagggttttacaggacccttgttttttaaatccaaattgataataatgatctcaaaacacagtgagaggtctgaaggctggcttctgaagaatccctgatgtcttattggaacaaccactgagctacggagagctctgctgtgatgggctaggcactttatatctgtgtgaatacagatttataaaacaggttaataaacttatccaaggtcaca

SEQ ID NO: 358320 - DNA, 239 bp, Homo sapiens
tctccgctcaaccgaacactctcgtctcgcggcgccagggagttcgtggagcgggaggtgatcgacttcgcccgacccaatatcagttcagtcatccgatcttccttggggaaatacccattaccgtcctgaacccttgtcatccactacttggctataagctccagaagtgacaagacacttcacatcttaaatatgtttcctagtttataattcatttgggcagtaaatgtttgttg

SEQ ID NO: 358321 - DNA, 1111 bp, Homo sapiens
ccggaagcctcgaggtttagtcccgcccccctctcctcgctgcttaggctccgcggcctccaagctgtagctatgacggcgcgcgggactccgagccgcttcttggccagcgttctccacaacggactgggtcgctatgtgcagcagctgcagcgtctgagcttcagcgtcagccgcgacggcgcctcgtctcgcggcgccagggagttcgtggagcgggaggtgatcgacttcgcccgacggaatccaggggtcgtaatatatgtaaactcgcgtccgtgctgcgtgcccagagtagtggccgaataccttaacggggctgtgcgcgaggagagcatccactgcaagtcggtcgaggagatctcgacgctggtgcagaagctggccgaccagtcgggcttggacgtgatccgcatccgcaagcccttccacaccgacaaccctagcatccagggccagtggcaccccttcaccaacaagccgaccacgttccgcgggctacgcccccgagaggttcaggatcctgccccagcccaggtgcaagcacagtgaagagttgccccaccaactgcagccccaggctttggactgttactccggtaaaggtggttcttcccctttgggattccaagcccaggcaaatggaacccatcaatgggcaagttgacagaggttctgcttgggataatgaagagctgcctgtttctttccagtgcctgcttctgggggcagtgaccttgtgaaccactcatttttatgcaagtggcatccctaaaacctgagatgaggaagacttcaagggttttacaggacccttgttttttaaatccaaattgataataatgatctcaaaacacagtgagaggtctgaaggctggcttctgaagaatccctgatgtcttattggaacaaccactgagctacggagagctctgctgtgatgggctaggcactttatatctgtgtgaatacagatttataaaacaggttaataaacttatccaaggtcacaaacttccttatctctctattcacacccccaatatcctctctctcctcttttctcgccaaaacggggcggcccacaggagccccatataacactcgctcg

SEQ ID NO: 358322 - DNA, 916 bp, Homo sapiens
gggaagtgcgcaggcgcgggtcggggtgggtgtggaggtggcaacgactccccgggtaggtcgcccccagtcaggggtcatactgctcactgtcccgggtcgcttagggagttcgtggagcgggaggtgatcgacttcgcccgacggaatccaggggtcgtaatatatgtaaactcgcgtccgtgctgcgtgcccagagtagtggccgaataccttaacggggctgtgcgcgaggagagcatccactgcaagtcggtcgaggagatctcgacgctggtgcagaagctggccgaccagtcgggcttggacgtgatccgcatccgcaagcccttccacaccgacaaccctagcatccagggccagtggcaccccttcaccaacaagccgaccacgttccgcgggctacgcccccgagaggttcaggatcctgccccagcccaggtgcaagcacagtgaagagttgccccaccaactgcagccccaggctttggactgttactccggtaaaggtggttcttcccctttgggattccaagcccaggcaaatggaacccatcaatgggcaagttgacagaggttctgcttgggataatgaagagctgcctgtttctttccagtgcctgcttctgggggcagtgaccttgtgaaccactcatttttatgcaagtggcatccctaaaacctgagatgaggaagacttcaagggttttacaggacccttgttttttaaatccaaattgataataatgatctcaaaacacagtgagaggtctgaaggctggcttctgaagaatccctgatgtcttattggaacaaccactgagctacggagagctctgctgtgatgggctaggcactttatatctgtgtgaatacagatttataaaacaggttaataaacttatccaaggtcaca

SEQ ID NO: 358323 - DNA, 903 bp, Homo sapiens
ctgacggcctagggtgcgaggctgggtggtctcctcgctgcttaggctccgcggcctccaagctgtagctatgacggcgcgcgggactccgagccgcttcttggccagcgttctccacaacggactgggtcgctatgtgcagcagctgcagcgtctgagcttcagcgtcagccgcgacggcgcctcgtctcgcggcgccagttaacggggctgtgcgcgaggagagcatccactgcaagtcggtcgaggagatctcgacgctggtgcagaagctggccgaccagtcgggcttggacgtgatccgcatccgcaagcccttccacaccgacaaccctagcatccagggccagtggcaccccttcaccaacaagccgaccacgttccgcgggctacgcccccgagaggttcaggatcctgccccagcccaggtgcaagcacagtgaagagttgccccaccaactgcagccccaggctttggactgttactccggtaaaggtggttcttcccctttgggattccaagcccaggcaaatggaacccatcaatgggcaagttgacagaggttctgcttgggataatgaagagctgcctgtttctttccagtgcctgcttctgggggcagtgaccttgtgaaccactcatttttatgcaagtggcatccctaaaacctgagatgaggaagacttcaagggttttacaggacccttgttttttaaatccaaattgataataatgatctcaaaacacagtgagaggtctgaaggctggcttctgaagaatccctgatgtcttattggaacaaccactgagctacggagagctctgctgtgatgggctaggcactttatatctgtgtgaatacagatttataaaacaggttaataaacttatccaaggtcaca

SEQ ID NO: 358324 - DNA, 1033 bp, Homo sapiens
ccggaagcctcgaggtttagtcccgcccccctctcctcgctgcttaggctccgcggcctccaagctgtagctatgacggcgcgcgggactccgagccgcttcttggccagcgttctccacaacggactgggtcgctatgtgcagcagctgcagcgtctgagcttcagcgtcagccgcgacggcgcctcgtctcgcggcgccagggagttcgtggagcgggaggtgatcgacttcgcccgacggaatccaggggtcgtaatatatgtaaactcgcgtccgtgctgcgtgcccagagtagtggccgaataccttaacggggctgtgcgcgaggagagcatccactgcaagtcggtcgaggagatctcgacgctggtgcagaagctggccgaccagtcgggcttggacgtgatccgcatccgcaagcccttccacaccgacaaccctagcatccagggccagtggcaccccttcaccaacaagccgaccacgttccgcgggctacgcccccgagaggttcaggatcctgccccagcccaggtgcaagcacagtgaagagttgccccaccaactgcagccccaggctttggactgttactccggtaaaggtggttcttcccctttgggattccaagcccaggcaaatggaacccatcaatgggcaagttgacagaggttctgcttgggataatgaagagctgcctgtttctttccagtgcctgcttctgggggcagtgaccttgtgaaccactcatttttatgcaagtggcatccctaaaacctgagatgaggaagacttcaagggttttacaggacccttgtttttaatcaatgtatatgatctcaaccggagagttgagctggtctgagatctgatgtttttggacaccctgcttcggagtctctggaggcttggcttttggtgaccgtttaccggttactccggccttcaaaaacccctttggggaaggaggcggcttccctttagagccgtgtaaaatagaaagtttacgcgctccacccattcctcccttgg

SEQ ID NO: 358325 - DNA, 898 bp, Homo sapiens
ccggaagcctcgaggtttagtcccgcccccctctcctcgctgcttaggctccgcggcctccaagctgtagctatgacggcgcgcgggactccgagccgcttcttggccagcgttctccacaacggactgggtcgctatgtgcagcagctgcagcgtctgagcttcagcgtcagccgcgacggcgcctcgtctcgcggcgccagggagttcgtggagcgggaggtgatcgacttcgcccgacggaatccaggggtcgtaatatatgtaaactcgcgtccgtgctgcgtgcccagagtagtggccgaataccttaacggggctgtgcgcgaggagagcatccactgcaagtcggtcgaggagatctcgacgctggtgcagaagctggccgaccagtcgggcttggacgtgatccgcatccgcaagcccttccacaccgacaaccctagcatccagggccagtggcaccccttcaccaacaagccgaccacgttccgcgggctacgcccccgagaggttcaggatcctgccccagcccaggtgcaagcacagtgaagagttgccccaccaactgcagccccaggctttggactgttactccgtgcctgcttctgggggcagtgaccttgtgaaccactcatttttatgcaagtggcatccctaaaacctgagatgaggaagacttcaagggttttacaggacccttgttttttaaatccaaattgataataatgatctcaaaacacagtgagaggtctgaaggctggcttctgaagaatccctgatgtcttattggaacaaccactgagctacggagagctctgctgtgatgggctaggcactttatatctgtgtgaatacagatttataaaacaggttaataaacttatccaaggtcaca

SEQ ID NO: 358326 - DNA, 760 bp, Homo sapiens
ccggaagcctcgaggtttagtcccgcccccctctcctcgctgcttaggctccgcggcctccaagctgtagctatgacggcgcgcgggactccgagccgcttcttggccagcgttctccacaacggactgggtcgctatgtgcagcagctgcagcgtctgagcttcagcgtcagccgcgacggcgcctcgtctcgcggcgccagggagttcgtggagcgggaggtgatcgacttcgcccgacggaatccaggggtcgtaatatatgtaaactcgcgtccgtgctgcgtgcccagagtagtggccgaataccttaacggggctgtgcgcgaggagagcatccactgcaagtcggtcgaggagatctcgacgctggtgcagaagctggccgaccagtcgggcttggacgtgatccgcatccgcaagcccttccacaccgacaaccctagcatccagggccagtggcaccccttcaccaacaagccgaccacgttccgcgggctacgcccccgagaggttcaggatcctgccccagcccaggacactggcctgagactgtctgcagttgcaccgcagatcctcctgcccggctggcccgacccaatatcagttcagtcatccgatcttccttggggaaatacccattaccgtcctgaacccttgtcatccactacttggctataagctccagaagtgacaagacacttcacatcttaaatatgtttcctagtttataattcatttgggcagtaaatgtttgttg

SEQ ID NO: 358327 - DNA, 887 bp, Homo sapiens
ccggaagcctcgaggtttagtcccgcccccctctcctcgctgcttaggctccgcggcctccaagctgtagctatgacggcgcgcgggactccgagccgcttcttggccagcgttctccacaacggactgggtcgctatgtgcagcagctgcagcgtctgagcttcagcgtcagccgcgacggcgcctcgtctcgcggcgccagggagttcgtggagcgggaggtgatcgacttcgcccgacggaatccaggggtcgtaatatatgtaaactcgcgtccgtgctgcgtgcccagagtagtggccgaataccttaacggggctgtgcgcgaggagagcatccactgcaagtcggtcgaggagatctcgacgctggtgcagaagctggccgaccagtcgggcttggacgtgatccgcatccgcaagcccttccacaccgacaaccctagcatccagggccagtggcaccccttcaccaacaagccgaccacgttccgcgggctacgcccccgagaggttcaggatcctgccccagcccaggatgcggctgagttcctcggcgaaggagcagggccctgctggtactccattgttgctctgcctcagaagcacatagctattgccattcatcctccgcagccggctgggcagtgccaccaagccattggacactggcctgagactgtctgcagttgcaccgcagatcctcctgcccggctggcccgacccaatatcagttcagtcatccgatcttccttggggaaatacccattaccgtcctgaacccttgtcatccactacttggctataagctccagaagtgacaagacacttcacatcttaaatatgtttcctagtttataattcatttgggcagtaaatgtttgttg

SEQ ID NO: 358328 - DNA, 1016 bp, Homo sapiens
ccggaagcctcgaggtttagtcccgcccccctctcctcgctgcttaggctccgcggcctccaagctgtagctatgacggcgcgcgggactccgagccgcttcttggccagcgttctccacaacggactgggtcgctatgtgcagcagctgcagcgtctgagcttcagcgtcagccgcgacggcgcctcgtctcgcggcgccagggagttcgtggagcgggaggtgatcgacttcgcccgacggaatccaggggtcgtaatatatgtaaactcgcgtccgtgctgcgtgcccagagtagtggccgaataccttaacggggctgtgcgcgaggagagcatccactgcaagtcggtcgaggagatctcgacgctggtgcagaagctggccgaccagtcgggcttggacgtgatccgcatccgcaagcccttccacaccgacaaccctagcatccagggccagtggcaccccttcaccaacaagccgaccacgttccgcgggctacgcccccgagaggttcaggatcctgccccagcccaggatgcggctgagttcctcggcgaaggagcagggccctgctggtactccattgttgctctgcctcagaagcacatagctattgccattcatcctccgcagccggctgggcagtgccaccaagccattggtcagctcagccggtggcggtgggggcggtgggggtggtggggctggggctccctccccagggatgatctggagacagctgccctccaggcccccagcccctcatcatcaccctcatcttcctctccaggacactggcctgagactgtctgcagttgcaccgcagatcctcctgcccggctggcccgacccaatatcagttcagtcatccgatcttccttggggaaatacccattaccgtcctgaacccttgtcatccactacttggctataagctccagaagtgacaagacacttcacatcttaaatatgtttcctagtttataattcatttgggcagtaaatgtttgttg

SEQ ID NO: 358329 - DNA, 892 bp, Homo sapiens
ccggaagcctcgaggtttagtcccgcccccctctcctcgctgcttaggctccgcggcctccaagctgtagctatgacggcgcgcgggactccgagccgcttcttggccagcgttctccacaacggactgggtcgctatgtgcagcagctgcagcgtctgagcttcagcgtcagccgcgacggcgcctcgtctcgcggcgccagggagttcgtggagcgggaggtgatcgacttcgcccgacggaatccaggggtcgtaatatatgtaaactcgcgtccgtgctgcgtgcccagagtagtggccgaataccttaacggggctgtgcgcgaggagagcatccactgcaagtcggtcgaggagatctcgacgctggtgcagaagctggccgaccagtcgggcttggacgtgatccgcatccgcaagcccttccacaccgacaaccctagcatccagggccagtggcaccccttcaccaacaagccgaccacgttccgcgggctacgcccccgagaggttcaggatcctgccccagcccaggacactggcctgagactgtctgcagttgcaccgcagatcctcctgcccggctggcccgacccaacacgagccacacgggccacacggtgactgctgcggctctgagtgaagctgccagagccctcctcagtggcacgctccgtgaagaagtagtacaccttgtcatcatcacccactgcactggccttgctctcccgcacgaggacggagaacacaaactccgcatctgtgggtcaggcagtttgagaggcttttgagacaggctggggattcctttccctcactctgaggctgacccctcacttgacaacacacaggaatggaatggacaggctcacctggggatttgggggtg

SEQ ID NO: 358330 - DNA, 715 bp, Homo sapiens
ctgacggcctagggtgcgaggctgggtggtctcctcgctgcttaggctccgcggcctccaagctgtagctatgacggcgcgcgggactccgagccgcttcttggccagcgttctccacaacggactgggtcgctatgtgcagcagctgcagcgtctgagcttcagcgtcagccgcgacggcgcctcgtctcgcggcgccagggagttcgtggagcgggaggtgatcgacttcgcccgacggaatccaggggtcgtaatatatgtaaactcgcgtccgtgctgcgtgcccagagtagtggccgaataccttaacggggctgtgcgcgaggagagcatccactgcaagtcggtcgaggagatctcgacgctggtgcagaagctggccgaccagtcgggcttggacgtgatccgcagtggcaccccttcaccaacaagccgaccacgttccgcgggctacgcccccgagaggttcaggatcctgccccagcccaggacactggcctgagactgtctgcagttgcaccgcagatcctcctgcccggctggcccgacccaatatcagttcagtcatccgatcttccttggggaaatacccattaccgtcctgaacccttgtcatccactacttggctataagctccagaagtgacaagacacttcacatcttaaatatgtttcctagtttataattcatttgggcagtaaatgtttgttg

SEQ ID NO: 358331 - DNA, 498 bp, Homo sapiens
tttgccatgttgcccaggctggtctccaattcctgagctcaagcaatccacctacctcagcctcccgaagtgctgggattacaggcgtgagccactgtactcagccaggtttgaattctggtccagtttcttaatagctgaataagtttgagcaatttacttacactccctgggcttcagagaggtccctcatggggataataataatggcacctttctcataagaatgctgtgacagtagatgacatcatgcatagaagtatttagatcagtgtctggcacacagtaaatacttaatacatcttagctgtgatgattaacttttgttctttcttcagatatcagttcagtcatccgatcttccttggggaaatacccattaccgtcctgaacccttgtcatccactacttggctataagctccagaagtgacaagacacttcacatcttaaatatgtttcctagtttataattcatttgggcagtaaatgtttgttg

SEQ ID NO: 358332 - DNA, 437 bp, Homo sapiens
gggaagtgcgcaggcgcgggtcggggtgggtgtggaggtggcaacgactccccgggtaggtcgcccccagtcaggggtcatactgctcactgtcccgggtcgcttagggagttcgtggagcgggaggtgatcgacttcgcccgacggaatccaggggtcgtaatatatgtaaactcgcgtccgtgctgcgtgcccagagtagtggccgaataccgacactggcctgagactgtctgcagttgcaccgcagatcctcctgcccggctggcccgacccaatatcagttcagtcatccgatcttccttggggaaatacccattaccgtcctgaacccttgtcatccactacttggctataagctccagaagtgacaagacacttcacatcttaaatatgtttcctagtttataattcatttgggcagtaaatgtttgttg

SEQ ID NO: 358333 - DNA, 1392 bp, Homo sapiens
ccggaagcctcgaggtttagtcccgcccccctctcctcgctgcttaggctccgcggcctccaagctgtagctatgacggcgcgcgggactccgagccgcttcttggccagcgttctccacaacggactgggtcgctatgtgcagcagctgcagcgtctgagcttcagcgtcagccgcgacggcgcctcgtctcgcggcgccagggagttcgtggagcgggaggtgatcgacttcgcccgacggaatccaggggtcgtaatatatgtaaactcgcgtccgtgctgcgtgcccagagtagtggccgaataccttaacggggctgtgcgcgaggagagcatccactgcaagtcggtcgaggagatctcgacgctggtgcagaagctggccgaccagtcgggcttggacgtgatccgcatccgcaagcccttccacaccgacaaccctagcatccagggccagtggcaccccttcaccaacaagccgaccacgttccgcgggctacgcccccgagaggttcaggatcctgccccagcccaggtgcaagcacagtgaagagttgccccaccaactgcagccccaggctttggactgttactccggtaaaggtggttcttcccctttgggattccaagcccaggcaaatggaacccatcaatgggcaagttgacagaggttctgcttgggataatgaagagctgcctgtttctttccagtgcctgcttctgggggcagtgaccttgtgaaccactcatttttatgcaagtggcatccctaaaacctgagatgaggaagacttcaagggttttacaggacccttgttttttaaatccaaattgataataatgatctcaaaacacagtgagaggtctgaaggctggcttctgaagaatccctgatgtcttattggaacaaccactgagctacggagagctctgctgtgatgggctaggcactttatatctgtgtgaatacagatttataaaacaggttaataaacttatccaaggtcacaaaaacaccacaaaacacaaaacacaaaaaaacacccggggcccaaatagcaggggggggacacaacgcgatagaaggggccaggggcaacgggtccgcgacccacgtttttgcccagcggggaaacacggggggccccataaggggggcgaaaattcgaaacacgggactcaccctactctgctgcactctgctagccgccgagaccccgacatcgggcgggttttttgtgtgaacacagcagggcgctcagcaaggacatatctggagtcggtgctagcttccgcatacactatccacccaagaacgctggttggcgcagtccgaaatccagacaactatcctgacgcgcggtgctaccaccggaccacccatcagcac

SEQ ID NO: 358334 - DNA, 1124 bp, Homo sapiens
ctgacggcctagggtgcgaggctgggtggtctcctcgctgcttaggctccgcggcctccaagctgtagctatgacggcgcgcgggactccgagccgcttcttggccagcgttctccacaacggactgggtcgctatgtgcagcagctgcagcgtctgagcttcagcgtcagccgcgacggcgcctcgtctcgcggcgccagggagttcgtggagcgggaggtgatcgacttcgcccgacggaatccaggggtcgtaatatatgtaaactcgcgtccgtgctgcgtgcccagagtagtggccgaataccgtgagtggggccgggctcgggctggagggcgggatcaggggctcgacccgctatcctccttctcgcttggtcgcaccggccagcttccacccactctcacccctcttctgccagttaacggggctgtgcgcgaggagagcatccactgcaagtcggtcgaggagatctcgacgctggtgcagaagctggccgaccagtcgggcttggacgtgatccgcatccgcaagcccttccacaccgacaaccctagcatccagggccagtggcaccccttcaccaacaagccgaccacgttccgcgggctacgcccccgagaggttcaggatcctgccccagcccaggtgcaagcacagtgaagagttgccccaccaactgcagccccaggctttggactgttactccggtaaaggtggttcttcccctttgggattccaagcccaggcaaatggaacccatcaatgggcaagttgacagaggttctgcttgggataatgaagagctgcctgtttctttccagtgcctgcttctgggggcagtgaccttgtgaaccactcatttttatgcaagtggcatccctaaaacctgagatgaggaagacttcaagggttttacaggacccttgttttttaaatccaaattgataataatgatctcaaaacacagtgagaggtctgaaggctggcttctgaagaatccctgatgtcttattggaacaaccactgagctacggagagctctgctgtgatgggctaggcactttatatctgtgtgaatacagatttataaaacaggttaataaacttatccaaggtcaca

SEQ ID NO: 358335 - DNA, 967 bp, Homo sapiens
ctgacggcctagggtgcgaggctgggtggtctcctcgctgcttaggctccgcggcctccaagctgtagctatgacggcgcgcgggactccgagccgcttcttggccagcgttctccacaacggactgggtcgctatgtgcagcagctgcagcgtctgagcttcagcgtcagccgcgacggcgcctcgtctcgcggcgccagggagttcgtggagcgggaggtgatcgacttcgcccgacggaatccaggggtcgtaatatatgtaaactcgcgtccgtgctgcgtgcccagagtagtggccgaataccttaacggggctgtgcgcgaggagagcatccactgcaagtcggtcgaggagatctcgacgctggtgcagaagctggccgaccagtcgggcttggacgtgatccgcagtggcaccccttcaccaacaagccgaccacgttccgcgggctacgcccccgagaggttcaggatcctgccccagcccaggtgcaagcacagtgaagagttgccccaccaactgcagccccaggctttggactgttactccggtaaaggtggttcttcccctttgggattccaagcccaggcaaatggaacccatcaatgggcaagttgacagaggttctgcttgggataatgaagagctgcctgtttctttccagtgcctgcttctgggggcagtgaccttgtgaaccactcatttttatgcaagtggcatccctaaaacctgagatgaggaagacttcaagggttttacaggacccttgttttttaaatccaaattgataataatgatctcaaaacacagtgagaggtctgaaggctggcttctgaagaatccctgatgtcttattggaacaaccactgagctacggagagctctgctgtgatgggctaggcactttatatctgtgtgaatacagatttataaaacaggttaataaacttatccaaggtcaca

SEQ ID NO: 358336 - DNA, 836 bp, Homo sapiens
ccggaagcctcgaggtttagtcccgcccccctctcctcgctgcttaggctccgcggcctccaagctgtagctatgacggcgcgcgggactccgagccgcttcttggccagcgttctccacaacggactgggtcgctatgtgcagcagctgcagcgtctgagcttcagcgtcagccgcgacggcgcctcgtctcgcggcgccagggagttcgtggagcgggaggtgatcgacttcgcccgacggaatccaggggtcgtaatatatgtaaactcgcgtccgtgctgcgtgcccagagtagtggccgaataccttaacggggctgtgcgcgaggagagcatccactgcaagtcggtcgaggagatctcgacgctggtgcagaagctggccgaccagtcgggcttggacgtgatccgcatccgcaagcccttccacaccgacaaccctagcatccagggccagtggcaccccttcaccaacaagccgaccacgttccgcgggctacgcccccgagaggttcaggatcctgccccagcccagtgcctgcttctgggggcagtgaccttgtgaaccactcatttttatgcaagtggcatccctaaaacctgagatgaggaagacttcaagggttttacaggacccttgttttttaaatccaaattgataataatgatctcaaaacacagtgagaggtctgaaggctggcttctgaagaatccctgatgtcttattggaacaaccactgagctacggagagctctgctgtgatgggctaggcactttatatctgtgtgaatacagatttataaaacaggttaataaacttatccaaggtcaca

SEQ ID NO: 358337 - DNA, 822 bp, Homo sapiens
ccggaagcctcgaggtttagtcccgcccccctctcctcgctgcttaggctccgcggcctccaagctgtagctatgacggcgcgcgggactccgagccgcttcttggccagcgttctccacaacggactgggtcgctatgtgcagcagctgcagcgtctgagcttcagcgtcagccgcgacggcgcctcgtctcgcggcgccagggagttcgtggagcgggaggtgatcgacttcgcccgacggaatccaggggtcgtaatatatgtaaactcgcgtccgtgctgcgtgcccagagtagtggccgaataccttaacggggctgtgcgcgaggagagcatccactgcaagtcggtcgaggagatctcgacgctggtgcagaagctggccgaccagtcgggcttggacgtgatccgcatccgcaagcccttccacaccgacaaccctagcatccagggccagtggcaccccttcaccaacaagccgaccacgttccgcgggctacgcccccgagaggttcaggatcctgccccagcccaggtgcaagcacagtgaagagttgccccaccaactgcagccccaggctttggactgttactccggacactggcctgagactgtctgcagttgcaccgcagatcctcctgcccggctggcccgacccaatatcagttcagtcatccgatcttccttggggaaatacccattaccgtcctgaacccttgtcatccactacttggctataagctccagaagtgacaagacacttcacatcttaaatatgtttcctagtttataattcatttgggcagtaaatgtttgttg

SEQ ID NO: 358338 - DNA, 1051 bp, Homo sapiens
ccggaagcctcgaggtttagtcccgcccccctctcctcgctgcttaggctccgcggcctccaagctgtagctatgacggcgcgcgggactccgagccgcttcttggccagcgttctccacaacggactgggtcgctatgtgcagcagctgcagcgtctgagcttcagcgtcagccgcgacggcgcctcgtctcgcggcgccagggagttcgtggagcgggaggtgatcgacttcgcccgacggaatccaggggtcgtaatatatgtaaactcgcgtccgtgctgcgtgcccagagtagtggccgaataccttaacggggctgtgcgcgaggagagcatccactgcaagtcggtcgaggagatctcgacgctggtgcagaagctggccgaccagtcgggcttggacgtgatccgcatccgcaagcccttccacaccgacaaccctagcatccagggccagtggcaccccttcaccaacaagccgaccacgttccgcgggctacgcccccgagaggttcaggatcctgccccagcccaggatgcggctgagttcctcggcgaaggagcagggccctgctggtactccattgttgctctgcctcagaagcacatagctattgccattcatcctccgcagccggctgggcagtgccaccaagccattggtcagctcagccggtggcggtgggggcggtgggggtggtggggctggggctccctccccagggatgatctggagacagctgccctccaggcccccagcccctcatcatcaccctcatcttcctctccaggacactggcctgagactgtctgcagttgcaccgcagatcctcctgcccggctggcccgacccaccagacctccccacagtggatcctatctcatcctcattgacctctgctccagcccctatgctgtccgcagtttcttgcctcccgattgtccctgcactgaccactgtgtgctcagcgtgaaggctgcatagaagtgtgtacggcttgaggtttcagcatccaggctgcagaccccacgcagtgtctcatacagtg

SEQ ID NO: 358339 - DNA, 922 bp, Homo sapiens
ccggaagcctcgaggtttagtcccgcccccctctcctcgctgcttaggctccgcggcctccaagctgtagctatgacggcgcgcgggactccgagccgcttcttggccagcgttctccacaacggactgggtcgctatgtgcagcagctgcagcgtctgagcttcagcgtcagccgcgacggcgcctcgtctcgcggcgccagggagttcgtggagcgggaggtgatcgacttcgcccgacggaatccaggggtcgtaatatatgtaaactcgcgtccgtgctgcgtgcccagagtagtggccgaataccttaacggggctgtgcgcgaggagagcatccactgcaagtcggtcgaggagatctcgacgctggtgcagaagctggccgaccagtcgggcttggacgtgatccgcatccgcaagcccttccacaccgacaaccctagcatccagggccagtggcaccccttcaccaacaagccgaccacgttccgcgggctacgcccccgagaggttcaggatcctgccccagcccaggatgcggctgagttcctcggcgaaggagcagggccctgctggtactccattgttgctctgcctcagaagcacatagctattgccattcatcctccgcagccggctgggcagtgccaccaagccattggacactggcctgagactgtctgcagttgcaccgcagatcctcctgcccggctggcccgacccaccagacctccccacagtggatcctatctcatcctcattgacctctgctccagcccctatgctgtccgcagtttcttgcctcccgattgtccctgcactgaccactgtgtgctcagcgtgaaggctgcatagaagtgtgtacggcttgaggtttcagcatccaggctgcagaccccacgcagtgtctcatacagtg

SEQ ID NO: 358340 - DNA, 531 bp, Homo sapiens
ctgacggcctagggtgcgaggctgggtggtctcctcgctgcttaggctccgcggcctccaagctgtagctatgacggcgcgcgggactccgagccgcttcttggccagcgttctccacaacggactgggtcgctatgtgcagcagctgcagcgtctgagcttcagcgtcagccgcgacggcgcctcgtctcgcggcgccagggagttcgtggagcgggaggtgatcgacttcgcccgacggaatccaggggtcgtaatatatgtaaactcgcgtccgtgctgcgtgcccagagtagtggccgaataccgacactggcctgagactgtctgcagttgcaccgcagatcctcctgcccggctggcccgacccaatatcagttcagtcatccgatcttccttggggaaatacccattaccgtcctgaacccttgtcatccactacttggctataagctccagaagtgacaagacacttcacatcttaaatatgtttcctagtttataattcatttgggcagtaaatgtttgttg

SEQ ID NO: 358341 - DNA, 1294 bp, Homo sapiens
ttttttgtagagacagggtttcgccatgttgcctaggctggtctccaacctggtctcctgggctcaagcgatccgcccgcctcggcctcccacagtgctgggattccaggcgtgagctaccgcgcccggcctatttacttttcttactaagctggggatcaccgtcgccctcggcttggcaggaaggcgggggtgcaagaagaaaagaggtacagaacacccagaggtgccctcgattccgtcttgcacttgcccttctcccaccgtccagcaataaagcgagagaaacaagtgcaggaaactggccggcagtcatgggagaagccaaaaagacaggagttcagtggcatgaccagggctcactgcaaccttgatctgggctcaagtgatcctcctacctcagcttcctgagtagctaggaccacaggtgtgcaccaaccacacccgactaatttttgtagagatgagatcccactatgttacccaggctggtcttgaactcctgggctcaggtgatcatcctgccttggcttcccaaagtactgggattataggcttgagccaccgtgcctggcctgtgatcagaattctcatttttttagtcactaaaaatgctgggggggcactccattctccattatgtgattagttcacattgcatgcttgtatcaaaacatcatatataccccacaaatatatacaaaaaactttaaaattttaagtattaattgctcaggaaaaaattaaaatgctggggtgctgaaatctcaagggccccattacaaaactccttaggaacctcgccctctctctgctgtaaggactggttccagaatgagagaatttaaaagacattccccccccaaaatgttcataatgtcaccccggaaacctgcgaatatgttatattacatgaccagggagaagtaaggttgcagatggcagtaaggttgctaatgggctgaccttaagataaggagatgatcctggattatctgggtggacccaatgtaatcacaagggtccttaactgtggaatagtgaggtggctgagtcagaggcagagtgatgcaatgactgaaagacttaaccagccatcaccggctttgaatacggaagacggtcatgagccagggaatgcaggcaggctctgggagctgaaaaaagcaagaaaatggattctcccctggagcctccagaagggatgcggtcctgccaaccccttgtcagtgagccatttcagatttctgacttccaggactgtaagaaaataaacttgtcttgttttcagcca

SEQ ID NO: 358342 - DNA, 727 bp, Homo sapiens
ttttttgtagagacagggtttcgccatgttgcctaggctggtctccaacctggtctcctgggctcaagcgatccgcccgcctcggcctcccacagtgctgggattccaggcgtgagctaccgcgcccggcctatttacttttcttactaagctggggatcaccgtcgccctcggcttggcaggaaggcgggggtgcaagaagaaaagaggtacagaacacccagaggtgccctcgattccgtcttgcacttgcccttctcccaccgtccagcaataaagcgagagaaacaagtgcaggaaactggccggcagtcatgggagaagccaaaaagacaggtgagcagcgcgtccgcctcccgcgcacagccttggggagccggcgggatccagagcggggctcctctccgcactttgtagctgcgttgctccgctccatgccctgcctcagccactcctcctggttaccaggcaaaaggaaacaccttgagctggccaggagctaccagcgtctgtctacacctgggtgagccgtactggtcgtagtggccccaccctacaaggatgcccttcctacagtattactgatggctgtctaatccggttagctcccagtcactacaccccagcctcccagcgcctgcaggtggattgggttatcctcacatttgagtgaaactcctgcacaccagacactgaatcgagttgtctgggagcatctaactgcaag

SEQ ID NO: 358343 - DNA, 1303 bp, Homo sapiens
gaaaccttggacaatacctggctttcctaggcagaggtccctgcggccttccgcagtgttttttgtccctgggtacttgagattagggagtggtgatgactcttaacaagcatgctgccttcaagcatttgtttaacaaagcacaccttgcacagcccttaagccatttaaccctgagttgacacagcacatgtctcagggagcacagggttgggggtagggttacagattaacagcatcttaaggcagaagaatttttcttacagaacaaaatggagtctcctatgtctacttttttctacacagacacagtaacaatctgatctctctttcttttccccacaggagttcagtggcatgaccagggctcactgcaaccttgatctgggctcaagtgatcctcctacctcagcttcctgagtagctaggaccacaggtgtgcaccaaccacacccgactaatttttgtagagatgagatcccactatgttacccaggctggtcttgaactcctgggctcaggtgatcatcctgccttggcttcccaaagtactgggattataggcttgagccaccgtgcctggcctgtgatcagaattctcatttttttagtcactaaaaatgctgggggggcactccattctccattatgtgattagttcacattgcatgcttgtatcaaaacatcatatataccccacaaatatatacaaaaaactttaaaattttaagtattaattgctcaggaaaaaattaaaatgctggggtgctgaaatctcaagggccccattacaaaactccttaggaacctcgccctctctctgctgtaaggactggttccagaatgagagaatttaaaagacattccccccccaaaatgttcataatgtcaccccggaaacctgcgaatatgttatattacatgaccagggagaagtaaggttgcagatggcagtaaggttgctaatgggctgaccttaagataaggagatgatcctggattatctgggtggacccaatgtaatcacaagggtccttaactgtggaatagtgaggtggctgagtcagaggcagagtgatgcaatgactgaaagacttaaccagccatcaccggctttgaatacggaagacggtcatgagccagggaatgcaggcaggctctgggagctgaaaaaagcaagaaaatggattctcccctggagcctccagaagggatgcggtcctgccaaccccttgtcagtgagccatttcagatttctgacttccaggactgtaagaaaataaacttgtcttgttttcagcca

SEQ ID NO: 358344 - DNA, 427 bp, Homo sapiens
ttactaagctggggatcaccgtcgccctcggcttggcaggaaggcgggggtaggggagcggtgggaaaggggggtgggcgacgactctgatagagggaaaagaggaagggaaagttggggcttactgcagggcaagctccttaggagaaggtggggaggaggaaggagggaggtccaggcccttcttccatcccacgtcctccacttcccaaggtgcaagaagaaaagaggtacagaacacccagaggtgccctcgattccgtcttgcacttgcccttctcccaccgtccagcaataaagcgagagaaacaagtgcaggaaactggccggcagtcatgggagaagccaaaaagacaggtgagcagcgcgtccgcctcccgcgcacaggtgagggctcacttctgcctgtcggcggcggcacacacag

SEQ ID NO: 358345 - DNA, 697 bp, Homo sapiens
ttttttgtagagacagggtttcgccatgttgcctaggctggtctccaacctggtctcctgggctcaagcgatccgcccgcctcggcctcccacagtgctgggattccaggcgtgagctaccgcgcccggcctatttacttttcttactaagctggggatcaccgtcgccctcggcttggcaggaaggcgggggtgcaagaagaaaagaggtacagaacacccagaggtgccctcgattccgtcttgcacttgcccttctcccaccgtccagcaataaagcgagagaaacaagtgcaggaaactggccggcagtcatgggagaagccaaaaagacagccttggggagccggcgggatccagagcggggctcctctccgcactttgtagctgcgttgctccgctccatgccctgcctcagccactcctcctggttaccaggcaaaaggaaacaccttgagctggccaggagctaccagcgtctgtctacacctgggtgagccgtactggtcgtagtggccccaccctacaaggatgcccttcctacagtattactgatggctgtctaatccggttagctcccagtcactacaccccagcctcccagcgcctgcaggtggattgggttatcctcacatttgagtgaaactcctgcacaccagacactgaatcgagttgtctgggagcatctaactgcaag

SEQ ID NO: 358346 - DNA, 1637 bp, Homo sapiens
tgccggaaacagaataatggcgtctcgtagccccaggcgacagcgtggaggggcgggtctgtcgattggatgaacgcagctgagattactcccagccactaaggacgaagaggtggggcggtggcgtcccacgcctcgtgcgacagtgggcggggctttgttgcctgagtaaccgtatgatggtggtggtggtggtgtcttcctgtctcaacgatacctattttctagtgctgagatcctgagacaatgaatcatagtgaaagattcgttttcattgcagagtggtatgatccaaatgcttcacttcttcgacgttatgagcttttattttacccaggggatggatctgttgaaatgcatgatgtaaagaatcatcgcacctttttaaagcggaccaaatatgataacctgcacttggaagatttatttataggcaacaaagtgaatgtcttttctcgacaactggtattaattgactatggggatcaatatacagctcgccagctgggcagtaggaaagaaaaaacgctagccctaattaaaccagatgcaatatcaaaggctggagaaataattgaaataataaacaaagctggatttactataaccaaactcaaaatgatgatgctttcaaggaaagaagcattggattttcatgtagatcaccagtcaagaccctttttcaatgagctgatccagtttattacaactggtcctattattgccatggagattttaagagatgatgctatatgtgaatggaaaagactgctgggacctgcaaactctggagtggcacgcacagatgcttctgaaagcattagagccctctttggaacagatggcataagaaatgcagcgcatggccctgattcttttgcttctgcggccagagaaatggagttgttttttccttcaagtggaggttgtgggccggcaaacactgctaaatttactaattgtacctgttgcattgttaaaccccatgctgtcagtgaaggactgttgggaaagatcctgatggctatccgagatgcaggttttgaaatctcagctatgcagatgttcaatatggatcgggttaatgttgaggaattctatgaagtttataaaggagtagtgaccgaatatcatgacatggtgacagaaatgtattctggcccttgtgtagcaatggagattcaacagaataatgctacaaagacatttcgagaattttgtggacctgctgatcctgaaattgcccggcatttacgccctggaactctcagagcaatctttggtaaaactaagatccagaatgctgttcactgtactgatctgccagaggatggcctattagaggttcaatacttcttcaagatcttggataattagtggtgtggaaagtaaagaagtcacaggttgggacatttagacaagagtgaatcacacacgaggaatgtgttcattcttttattgtccgttgttttaacctgactgaatacaagatcaacaagagcactgtactcctggcaattattacatatgttagaacatggattttgcactgtagacaacatttaacaccagtctatggggtactgcattgctttttataaagttcaaaataaagatttattttcaaacaagtgact

SEQ ID NO: 358347 - DNA, 471 bp, Homo sapiens
tccccagacccccaaatctccaatttctcacaagtgaatttaggcaaactaaagaagacatctctgttccgaaattgcccggcatttacgccctggaactctcagagcaatctttggtaaaactaagatccagaatgctgttcactgtactgatctgccagaggatggcctattagaggttcaatacttcttcaagatcttggataattagtggtgtggaaagtaaagaagtcacaggttgggacatttagacaagagtgaatcacacacgaggaatgtgttcattcttttattgtccgttgttttaacctgactgaatacaagatcaacaagagcactgtactcctggcaattattacatatgttagaacatggattttgcactgtagacaacatttaacaccagtctatggggtactgcattgctttttataaagttcaaaataaagatttattttcaaacaagtgact

SEQ ID NO: 358348 - DNA, 1130 bp, Homo sapiens
  misc_feature (1123)..(1123): n is a, c, g, or t
  misc_feature (1125)..(1125): n is a, c, g, or t
  misc_feature (1130)..(1130): n is a, c, g, or t
tgccggaaacagaataatggcgtctcgtagccccaggcgacagcgtggaggggcgggtctgtcgattggatgaacgcagctgagattactcccagccactaaggacgaagaggtggggcggtggcgtcccacgcctcgtgcgacagtgggcggggctttgttgcctgagtaaccgtatgatggtggtggtggtggtgtcttcctgtctcaacgatacctattttctagtgctgagatcctgagacaatgaatcatagtgaaagattcgttttcattgcagagtggtatgatccaaatgcttcacttcttcgacgttatgagcttttattttacccaggggatggatctgttgaaatgcatgatgtaaagaatcatcgcacctttttaaagcggaccaaatatgataacctgcacttggaagatttatttataggcaacaaagtgaatgtcttttctcgacaactggtattaattgactatggggatcaatatacagctcgccagctgggcagtaggaaagaaaaaacgctagccctaattaaaccagatgcaatatcaaaggctggagaaataattgaaataataaacaaagctggatttactataaccaaactcaaaatgatgatgctttcaaggaaagaagcattggattttcatgtagatcaccagtcaagaccctttttcaatgagctgatccagtttattacaactggtcctattattgccatggagattttaagagatgatgctatatgtgaatggaaaagactgctgggacctgcaaactctggagtggcacgcacagatgcttctgaaagcattagagccctctttggaacagatggcataagaaatgcagcgcatggccctgattcttttgcttctgcggccagagaaatggagttgttttttccttcaagtggaggttgtgggccggcaaacactgctaaatttactaattgtacctgttgcattgttaaaccccatgctgtcagtgaaggtatgttgaatacacatatattcagtacattttgttaataggagagcaatgtttattttcttgatgtactttatgtatagaaaaataaagtatacttttaataaaaataacacctggtatgcngnccagn

SEQ ID NO: 358349 - DNA, 1470 bp, Homo sapiens
tgccggaaacagaataatggcgtctcgtagccccaggcgacagcgtggaggggcgggtctgtcgattggatgaacgcagctgagattactcccagccactaaggacgaagaggtggggcggtggcgtcccacgcctcgtgcgacagtgggcggggctttgttgcctgagtaaccgtatgatggtggtggtggtggtgtcttcctgtctcaacgatacctattttctagtgctgagatcctgagacaatgaatcatagtgaaagattcgttttcattgcagagtggtatgatccaaatgcttcacttcttcgacgttatgagcttttattttacccaggggatggatctgttgaaatgaacgctagccctaattaaaccagatgcaatatcaaaggctggagaaataattgaaataataaacaaagctggatttactataaccaaactcaaaatgatgatgctttcaaggaaagaagcattggattttcatgtagatcaccagtcaagaccctttttcaatgagctgatccagtttattacaactggtcctattattgccatggagattttaagagatgatgctatatgtgaatggaaaagactgctgggacctgcaaactctggagtggcacgcacagatgcttctgaaagcattagagccctctttggaacagatggcataagaaatgcagcgcatggccctgattcttttgcttctgcggccagagaaatggagttgttttttccttcaagtggaggttgtgggccggcaaacactgctaaatttactaattgtacctgttgcattgttaaaccccatgctgtcagtgaaggactgttgggaaagatcctgatggctatccgagatgcaggttttgaaatctcagctatgcagatgttcaatatggatcgggttaatgttgaggaattctatgaagtttataaaggagtagtgaccgaatatcatgacatggtgacagaaatgtattctggcccttgtgtagcaatggagattcaacagaataatgctacaaagacatttcgagaattttgtggacctgctgatcctgaaattgcccggcatttacgccctggaactctcagagcaatctttggtaaaactaagatccagaatgctgttcactgtactgatctgccagaggatggcctattagaggttcaatacttcttcaagatcttggataattagtggtgtggaaagtaaagaagtcacaggttgggacatttagacaagagtgaatcacacacgaggaatgtgttcattcttttattgtccgttgttttaacctgactgaatacaagatcaacaagagcactgtactcctggcaattattacatatgttagaacatggattttgcactgtagacaacatttaacaccagtctatggggtactgcattgctttttataaagttcaaaataaagatttattttcaaacaagtgact
